United States Patent Application Publication US 2024/0131193 A1 - sequence listing, part 2

SEQ ID NO: 859 - DNA, 4567 bp, Homo sapiens
  source 1..4567: mol_type = genomic DNA
agaccaggtagtcgctgcccagccggtcaggacgtgggacgcaaggggcaatcctgcccggttcgcaggtccgaggcgggcgcggtggcccttcgggccccgccccgccccgccccgccccgccccgcccaccggcagcccggccacgacccaagcggaggccgcgccgacgcctgcgcaatgtatgcggagagccaccaccgcctccggtcccgactccgatgatggcggacggcgccgcagctggcgctggcggcagcccatccttgagagagctgcgggcacggatggttgctgcagcaaacgagattgctaaggaaaggaggaagcaagatgtggttaatcgtgttgcaacccattcctcaaatataagatcgacatttaaaccagtaatcgatggatccatgcttaaaaatgacataaaacaaagattagcaagagagcgcagagaggagaaaaggagacagcaagacgccaataaagaaacacaactacttgaaaaagaaagaaagaccaagctccaatatgaaaaacagatggaggaaagacagagaaagctgaaggagcgaaaagagaaagaagaacaacggagaatagctgcagaagaaaaaagacaccagaaggatgaagcacaaaaggaaaaatttacagccattctttatcgtactttggaacggaggagacttgctgatgattatcagcaaaaaagatggtcatggggaggctctgcaatggcgaattctgagagcaaaactgccaataaacgatctgcatctactgaaaaacttgaacagggtacttctgctttaatcagacaaatgcctttgtcatctgcaggccttcaaaattccgttgccaaaaggaaaacagacaaggagagaagctcatctttaaatagaagagatagtaacctacattcgtctactgataaagaacaagccgaaaggaagccacgtgttacaggcgtcaccaattatgtaatgcagtatgtcactgtacccttgcgtaaatgtactagcgacgaattgagggctgttatgtttcccatgtcgacaatgaaaatacctcctcaaacaaaagtagaagagtctcccttggagaaagtagagacacctcccaaggcaagtgtggatgcacccccccaggtgaatgtggaagtattctgcaacacaagcatggaagcgtcccccaaggcaggtgtgggcatggcccctgaggtgagcacggactcattccctgtggtgagcgtggacgtgtcgcctgtggtgagcacatatgattctgagatgagcatggacgcatcccccgagttgagcatagaagcactcccgaaggtggacctggaaacagttcccaaggtgagcatagtagcatccccggaggcgagcctggaagcacccccggaagtgagtctggaagcactgccagaggtgagcgtggaagcagccccagaggggagcctggaagcacctcccaaggggagcgcagaagtagcccccaaggagagtgtgaaagggtcacccaaggagagcatggaggcatctcctgaggcgatggtgaaagcatcccccaagacatcccttgaagcaagcatggaagcatctcccaaggcaaaagcgagagacgctccaaagaaatcagaaatggacaaacaggccttaatccctattgccaagaagcgtctatcatcatacactgagtgttataaatggtcatcatctcctgaaaatgcttgtggtctgccgtctcccatcagcactaacaggcaaatccaaaagaactgccctccatcaccattaccacttatttcaaaacagtcaccacagacttcttttccttataaaataatgcctattcaacacaccctgtctgtgcaaagtgcatcaagtactgtcaaaaagaaaaaagaaacagtttctaaaaccactaacagatgtgaggctttgagccaaaggcatatgatctatgaagagtctggtaataagagtactgcaggtattatgaatgccgaggcggcaacaaaaattttgacagaattgcgccgccttgctcgtgaacaaagagaaaaagaggaagaagaaagacaacgggaagaaatgcagcaaagggtcattaagaaatcaaaagacatggcaaaggaagcagttggaggccaagcagaagaccacttgaaactcaaagatgggcagcaacaaaatgagactaaaaagaagaaaggatggctggatcaggaagaccaggaagcaccactgcagaaaggggacgccaaaataaaagctcaagaggaagctgacaaacgcaagaaagaacacgagagaattatgttacaaaatttacaagaacggttagaaaggaaaaagagaatagaagaaattatgaagcggacaagaaagacagatgtgaatgcctcaaaggtcacagaaacatccagccatgacatatatgaagaggctgaggctgacaacgaagaaagcgacaaggactcattgaatgaaatgtttccatcagccattctaaatggcacaggctcacctaccaaatttaaaatgccgttcaacaatgccaagaaaatgacacacaagctggtatttctagaagatggtaccagccaggtccgtaaagagccaaaaacatattttaatggcgatttgaaaaacttcagacaaaaaagcatgaaagacacttcaatacaggaagtagtttcaagaccatcttccaaaagaatgaccagtcacacaacgaaaaccagaaaggcggatgaaaccaacaccaccagcagatcctctgcacaaacaaaatctgaaggattccatgacatcttgccaaagtcctcagacacctttagacaataagagaagaagcaaacctgtttctcctcatttggatatgtaaaccttactcagcctgggagatgaatacatcttccactctggataactcaactcctgggcccatcagtcctcaaatttttctgcttctgacttgaacctggtaaaggaagtgacaccgaaaaattgaaagaaactgtcaaaaggccactttgatgtatatctcagatgttaaagtcatcttattctcttgtgtctaagcaagagttctaagtaaagagtggtttttgttttctttggaaaatcatcattgtctctcattcttgtgttgtcccaccaatgtgtttgctggagtgagtgcatcaaggatgctttcctgaaactgtaactgtggagtttctagaagaatctgattgcagaactaattctctttcagtatatatttgaaatcttaaagtaatgctttttctttttctttttcttttttttttttttgagacggagtcttgccctgtcgcccaggctgcagtgcagtggcacaatctcggctcactgcaacctccgcctcctcatctcaagcaattctcctgtctcagcctccccagtagctgggattacaggcatgtgccaccacacctggctaatttttttgtattttagtagagatagggttttaccatgttcaccaggctagtctcgaaatcctggcctcaagagatccacccgtcttggcctcccaaagtgttgggattacaggtgtgagccactgcacccagccaagtaatgctttttctgtgtaccagtgacaattttgacagctaaaaactcacagttgatcttgtagagaacagaatagattatgcaagggccgcaggatcgctcacaagagctgtcagattgtttctaatataaaaataccaaaggttgcaaaatccagcaaattgtattttactgtgatatatgtatatttttaactctacccatctgtgccagtgagtacacaggcactaataacctgaaatgctgggagtcctgtaaagccccatcttggaacagtcagcacctttcatgctcttgtcagtgtttccttttgaaggacatattggtgtttatctacagaaacatatattatttttattgtgtacataaaggagtatatggctgttgtcccgtggggtatgtttaattcctctaaatgtttaaagtacttttctgcctgtactctccagttctgtcgttgagtatacactcaggcttgagatacaaccaaaatttgcttgcctttctctagccactggctgccagtgagttcgtgtgatgggcacacagaaatgcacacagatgtacatacacgtatgtatgcacacacagtatatgattccataaaattcaaatgcagattaattctcctaatgagttttcagtgttgaatcgtaaatagtctgaagcaggccagtgttccttttggctgccagtcttggattagtaaaaggaggtaattctttcagattccctggttctttgccactcagagtattgtacttttgatatagaatagagaaggttacctttggtttaaaaactatttttatatactagctctttcatgtataaaacagagacaatcatcctaacaaaagagttcctgttatttttctgcacaaatgtcttgtgttgaaacactgttacagttccatataaatgtgtgctatataaaataaactttggagataaaacaa

SEQ ID NO: 860 - DNA, 6817 bp, Homo sapiens
  source 1..6817: mol_type = genomic DNA
atgtgctcgacgcccggaatgccggcgccgggggcctcgctggccctgcgggtgtccttcgtggacgtgcatcccgatgtgatcccggtgcagctgtgggggctggtgggcgagcggcggggcgagtacctgcggctgagccgggaaatccaggaagcggcggccacgcgcggccagtgggcgctgggcagcgcctcggcctcgcccggcgagctgtgcctggtgcaggtcgggcttttgtggcaccgctgccgcgtggtcagccggcaggcacaggagagccgtgtcttcctgctggacgagggccgcaccatcacggccggagcaggctcgctggcgcctgggcgcagagagttcttcaatttgccctcggaagtgctgggctgcgtgctagcgggcctggtgccggcaggctgcggcgcgggctcaggcgagccgccgcagcactggcccgccgacgccgtggacttccttagcaaccttcagggcaaggaggtgcacgggtgcgtcctggacgtgctgctgctccatcgcctggtcctcctggaggtgcctgatgtgttccaacagatgcgggagctgggcctggctcggcgggtgcccgacagcctcttccgttcgctgctggagcgctatctcacagcggccactgctagcgtgggctccggggtcccggttctctcgcgagtcccgctcaagcaaaagcagcctggtctggattacttctatccccagctgcagctgggcgtgacggaggccgtggtcataacccaagtgtgccatccccaccgcattcactgccagctccgcagcgtctcgcaggagatccaccgcctctccgagagcatggcccaggtataccggggttccacggggacaggggatgagaactctaccagtgccacctgggaggagagggaggagagcccagataagccgggctctccgtgtgcatcctgtggcctggatggacattggtacagagcactgttgcttgagacttttcggccccagcgctgtgcccaggtgcttcatgtggactatggaaggaaggagttagtgagttgcagcagccttcggtacttgctgcctgaatattttcgaatgccggtggtgacctacccttgtgctttgtatggactctgggacggtgggagaggctggtctcggtcacaggtcggtgacctgaagacactgatactaggcaaggcagtgaatgcaaagattgaattttattgctcctttgagcatgtgtattatgtcagcctgtatggagaagatgggattaatctgaaccgtgtgtttggagtacagtcgtgttgcttggctgaccgagtccttcagagccaggcaacagaggaggaggaaccagaaacatctcagtctcagtctcctgctgaagaagtagatgaagagatttcactcccagccttaagatctatcaggttaaagatgaatgccttctacgatgcgcaggtagagtttgttaaaaatccttctgagttttggattaggttgaggaaacacaatgtcaccttcagtaagctgatgaggagaatgtgtggtttctattcctctgccagtaagctggatggtgtagttttgaaacctgaacctgatgacctttgctgtgtcaagtggaaagaaaatggttattatagggccatagtcaccaaattggatgacaagagtgtggatgtattcttagttgaccgaggcaattcggaaaatgtggactggtatgacgtaaggatgctgcttcctcagtttaggcagctaccaatattggctgtgaagtgcaccctggctgatatttggcctttgggaaaaacttggagccaggaggcagtttccttttttaaaaagactgtgctccacaaagaattagtcatccatattcttgataaacaggatcatcaatatgttattgagattcttgacgaatcaagaacaggggaagaaaacattagtaaggtaattgcccaagctggatatgccaagtatcaggaatttgaaacaaaggaaaatatcctggtaaatgcccactccccagggcatgtttcaaaccactttactacggagagtaacaaaataccttttgccaagactggagaaggagagcagaaagccaagagagagaataaaaccacatctgtttcaaaagctttgagtgacacaacagttgtaacaaatggttcaactgaactagttgtgcaggaaaaagtgaaaagagcatctgtttattttcctcttatgcagaattgcttggaaattaagccaggctcctctagtaaaggagagctggaagttggaagtacagtagaagtcagagtgtcttatgttgaaaaccctggctatttctggtgtcagctgaccaggaacatacaaggacttaaaactctaatgtctgatattcagtactattgcaaaaatacagctgctcctcaccagagaaacacccttgcttgtttggctaagcgaacagtaaacagacagtggtccagagcacttattagtgggatacagtctgtggagcatgtcaatgtaacatttgtagattatggagacagagaaatggtatctgtgaagaatatttattcaattagtgaagaatttctgaaggttaaggcacaggcttttaggtgcagtctttataatttaattcaaccagttggccagaatccctttgtttgggatgtaaaggcaatacaagctttcaatgaatttatagataatgcatggcaaaaaaatctagaattaaaatgtacaatatttgctctggcttcaattaatgaagaactgtttaacattgtggatttgctaaccccctttcagagtgcatgccatttcttggtagaaaagagacttgcaagaccagtaaaacttcagaagcctttggagtcctctgttcagctacattcctacttctattctacacatgatatgaaaattggaagtgaagaattagtttatataacgcatattgatgacccttggacattttattgccagctggcaagaaatgcaaatattttagaacagttgtcatgtagtattacacaattaagtaaagttttgctgaatttaaaaacatctcccttgaaccctggaaccttgtgccttgccaagtatactgatggaaactggtataggggcatagtaatagagaaagagccaaagaaagtcttctttgttgattttgggaatatttatgtagtaacaagtgatgatctgcttccaatacctagtgatgcatatgatgtcttacttttgcccatgcaagctgtcagatgttcattatctgatattcctgatcatataccagaagaagtggtggtgtggtttcaggagactattttagataagtcattgaaggctttagttgtagcaaaagatccagatggaacactgattatagaactatatggtgacaatattcaaattagtgctagtattaataagaagttggggctacttagttacaaagatagaataagaaaaaaagaaagtgaagtcctctgttctacaactgaaactcttgaagaaaaaaatgagaatatgaagttgccatgtacagagtatttaagtaaatcagtagggtacaagttacctaataaagaaattttggaagagtcatataaacctcagatcaactcatcatacaaggaactcaaacttttacaaagtttaacaaaaacaaacttagtcactcaatatcaagactctgtgggaaataaaaatagtcaagtgtttccattaacaacagaaaagaaagaagaaatttctgctgagacacccttgaaaacagcaagagtagaagctactctttcagagagaaaaataggagattcatgtgacaaagatttgcctctgaaattttgtgagttcccacagaagactataatgcctggatttaaaacaactgtatatgtttctcatataaatgacctttcagacttttatgttcaactaatagaagatgaagctgaaattagtcatctttcagagagattaaacagtgttaaaacaaggcccgaatattatgtaggtccacctttgcaaagaggagatatgatatgtgctgttttcccagaagataatttatggtatcgtgctgtgatcaaggagcaacaacccaatgaccttctctctgtgcagtttatagattatggcaatgtttctgtggttcatactaacaaaataggtaggcttgaccttgttaatgcaatattgccggggttgtgcattcattgctccttgcagggatttgaggttcctgacaataaaaattctaagaaaatgatgcattacttttcccaacggaccagcgaggctgcaataagatgtgaatttgttaaatttcaagacagatgggaagttattcttgctgatgaacatgggatcatagcagatgatatgattagcaggtatgctctcagtgaaaaatctcaagtagaactttctacccaagtaattaaaagtgccagttcaaagtctgttaacaaatcagacattgacacttcagtatttcttaactggtataatccagaaaaaaaaatgataagagcttatgccactgtgatagatggacctgagtacttttggtgtcagtttgctgatacggagaaacttcagtgtttagaagtagaagtacagactgctggagaacaggtagcagacaggagaaattgtatcccatgtccttatattggagatccttgtatagtaagatacagagaagatggacattattatagggcacttatcactaatatttgtgaagattatcttgtatctgtcaggcttgtggactttggaaacattgaagactgtgtggacccaaaagcactctgggccattccttctgaacttctgtcggttcccatgcaagcctttccatgttgcctctcagggtttaacatttcagaaggattatgttctcaagagggaaatgactatttctatgaaataataacagaagatgtgttggaaataacaatactagaaatcagaagggatgtttgtgatatccctttagcaattgttgacttgaaaagcaaaggtaaaagtattaatgagaaaatggagaaatattctaagactggtattaaaagtgctcttccctatgaaaatattgactcagagataaagcagactcttgggtcctacaatcttgatgtaggacttaagaaattaagtaataaagctgtacaaaataaaatatatatggaacaacagacagatgagcttgctgaaataactgaaaaagatgtaaacattattggaaccaaaccaagtaacttccgtgaccctaaaactgataacatttgtgaagggtttgaaaacccctgcaaagataaaattgatactgaggaactggaaggtgaattagagtgccatctggttgacaaagcagagtttgatgataaatacctgattacaggatttaacacattactaccacatgctaatgaaacaaaggagatactagaactgaattcacttgaggtgccgctttctcctgatgatgaatcaaaagaattcttagaactggaatctattgagttacagaattctctggtggtggatgaagaaaaaggggagctaagcccggtgccaccgaatgtgccactctcccaagagtgtgtcacaaaaggcgccatggagctatttacactgcagcttcctctcagctgtgaagctgagaaacagccagaactagaactacctacagcccagctgcctttagatgacaagatggatcctttgtctttaggagttagtcagaaagcacaggaatccatgtgtactgaggacatgagaaagtcaagttgtgtagaatcttttgatgaccagcgcaggatgtcattgcatctacatggagcagattgtgatcctaaaacacagaatgaaatgaatatatgtgaagaagaatttgtagagtataaaaacagggatgccatttcggcattgatgcctttgttctctgaggaagaaagcagtgatggaagcaagcacaataatggtttaccagatcatatctcagctcaactacagaacacctacactctgaaagcctttactgttggatctaaatgtgttgtgtggtcaagtctaagaaacacatggtctaaatgtgagattttagaaacagctgaagaaggaacaagggttttgaacctttcaaatggtatggaggagatagtgaaccctgagaatgtctggaatggcatacccaaattggataagagtccacctgagaaaaggggtttggaggtgatggagatttaaccgtggatctatagctgtggccaatcagtcagaagctgcccttgaacaagtggcatcttacgcagaccaacagagtatttgagaaaattgaaaacatgtaaccacaagaagttgtcattttcaaaaacttctatataggtggaaaacaaattaggtctcaggttgatggtggggtgtgtttatagtgatcctgttatatatacagatctgggatctttcgtctttattgtcttacgtttctaattagttgggaggatttattttgctaaacagtttactaacacattacatttcaaaaactattttggtacctttcaaatacagtgtttaaattaaaatagaaaaataagggctcatgacaagtacattatttgattctacttaggatagctttttagcaggatctccttcagaatttttgtcttgactttgaatctttgcctgtttgtctaaacatttgactaacattctgtttgaatttggaagtattctaatacaagatttgaataaagtttatccttaaata

SEQ ID NO: 861 - DNA, 833 bp, Homo sapiens
  source 1..833: mol_type = genomic DNA
tggagcctttgcggcggcgctgcccctcccctggtccccgcgagctcggagggcccggctggtgctgcgggggccccgggaggttgaaaactaagcatggggaagagctgcaaggtggtcgtgtgtggccaggcgtctgtgggcaaaacttcaatcctggagcagcttctgtatgggaaccatgtagtgggttcggagatgatcgagacgcaggaggacatctacgtgggctccattgagacagaccggggggtgcgagagcaggtgcgtttctatgacacccgggggctccgagatggggccgaactgccccgacactgcttctcttgcactgatggctacgtcctggtctatagcacagatagcagagagtcttttcagcgtgtggagctgctcaagaaggagattgacaaatccaaggacaagaaggagggtctcactctgccacccaggctggagtgcagtggcatgatcacagctcactgcagcctcaacctcccaaggcttaggtggtcctcctgcctcagccccctgctaagactacaggtcaccatcgtggtccttggcaacaagtgtgacttacaggagcagcggcgtgtagacccagatgtggctcagcactgggccaagtcagagaaggtgaagctgtgggaggtgtcagtggcggaccggcgctccctcctggagccctttgtctacttggccagcaagatgacgcaaccccagagcaagtctgccttccccctcagccggaagaacaagggcagcggctccttggatggctgaagagctgccgttcctctttcacgatcccagccccatttcagtgtctg

SEQ ID NO: 862 - DNA, 3456 bp, Homo sapiens
  source 1..3456: mol_type = genomic DNA
gcccgctcggccgtggccgtgggagaggcgccgggaggctgcgggcgcggggctccggggcgggggcggcgcgaacggcgcggacggcgcgggcgcggggggctgggtcccggggcgctgctggggtggacccccccgcctcgaacttggtacgcgccagcgagaggccaggcccagcccgggcggtacaatagggttgggccgaggccgggactgggccggcgccgggcggggaacgggttcgcgaccgcagccgagagaccccgggcgaccggcacctccgagactcgcgggccacctgcctcgaccttccccggagcgcccccgcctccgagtcgctacttgccgggccgggccgggccgggcgtgatgcgccgcgggacccctgtcctggccactggccgccgccgccgccgccgctgagaccccgagacccccagtgacgccgcagccatggagagcggcccgcgtgcggagctgggggcgggcgcacccccagctgtggtcgccaggacccccccagagccaagaccttctccagaaggtgacccttcccccccaccaccaccaatgtcagccctggtccccgacactcccccggacacccctcctgccatgaagaatgccactagctctaagcagctcccactggaaccagagagcccctcagggcaggtcgggcctaggccagcccccccgcaggaagagtccccttcctctgaagcaaagagcagaggacccaccccaccagccatgggcccacgggatgccagacctcctcgaaggagcagccagccatctccaacagcagtgccagcctccgacagccctcccaccaagcaagaggtgaagaaggcaggagagagacacaagctggcaaaggagcggcgagaagagcgggccaagtacctggcggccaagaaggcagtgtggctggagaaggaggagaaggccaaggcgctgcgggagaagcagctccaggagcgccggcgccggctggaggagcaacgtcttaaagccgagcaacgccgtgcagccctggaggaacggcagcggcagaagctcgagaaaaacaaggagcgctatgaagcagccatccaacggtcagtgaagaagacgtgggccgaaatccggcagcagcgctggtcctgggcaggggccctgcaccacagctctccaggacataagaccaatcgcagcctgcagctgagcgcatgggagagcagcatcgtggatcgtctgatgacgcccactctctccttccttgctcggagtcgcagcgcggtcacactgccccgcaacggccgggaccagggtaggggctgcgaccctgggagaggccccacgtggggccgggcaggggccagcctggcgcgcgggccgcaacccgaccgcactcatccctctgcagccgtgccggtgtgcccgcgctcggcctccgccagccccctgacgccgtgcagcgtcacccgaagcgtgcaccgctgcgcccccgccggtgagcgcggggagcgccgcaagcccaacgccgggggcagccccgctccggtgcgccgccggccggaggcctcgccggtgcagaaaaaggagaagaaggacaaggagcgggaaaacgagaaggagaagagtgccctagcccgggagcgcagcctcaagaagcgccagtcgctgcccgcctccccacgtgcccgcctctctgccagcaccgcctctgagctcagccccaaatccaaggccaggccatcctctccctccacatcctggcacaggcctgcctccccctgccccagcccagggccaggccacactctgcctccaaagccaccgtccccccgaggcaccactgcatcccccaaggggcgggttcggaggaaggaggaggcaaaggagagccccagcgccgcagggcccgaggacaagagccagagcaagcgcagggccagtaacgagaaggagtcagcagccccagcctcaccggcaccttcgccggcgccctcgcccaccccagccccgccccagaaggagcagccccccgcggagacccctacagacgctgctgtcttgacctcacccccagcccctgctcccccggtgacccctagcaaaccaatggccggcaccacagaccgagaagaagccactcggctcttggctgagaagcggcgccaggcccgggagcagcgggagcgcgaggagcaggagcggaggctgcaggcagaaagggacaagcgaatgcgagaggagcagctggcacgggaggccgaggcccgggcggagcgggaggcggaggcccggaggcgggaggagcaggaggcacgagagaaggcgcaggccgagcaggaggagcaggagcggctgcagaagcagaaagaggaggccgaagctcggtcgcgggaagaggcggagcggcagcgtctggagcgggaaaagcacttccagcagcaggagcaagagcggcaagagcgcagaaagcgtctggaggagatcatgaagaggactcggaagtcagaagtttctgaaaccaagaagcaggacagcaaggaggccaacgccaacggttccagcccagagcctgtgaaagctgtggaggctcggtccccagggctgcagaaggaggctgtgcagaaagaggagcccatcccacaggagcctcagtggagtctcccaagcaaggagttgccagcgtccctggtgaatggcctgcagcctctcccagcacaccaggagaatggcttctccaccaacggaccctctggggacaagagtctgagccgaacaccagagacactcctgccctttgcagaggcagaagccttcctcaagaaagctgtggtgcagtccccgcaggtcacagaagtcctttaagagggtttgccttggatccgggcacagttgtgagggctcctctgcatcacctaccaggatgtctggaggagaaaaagacagaacaaagatggaagtggcctgggcccctgggggtgggtcctctctgttgtttttaatctgcaccttatagactgatgtctctttggccggagccagatctgcccctcagtgcattcgtgtgctcgcacgcgcagacatcccttctcccccatacacacatatacactcacagcctctctggcctcttcccttggggaggggccacctgtagtatttgccttgatttggtggggtacagtggatgtgaatactgtaaatagcttgtgctcagactcctctgcgtggagagggtgggtgcaggaggcagaccctccccccaaagccccctggggagatcttcctctctctatttaactgtaactgagggggatcccaggtctggggatgggggacaccttgggccacaggatactggttgcttcaggggtacccatgccccctgccctcgcctggaatcagtgttactgcatctgattaaatgtctccagaaataaagaataattctgccaa

SEQ ID NO: 863 - DNA, 2428 bp, Homo sapiens
  source 1..2428: mol_type = genomic DNA
gttacttcatagcattctgaagacctgtccaccaattacagggctccttactggaaaaaccaactgctggggagtgccaagagtccctagcaacaccctgcagcgtttgaaatctgaggggaaaagactgtagtcagcccttagtggatgagagcgcctatgctccagaaacagcaggctcccaggatggacaccccgccccctgaagaacgcttagagaagcaaaatgaaaaactgaacaaccaggaagaggagacggagtttaaggaactggacggtctgagggaagccttggcaaacctccggggactgtcagaggaggagaggagcgagaaggctatgcttcgctcccgcattgaagagcagtcccagctcatctgcatcctgaagcggaggtcagatgaggccctggagcgctgccagatcctagagctgctcaatgcagagctggaggagaagatgatgcaggaggctgagaagctcaaggcccagggtgagtacagtcggaaactagaggaacgctttatgaccctagcagccaaccacgagttgatgctccgcttcaaggatgaatacaagagtgagaacatcaagctgagggaggagaatgagaagctgaggctggagaatagcagcctcttcagccaggctctgaaggatgaggaggcgaaagtattacagctcacagtccggtgtgaggccctcactggggagctagaaacgctgaaggagaggtgtgctcaggatgcctgccaggcacaggcgcgcgagaaggagctgctggagctacagagccagcaggcctgcacccacaccaaggagacagaacagctgcgcagccagctgcagaccctcaagcagcagcaccagcaggctgtggagcagatagctaaggcagaggagacacacagcagcctgagccaggagctgcaggccaggctgcagaccgtcactagagagaaagaggagttgctgcagctgtccattgaaaggggcaaagtgcttcagaacaaacaggcagagatctgccagcttgaggaaaagttggagatagcaaatgaagacaggaagcatgcgctggagcggtttgagcaagaggcagtggctgtggacagcaacttgagagtcagggagcttcagcgcaaagtagatgggatccagaaggcctacgatgaactcaggctgcagtctgaagccttcaaaaagcacagcttggatcttttaagcaaggagagagaactcaatggcaaactccgccatctctctccatagggaagtttctgcttcctctggcctgcaattcagaattcaaatatttgcgtcttagcattatggcaagagtaaagatgatatcccatttattatactttcaagcacaaaaggcaactcaaagaaaagctactttactatgatattgttgttattattgtaaagccattattaattttcatttctacacctagaatacacaagatttgccagatttccttctgtgccttagaaatcttaaatttactagtagtatcttctcctacccataagttattaattctcaacctcagatatcttcatttatgttaggattttaaattagcagcttctatgatttaagtcaatctaagtgcagtgagatgtgccattgtgaaaaataattagcacaattacccactgtagatagttaggcttatagtctcccatagttgagattgtaagcaaacatgtatcagcataatagcatgaatgctttgcagaaaaaaaaaagtgtctgactttattttattttgcgctagcttggaaaatgattgagatcaagttctttaacaaagaaggtcaattttattctgtatgagcaatatgattcaaataagttatacaaaacaacttttattttttctgcaagcttagataatattccattttttggttttctctttaaaaagaggatttagatgtgcaataatgcaaatatcagtagcttaatttaatattgcacgatatgctaatagacaattagacaatttggggtaacaaatcatagcagacgtgatctatagagtaactcagaaattgttttgtttctattagcatattttttgtaattaagattttccttttttaaaaaaatctaagctgaacgtgtgtatgtatgcttgcagcatttttgtagtaatacctacattttgtaagaatagttataaaaacatgatatatatatatgtaaagttcttaaaaaagttctcaaaggtagttatattttcttatcttcctgtaattaggtattgatatataaacattattatgaatacctctcaaaatagattgtaatgtaatatttttctcacccattttgctgaaggctaccaagttacataatgaatttacttaaaaaatatgacttggtgcctttttagtaaaaccatttccaagc

SEQ ID NO: 864 - DNA, 2344 bp, Homo sapiens
  source 1..2344: mol_type = genomic DNA
atttacgtgccgtgcgtcgccttggaaacagaggagcatccgcgacacccccgggagacccaccccagctgctgctgccacactcgcgggcgctgcccggtaatggcctgggggagtcccgagtccgacgcgccgctggcctcagcctggacgcggacccctccgcgagcgcgtctgtgacccacggaaccggcaggcgctctctgcttgtggcgcccagagggcggcgctgacacgggcgcgatccgggaggcgaggcagggcagggcactttcgtcccggggcgatcccaagagacgccggctctgggaccctcgccgggtcctcgtcccgcagcctcttctcggcctcccgcgatcctgcctgcgccctctgcccaggactcgtctctcacgtcggctccccgccagtctcgggagcctccgcttccctcggctcccgctagcccctcccgggacctctccccctccaccccctcccccaccccggaggccgggctggacgcgacccagagcctccgccacccgcttctgccactcaatggaggacggtctgctggagatcatgaccaaggacggcggcgacatgccggcgcccctggaggtgtccaccgtgccggcagtgggggacgtgatctccggggagtacaacggcggcatgaaggaactgatggagcacctgaaagcccagctgcaagccctgtttgaggacgtgagggccatgaggggggccctggacgagcaggcctcgcacatccaggtgctctcggacgacgtgtgcgccaaccagcgagccatcgtctccatgtgccagattatgaccactgcgccccgccagggcggcttgggcgtggtcggcggcaaggggagcttccagagcgacccccaagagccggagactccttcgcctgggatcggggacagcggcttgctgggtcgcgatcccgaggacgaggaggaagaggaagaagagaaggagatgcccagccccgccacaccctccagtcactgtgagcgccccgaaagcccctgtgctggtctccttgggggggacgggccacttgtggagcccctcgacatgcccgacattaccctgctgcaactggagggcgaggcctccctgtgaggggactccgtggggcactaccttcccgggctgtctttgggtttccgagtgcatgacgcgagggggactgaacggcgcggtgcggcatgcttcacttggacagctgctcttgtgggtcaggcagagagagactccctcgaggaaggatttgtagggtgaaggactttgggagcatcgagaattctttctgcccaactaagcgaattatagcgaactgcggaaaggtgaggctccgggagaggaagcgcccatctctggactcccatccatccctatcctgtcctttcccccttcccagacaacaggagaacccgtgaattgtgtaaataaaattctgctttttctattctgaaaaaggacttacctaggaccatggcaaataatctctaacaatttacctggaaattaaggaattgggggtattttgttctggcaacaggaaatttacccttctgctgaaatccaagatattcagtgctctgcagaagcctctccccctcacagatctctgcggctgctgattggtaaaggaagcttgaggagggaactgcagccctaggaatctgggtgaatggggttccaagggcccctgggctgggaggagctggctatgaatgtgcatgaagacataatagctcaacctctaggattttgcatgcagagcggatcctgccttgtcactgacttcatctgggattgcttttccactccctggggcttagagaacaaagagcccggttcacaggcagagactcgggggtgctcagcagcagcccagatttaggggacatttgagggactcttggggccgcagccaaaaactgtctctcctggctacacctgcttaacttcagttcctttttctgtcaatatgtccttgcccactgcctctcggtgttgccttcataatgtcttgtgtgtgttatgtgtgtctacttgtgtagtagtgtgtgagccctcaggggcagggcttgtggctctggtgttaggttcaggggcttcagacccttctacgagctccaagctatcaatggcgcttttctctccctcttcccccaaccagggcatggagcatgtggctgtcctgaggttcttttactgatgtgccgcccttccacctcctcaagtggtgactttgtgtgccctccccctcctttgtgtattccttctcaatgctttccttggtgttaaccttaataaaaaggcgtcatctcccctc

SEQ ID NO: 865 - DNA, 4619 bp, Homo sapiens
  source 1..4619: mol_type = genomic DNA
gtccaacgccagcaggcttccgggcccggagtgggcggtgggactcggggtcccagagagccgtgcgcgggccgcgacgccgagcaccgccctcgccgtcgcctccgggctttctccggtcgctgccgccaccaccgttgcttcgcgggctgggaggcccggggtccccgggcgaacagaggctgcgggtgggagccttcgcgggcgctgcagagcgggccgggggaggccgggatggagccccgcggagtggactgacgccgcaggggcgagctagccggctccgcgcctctccgcgggatccagacgcctcctggggctgctggcggagggtctgaggcggcgcggccatggctcacctccggggatttgccaaccagcactctcgagtggaccctgaggagctcttcaccaagctcgaccgcattggcaagggctcgtttggggaggtctacaagggcatcgataaccacacaaaggaggtggtggccatcaagatcatcgacctggaggaggccgaggatgagatcgaggacatccagcaggagatcactgtcctcagtcagtgcgacagcccctacatcacccgctactttggctcctacctaaagagcaccaagctatggatcatcatggagtacctgggcggcggctcagcactggacttgcttaaaccaggtcccctggaggagacatacattgccacgatcctgcgggagattctgaagggcctggattatctgcactccgaacgcaagatccaccgagacatcaaagctgccaacgtgctactctcggagcagggtgacgtgaagctggcggactttggggtagcagggcagctcacagacacgcagattaagaggaacacattcgtgggcacccccttctggatggcacctgaggtcatcaagcagtcggcctacgacttcaaggctgacatctggtccctggggatcacagccatcgagctggccaagggggagcctccaaactctgacctccaccccatgcgcgtcctgttcctgattcccaagaacagcccacccacactggagggccagcacagcaagcccttcaaggagttcgtggaggcctgcctcaacaaagacccccgattccggcccacggccaaggagctcctgaagcacaagttcatcacacgctacaccaagaagacctccttcctcacggagctcatcgaccgctataagcgctggaagtcagaggggcatggcgaggagtccagctctgaggactctgacattgatggcgaggcggaggacggggagcagggccccatctggacgttcccccctaccatccggccgagtccacacagcaagcttcacaaggggacggccctgcacagttcacagaagcctgcggagcccgtcaagaggcagccgaggtcccagtgcctgtccacgctggtccggcccgtcttcggagagctcaaagagaagcacaagcagagcggcgggagcgtgggtgcgctggaggagctggagaacgccttcagcctggccgaggagtcctgccccggcatctcagacaagctgatggtgcacctggtggagcgagtgcagaggttttcacacaacagaaaccacctgacatccacccgctgaagcgcactgctgttcagataggggacggaaggtcgtttgtttttgttctgagctccataagaactgtgctgacttggaaggtgccctgtgctatgtcgtgcctgcagggacacgtcggatcccgtgggcctcacatgccaggtcaccaggtcaccgtctccttccacccctgcagtgtgctgttgtgcacgtcagggacgctgttctctatgcccactgccctcctccctctcctggcccagcagtattgctcacgggggctccagccgccggcgtggccctcatgagctacgcctgggtcttctgcagactcatgcagccctatggccgctcagaccaaggcgcagagcaactatcagggcagctctgcctcctcctcccatgaggtggggagaggcaacagggcagcccccagaggagtgtcctggccgctgtcctcccggggcccatgatggccatagatttgccttgtggtgttggatcaggtactgtgtctgctcataagtacttgtgtcatccagaatgttttgttttttaagaaaattgaattacttgtttcctgaaatattctgaggttaatatgttagttttcatagaacattgagaggcccctgccactttcaataaagacctgacttggagacatgcaggtgtgtgtggtggggcccgggccatgcggggctgcagcgtccctggtcccgagtcctcatcacagcacgcagagacggcagcccagccccccttcgaaacttccctgtgacggattcctgggctctgcttggcccaccggaagaacagagcaggcagaggagaatgcaggtggggagatgctgtttgtttatttttaatcaaatgtgtgtgaacaaagcagtcgcccatctacttcccgttggaaggaatgctgggcagtaataaattagacggccccaccctcccagggcacagggggactttggtttctgcttctctagaggtacatggggaacaagcgtggcttctgccagacttgtttagctgtgacctgcagggcaggcccctggggctgccacttggttcaccagatggaaggtcagcatggctgtgccacgcttgtctgagagggtcctggcagtgggtacgcagggtgtatggcagggcctcttttccagtgcttgctctaggccagtcctcggcagggaccctgctctggggagagaggcagggtgtgcccaggctttggtccgatgccgagagcactgctcaggccttgtctgcgtctttgagccaggggcctgggagctgtggcttgagcggctccgcgctcaagactcgcacatttttcccagggccccagatagctgctggcatgcactaggtcctgggtggggggatgaagcccctcccagatgttacatgaggcccacccacactgctggtgccagtggggatccagtgagaccacagccacttcccatctgttgagaagcctcaggacagaggtcacctctgtgtcctgctgttctttgtagttgtgtccaaacctgggcaggttgagcgtcattcctccttccccctgaccatcccctccagccctgaggagggttgggggccatcctgcacgatgcttggggccctcccggctgagctgctggccccctggatcacctccatccacctggaggagagggcggccatcagaccagtgagccatcttgtgctcagacactgtcccaagaacaacccaggatatgggacaagcaggacaaaagaagggttaaaaacctggggccgggtgcggtggctcatgcctataatcccagcactttgggaggctgaggcagatggatcacttgaggtcaggagttcgagaccagcctggccaacatggtgaaaccctgtctctactaaaaatacaaaaattagccaggcggcgtggcgtgcatgcctgtaatctcagttactcaggaggctgaggcagaagaatcgcttgaaccctggaggtgcaggttatagtgagccaagattgtatcactgcactccagcctgagtgacagagggagacgccatctccaaaaaaaaaaaaaacaaagcattgctgttttttggaaatgctggaagcattgctcagcccttcctttccagggcccagaaaacttgcctccaccaccatgagtagaaatgggagctgagcggacatcgaaatgggcagctgaccagggctgcctcctgcaaaattacctttcaaatgtgtacttgctctcagcccggaagaagtagacgtgggatttgaactggagcttgaaaacatagtctttgtgtatgccatcggcctccctggggatgctcacgctgtagcccagcagcgggaggctggccagtgggtagtcatcctgcaagacagcatagggacacgggttccaggggctgggttgccacagggaatgcccattcctctgctacctgcacaacggtggcacgtacaaatgcccacgggccaagggagccagtttccctgttcacacagcacagggtgtgtgggcaaagcatgggagggcagaaccaaaatacaaaagggacacaggtgagcagggttaagtgtctgtctgctagcatcacctgcattgggctccagtgaaactccagtacctgatgagttttgtagaagaacaaacagaagttggtaaagacgacccagagcttctgccagccatgactgtttttgaactttcttagcagatatcctgaaagctggttctgtcaataaaggaaaaatgcaggtgcattaaccagcacccaggaccccttgtgggagtgggtttgctccccaagactaagcctctgcatgctttctccagctgaggccttggttttacctctggactgctatgaacagcagctttatcagtacttaagtccaacagaagcatgttaaaaacctagagtgacattccaggcaccaagtaaagtgagttccctttccctgtgcacaataaagtcagtgttcagtaa

SEQ ID NO: 866 - DNA, 2223 bp, Homo sapiens
  source 1..2223: mol_type = genomic DNA
ggaaaattacccggtatcgttagagctacaccaaaattgcattgagccaaacttgccaccaagagcccaacaatcaccatgatgctgagcacggaaggcagggaggggttcgtggtgaaggtcaggggcctaccctggtcctgctcagccgatgaagtgatgcgcttcttctctgattgcaagatccaaaatggcacatcaggtattcgtttcatctacaccagagaaggcagaccaagtggtgaagcatttgttgaacttgaatctgaagaggaagtgaaattggctttgaagaaggacagagaaaccatgggacacagatacgttgaagtattcaagtctaacagtgttgaaatggattgggtgttgaagcatacaggtccgaatagccctgatactgccaacgatggcttcgtccggcttagaggactcccatttggctgtagcaaggaagagattgttcagttcttttcagggttggaaattgtgccaaatgggatgacactgccagtggactttcaggggcgaagcacaggggaagcctttgtgcagtttgcttcacaggagatagctgagaaggccttaaagaaacacaaggaaagaatagggcacaggtacattgagatcttcaagagtagccgagctgaagttcgaacccactatgatccccctcgaaagctcatggctatgcagcggccaggtccctatgataggccgggggctggcagagggtataatagcattggcagaggagctgggtttgaaaggatgaggcgtggtgcctatggtggagggtatggaggctatgatgactatggtggctataatgatggatatggctttgggtctgatagatttggaagagacctcaattactgtttttcaggaatgtctgatcatagatacggagatggtgggtccagtttccagagcaccacagggcactgtgtacacatgagggggttaccttacagagccactgagaatgatatttataatttcttctcacctcttaatcccatgagagtacatattgaaattggacccgatggcagagttaccggtgaggcagatgttgaatttgctactcatgaagatgctgtggcagctatggcaaaagacaaagctaatatgcaacacagatatgtggagctcttcttaaattctactgcaggaacaagtgggggtgcttacgatcacagctatgtagaactttttttgaattctacagcaggggcaagtggtggcgcttatggtagccaaatgatgggagggatgggcttatccaaccagtctagttatggaggtcctgctagccagcagctgagtggtggttatggaggtggttatggtggtcagagcagtatgagtggatatgaccaagttctgcaggaaaactccagtgactatcagtcaaaccttgcttaggtagagaaggagcactaaatagctactccagatataaaagctgtacatttgtgggagttgaatagaatgggagggatgtttagtatatccagtatgattggtaaatgggaaatataattgattctgatcactcttggtcagcttctctttctttatctttctttctccttttttaagaaaacgagttaagtttaacagttttgcattacaggcttgtgattcatgcttactgtaaagtggaagttgagattattttaaaacttcaagctcagtaattttgaacactgaaacattcatctaggacataataacaaagttcagtattgaccataactgttaaaacaatttttagctttcctcaagttagttatgttgtaggagtgtacctaagcagtaagcgtatttaggttaatgcagtttcacttatgttaaatgttgctcttataccacaaatacattgaaaacttcggatgcatgttgagaaacatgcctttctgtaaaactcaaatataggagctgtgtctacgattcaaagtgaaaacatttggcatgtttgttaattctagctttttggtttaatatcctgtaaggcacgtgagtgtacactttttttttttttaaggatacgggacaattttaagatgtaataccaatactttagaagtttggtcgtgtcgtttgtatgaaaatctgaggctttggtttaaatctttccttgtattgtgatttccatttagatgtattgtactaagtgaaacttgttaaataaatcttccttttaaaaactggaaaaaa

SEQ ID NO: 867 - DNA, 1468 bp, Homo sapiens
  source 1..1468: mol_type = genomic DNA
aagatggcggctgccgcggagtgcgatgtggtaatggcggcgaccgagccggagctgctcgacgaccaagaggcgaagagatatgtgtcctaaaaatgctagctattatggtaatcgagcagccaccttgatgatgcttggaaggttccgggaagctcttggagatgcacaacagtcagtgaggttggatgacagttttgtccggggacatctacgagagggcaagtgccacctctctctggggaatgccatggcagcatgtcgcagcttccagagagccctagaactggatcataaaaatgctcaggcacaacaagagttcaagaatgctaatgcagtcatggaatatgagaaaatagcagaaacagattttgagaagcgagattttcggaaggttgttttctgcatggaccgtgccctagaatttgcccctgcctgccatcgcttcaaaatcctcaaggcagaatgtttagcaatgctgggtcgttatccagaagcacagtctgtggctagtgacattctacgaatggattccaccaatgcagatgctctgtatgtacgaggtctttgcctttattacgaagattgtattgagaaggcagttcagtttttcgtacaggctctcaggatggctcctgaccacgagaaggcctgcattgcctgcagaaatgccaaagcactcaaagcaaagaaagaagatgggaataaagcatttaaggaaggaaattacaaactagcatatgaactgtacacagaagccctggggatagaccccaacaatataaaaacaaatgctaaactctactgtaatcggggtacggttaattccaagcttaggaaactagatgatgcaatagaagactgcacaaatgcagtgaagcttgatgacacttacataaaagcctacttgagaagagctcagtgttacatggacacagaacagtatgaagaagcagtacgagactatgaaaaagtataccagacagagaaaacaaaagaacacaaacagctcctaaaaaatgcgcagctggaactgaagaagagtaagaggaaagattactacaagattctaggagtggacaagaatgcctctgaggacgagatcaagaaagcttatcggaaacgggccttgatgcaccatccagatcggcatagtggagccagtgctgaggttcagaaggaggaggagaagaagttcaaggaagttggagaggcctttactatcctctctgatcccaagaaaaagactcgctatgacagtggacaggacctagatgaggagggcatgaatatgggtgattttgatccaaacaatatcttcaaggcattctttggcggtcctggcggcttcagctttgaagcatctggtccagggaatttcttttttcaatttggctaatgaagggcaaccacccagaacccagaaaatgcagattcactcagtttaatcttgaatgtggaaacagtt

SEQ ID NO: 868 - DNA, 1948 bp, Homo sapiens
  source 1..1948: mol_type = genomic DNA
agggaagttctcactggacaaaagcgtggtctctggcgcggggatctcagagtttcccgggcactcaccgtgtgtagttggcatctccgcgcgtccggacacccgatcccagcatccctgcctgcaggactgttcgtgttcagctcgcgtcctgcagctgtccgaggtgctccagttggaggctgaggttcccgggctctgtagctgagtgggcggcggcaccggcggagatgcctgggaagaaggcgcgcaagaacgctcaaccgagccccgcgcgggctccagcagagctggaagtcgagtgtgctactcaactcaggagatttggagacaaactgaacttccggcagaaacttctgaatctgatatccaaactcttctgctcaggaacctgactgcatcaaaaacttgcatgaggggactccttcaaaagagttttctcaggaggtgcacgtttcatcaatttgaagaaagactgcattgtaattgagaggaatgtgaaggtgcattcatgggtgcccttggaaacggaagatggaatacatcaaagtgaatttctgttcaagttttcccagattatcattctttgggatgagagaacattataaaaccactttgtttattttaaagcaagaatggaagacccttgaaaataaagaagtaattattgacacatttcttttttacttagagaatcgttctagtgtttttgccgaagattaccgctggcctactgtgaagggagatgacctgtgattagactgggcggctggggagaaacagttcagtgcattgttgttgttgctgtttttggtgttttgcttttcagtgccaactcagcacattgtatatgattcggtttatacatattaccttgttataatgaaaaaactcattctgagaacactgaaatgttatactcagtgttgatttcttcggtcactacacaacgtaaaatcatttgtttcttttgactcaaattgtattgcttctgttcagatgatctttcattcaatgtgttcctgttgggcgttactagaaactatggaaaactggaaaataactttgaaaaaattggataaagtataggagggttacttggggccagtaaatcagtagactgaacattcaatataataaaagaacatggggattttgtataaccagggataataaaaagaaaaaagaagttaatttttaattgatgtttttgaaacttagtagaacaaatattcagaagtaacttgataagatatgaatgtttctaaagaagtttctaaaggttcggaaaatgctccttgtcacattagtgtgcatcctacaaaaagtgatctcttaatgtaaattaagaatattttcataattggaatatacttttcttaaaaaaaaggaacagttagttctcatctagaatgaaagttccatatatgcattggtgaatatatatgtatacacatacttacatacttatatgggtatctgtatagataatttgtattagagtattatatagcttcttagtagggtctcaagtaagtttcattttttttatctgggctatatacagtcctcaaataaataatgtcttgattttatttcagcaggaataattttatttattttgcctatttataattaaagtatttttctttagtttgaaaatgtgtattaaagttacatttttgagttacaagagtcttataactacttgaatttttagttaaaatgtcttaatgtaggttgtagtcactttagatggaaaattacctcacatctgttttcttcagtattacttaagattgtttatttagtggtagagagttttttttttcagcctagaggcagctattttaccatctggtatttatggtctaatttgtatttaaacatatgcacacatataaaagttgatactgtggcagtaaactattaaaagttttcactgttc

SEQ ID NO: 869 - DNA, 2112 bp, Homo sapiens
  source 1..2112: mol_type = genomic DNA
gcagactgccataagatggcgtccgtggcggctgcacgagcagttcccgtgggcagtgggctcaggggcctgcaacggaccctacctcttgtagtgattctcggggccacgggcaccggcaaatccacgctggcgttgcagctaggccagcggctcggcggtgagatcgtcagcgctgactccatgcaggtctatgaaggcctagacatcatcaccaacaaggtttctgcccaagagcagagaatctgccggcaccacatgatcagctttgtggatcctcttgtgaccaattacacagtggtggacttcagaaatagagcaactgctctgattgaagatatatttgcccgagacaaaattcctattgttgtgggaggaaccaattattacattgaatctctgctctggaaagttcttgtcaataccaagccccaggagatgggcactgagaaagtgattgaccgaaaagtggagcttgaaaaggaggatggtcttgtacttcacaaacgcctaagccaggtggacccagaaatggctgccaagctgcatccacatgacaaacgcaaagtggccaggagcttgcaagtttttgaagaaacaggaatctctcatagtgaatttctccatcgtcaacatacggaagaaggtggtggtccccttggaggtcctctgaagttctctaacccttgcatcctttggcttcatgctgaccaggcagttctagatgagcgcttggataagagggtggatgacatgcttgctgctgggctcttggaggaactaagagattttcacagacgctataatcagaagaatgtttcggaaaatagccaggactatcaacatggtatcttccaatcaattggcttcaaggaatttcacgagtacctgatcactgagggaaaatgcacactggagactagtaaccagcttctaaagaaaggtattgaggctctgaaacaagtaactaagagatatgcccggaaacaaaaccgatgggttaaaaaccgttttttgagcagacctggtcccattgtcccccctgtctatggcttagaggtatctgatgtctcgaagtgggaagagtctgttcttgaacctgctcttgaaatcgtgcaaagtttcatccagggccacaagcctacagccactccaataaagatgccatacaatgaagctgagaacaagagaagttatcacctgtgtgacctctgtgatcgaatcatcattggggatcgcgaatgggcagcgcacataaaatccaaatcccacttgaaccaactgaagaaaagaagaagattggactcagatgctgtcaacaccatagaaagtcagagtgtttccccagaccataacaaagaacctaaagagaagggatccccagggcagaatgatcaagagctgaaatgcagcgtttaagagacatgtccagtggcctttggaaaggtggtggggatccagttcaggagggaggggtatgtttgtctcccagtctgggcaaaggagtgctatgcggaattctctgcatagcagaaaagctcccaccattttcttttgatgtggttttaaagtctcacgttctctataatagaaacagcaggtcttgtcagctccttgtgtggctgatgtgtctggaaatgatgtagttcaggaaagcattttttttttctttgaaccttaaaggttctattattaaaagcagcacagattccacatttttatacatgaggatcttctttgtggtgaataccaggattgactgcatccctttaaagaagttttatgtccctgactctggctaaaattatctaatttccagatgcttttgtagatgactgaagtatttgtgagccacatattgggagttctagatttgagtgaatggcaggaaagggccatctccattgagatgattaagtgaaccaaactagttctcagaattctacagagaaggagggaatcagactgaggaagctgtgacataggacttgaagaccaaagactttgaaatttgcgagctgctcatgtgtgagttattatcactgctgtctttctattgagttacaaatctatatttttattgaagtttaaataaagaaaaaatttacaaga

SEQ ID NO: 870 - DNA, 839 bp, Homo sapiens
  source 1..839: mol_type = genomic DNA
atcccagaagctgctgttagctcgccggtcctcggcacgccgcccgttcgcccctgcgctgtccgcccttcccctagcgttacttccggtccctcgctgagggggttcgtgcggctcccaggaggcgtgaaccgcggaccatgagcgtgggcttcatcggggccggccagctggcctatgctctggcgcggggcttcacggccgcaggcatcctgtcggctcacaagataatagccagctccccagaaatgaacctgcccacggtgtccgcgctcaggaagatgggtgtgaacctgacacgcagcaacaaggagacggtgaagcacagcgacgtcctgtttctggctgtgaagccacatatcatccccttcatcctggatgagattggggccgacgtgcaagccagacacatcgtggtctcctgtgcggctggtgtcaccatcagctctgtggagaagaagctgatggcattccagccagcccccaaagtgattcgctgcatgaccaacacacctgtggtagtgcaggaaggcgctacagtgtacgccacgggcacccatgccctggtggaggatgggcagctcctggagcagctcatgagcagcgtgggcttctgcactgaggtggaagaggacctcatcgatgccgtcacggggctcagtggcagcgggcctgcctatcagtccatggccgaccaagaaaagatctccccagctgcccttaagaagaccctcttagacagagtgaagctggaatcccccacagtctccacactgaccccctccagcccagggaagctcctcacaagaagcctggccctgggaggcaagaaggactaa

SEQ ID NO: 871 - DNA, 999 bp, Homo sapiens
  source 1..999: mol_type = genomic DNA
gcggctcccaggaggcgtgaaccgcggaccatgagcgtgggcttcatcggggccggccagctggccatgctctggcgcggggcttcacggccgcagcatcctgtcggctcacaagataatagccagctccccagaaatgaacctgcccacggtgtccgcgctcaggaagatgggtgtgaacctgacacgcagcaacaaggagacggtgaagcacagcgacgtcctgtttctggctgtgaagcccatatcatccccttcatcctggatgagattggggccgacgtgcaagccagacacatcgtggtctcctgtgcggctggtgtcaccatcagctctgtggagaagaagctgatggcattccagccagcccccaaagtgattcgctgcatgaccaacacacctgtggtagtgcaggaaggcgctacagtgtacgccacgggcacccatgccctggtggaggatgggcagctcctggagcagctcatgagcagcgtgggcttctgcactgaggtggaagaggacctcatcgatgccgtcacggggctcagtggcagcgggcctgcctatgcattcatggctctggacgcattggctgatggtggggtgaagatgggtttgccacggcgcctggcaatccaactcggggcccaggctttgctgggagctgccaagatgctgctggactcggagcagcatccatgccagcttaaggacaatgtctgctcccctgggggagccaccatccacgccctgcactttctagagagtgggggcttccgctctctgctcatcaatgcagttgaggcctcctgtatccgaacacgagagctacagtccatggccgaccaagaaaagatctccccagctgcccttaagaagaccctcttagacagagtgaagctggaatcccccacagtctccacactgaccccctccagcccagggaagctcctcacaagaagcctggccctgggaggcaagaaggactaaggcagcatc

SEQ ID NO: 872 - DNA, 1536 bp, Homo sapiens
  source 1..1536: mol_type = genomic DNA
ggaactcgccgggccacaccccctgtccagggaaggaacacgcccccggtgacagccggtacggccccgggtttgggcaacctcgattacgggcggcctccagccccgccagcagcgccccgcgcccgcccgcccgcgcccctgccgccccccggttccggccgcggaccccactctctgccgttccggctgcggctccgctgccggtagcgccgtcccccgggaccacccttcggctggcgccctcccatgctctcggccacccggagggcttgccagctcctcctcctccacagcctctttcccgtcccgaggatgggcaactcggcctcgaacatcgtcagcccccaggaggccttgccgggccggaaggaacagacccctgtagcggccaaacatcatgtcaatggcaacagaacagtcgaacctttcccagagggaacacagatggctgtatttggaatgggatgtttctggggagctgaaaggaaattctgggtcttgaaaggagtgtattcaactcaagttggttttgcaggaggctatacttcaaatcctacttataaagaagtctgctcagaaaaaactggccatgcagaagtcgtccgagtggtgtaccagccagaacacatgagttttgaggaactgctcaaggtcttctgggagaatcacgacccgacccaaggtatgcgccaggggaacgaccatggcactcagtaccgctcggccatctacccgacctctgccaagcaaatggaggcagccctgagctccaaagagaactaccaaaaggttctttcagagcacggcttcggccccatcactaccgacatccgggagggacagactttctactatgcggaagactaccaccagcagtacctgagcaagaaccccaatggctactgcggccttgggggcaccggcgtgtcctgcccagtgggtattaaaaaataatttctccccacatggtgggcctttgaggttccagtaaaaatgctttcaacaaattgggcaatgcttgtgtgattcacaatcgtggcatttaaagtgcacaaagtacaaaggaatttatacagattgggtttaccgaagtataatctataggaggcgcgatggcaagttgataaaatgtgacttatctcctaataagttatggtgggagtggagctgtgcagtttcctgtgtcttctggggtctgagtgaagatagcagggatgctgtgttcacccttcttggtagaagctaaggtgtgagctgggaggttgctggacaggatgggggaccccagaagtcctttatctgtgctctctgcccgccagtgccttacaatttgcaaacgtgtatagcctcagtgactcattcgctgaaatccttcgctttaccaaatctagacatacataaggggctttctctcccttttcagccctctctgtgcagagaaaagatgtgagtccgcttgatgaattctaatgctttgcttagagctatgagaaatgtttgttttaataaaaacctacagtccaataatgccaa

SEQ ID NO: 873 - DNA, 4688 bp, Homo sapiens
  source 1..4688: mol_type = genomic DNA
attatgcaacccgcctccccgcccgcccggtggagcttccactcggctgcgggctggagcggcggcgggcaggcgtgcggaggacactcctgcgaccaggtactggctgtgatcgaacttctcaaccctcagagacttagatcttccacctcactccctcagccaagcctccaggccccctcgtgcatccgtggtggcctctctgccttctctgttctgttctccccatggcccagacatgagtggccccctagaaggggctgatgggggaggggaccccaggcctggggaatcattttgtcctgggggcgtcccatcccctgggcccccacagcaccggccttgcccaggccccagcctggccgatgacaccgatgccaacagcaatggttcaagtggcaatgagtccaacgggcatgagtctagaggcgcatctcagcggagctcacacagctcctcctcaggcaacggcaaggactcagccctgctggagaccactgagagcagcaagagcacaaactctcagagcccatccccacccagcagttccattgcctacagcctcctgagtgccagctcagagcaggacaacccgtccaccagtggctgcagcagtgaacagtcagcccgggcaaggactcagaaggaactcatgacagcacttcgagagctcaagcttcgactgccgccagagcgccggggcaagggccgctctgggaccctggccacgctgcagtacgcactggcctgtgtcaagcaggtgcaggccaaccaggaatactaccagcagtggagcctggaggagggcgagccttgctccatggacatgtccacctataccctggaggagctggagcacatcacgtctgagtacacacttcagaaccaggataccttctcagtggctgtctccttcctgacgggccgaatcgtctacatttcggagcaggcagccgtcctgctgcgttgcaagcgggacgtgttccggggtacccgcttctctgagctcctggctccccaggatgtgggagtcttctatggttccactgctccatctcgcctgcccacctggggcacaggggcctcagcaggttcaggcctcagggactttacccaggagaagtccgtcttctgccgtatcagaggaggtcctgaccgggatccagggcctcggtaccagccattccgcctaaccccgtatgtgaccaagatccgggtctcagatggggcccctgcacagccgtgctgcctgctgattgcagagcgcatccattcgggttacgaagctccccggataccccctgacaagaggattttcactacgcggcacacacccagctgcctcttccaggatgtggatgaaagggctgcccccctgctgggctacctgccccaggacctcctgggggccccagtgctcctgttcctgcatcctgaggaccgacccctcatgctggctatccacaagaagattctgcagttggcgggccagccctttgaccactcccctatccgcttctgtgcccgcaacggggagtatgtcaccatggacaccagctgggctggctttgtgcacccctggagccgcaaggtagccttcgtgttgggccgccacaaagtacgcacggcccccctgaatgaggacgtgttcactcccccggcccccagcccagctccctccctggacactgatatccaggagctgtcagagcagatccaccggctgctgctgcagcccgtccacagccccagccccacgggactctgtggagtcggcgccgtgacatccccaggccctctccacagccctgggtcctccagtgatagcaacgggggtgatgcagaggggcctgggcctcctgcgccagtgactttccagcagatctgtaaggatgtgcatctggtgaagcaccagggccagcagctttttattgagtctcgggcccggcctcagtcccggccccgcctccctgctacaggcacgttcaaggccaaggcccttccctgccaatccccagacccagagctggaggcgggttctgctcccgtccaggccccactagccttggtccctgaggaggccgagaggaaagaagcctccagctgctcctaccagcagatcaactgcctggacagcatcctcaggtacctggagagctgcaacctccccagcaccactaagcgtaaatgtgcctcctcctcctcctataccacctcctcagcctctgacgacgacaggcagaggacaggtccagtctctgtggggaccaagaaagatccgccgtcagcagcgctgtctggggagggggccaccccacggaaggagccagtggtgggaggcaccctgagcccgctcgccctggccaataaggcggagagtgtggtgtccgtcaccagtcagtgtagcttcagctccaccatcgtccatgtgggagacaagaagcccccggagtcggacatcatcatgatggaggacctgcctggcctagccccaggcccagcccccagcccagcccccagccccacagtagcccctgacccagccccagacgcctaccgtccagtggggctgaccaaggccgtgctgtccctgcacacacagaaggaagagcaagccttcctcagccgcttccgagacctgggcaggctgcgtggactcgacagctcttccacagctccctcagcccttggcgagcgaggctgccaccacggccccgcacccccaagccgccgacaccactgccgatccaaagccaagcgctcacgccaccaccagaaccctcgggctgaagcgccctgctatgtctcacacccctcacccgtgccaccctccaccccctggcccaccccaccagccactacccccttcccagcggttgtccagccctaccctctcccagtgttctctcctcgaggaggcccccagcctcttccccctgctcccacatctgtgcccccagctgctttccccgcccctttggtgaccccaatggtggccttggtgctccctaactatctgttcccaaccccatccagctatccttatggggcactccagacccctgctgaagggcctcccactcctgcctcgcactccccttctccatccttgcccgccctcgccccgagtcctcctcaccgcccggactctccactgttcaactcgagatgcagctctccactccagctcaatctgctgcagctggaggagctcccccgtgctgagggggctgctgttgcaggaggccctgggagcagtgccgggcccccacctcccagtgcggaggctgctgagccagaggccagactggcggaggtcactgagtcctccaatcaggacgcactttccggctccagtgacctgctcgaacttctgctgcaagaggactcgcgctccggcacaggctccgcagcctcgggctccttgggctctggcttgggctctgggtctggttcaggctcccatgaagggggcagcacctcagccagcatcactcgcagcagccagagcagccacacaagcaaatactttggcagcatcgactcttccgaggctgaggctggggctgctcggggcggggctgagcctggggaccaggtgattaagtacgtgctccaggatcccatttggctgctcatggccaatgctgaccagcgcgtcatgatgacctaccaggtgccctccagggacatgacctctgtgctgaagcaggatcgggagcggctccgagccatgcagaagcagcagcctcggttttctgaggaccagcggcgggaactgggtgctgtgcactcctgggtccggaagggccaactgcctcgggctcttgatgtgatggcctgtgtggactgtgggagcagcacccaagatcctggtcaccctgatgacccactcttctcagagctggatggactggggctggagcccatggaagagggtggaggcgagcagggcagcagcggtggcggcagtggtgagggagagggctgcgaggaggcccaaggcggggccaaggcttcaagctctcaggacttggctatggaggaggaggaagaaggcaggagctcatccagtccagccttacctacagcaggaaactgcaccagctagactccattctgggaccatctccaggagtccatgagaggctttcttctcctatgtcccaattctcagaactcagatgtggctagaccaaccagtgggaaactgccccagcttctcccaccatagggggccggacccccatcaccagcctaggatccaggggctgcctctggcctcttagggagcagagagcagaactccgcagcccagcccagaggagtgtcacctcccacctttggagaggaatccttccctcccctggacaaagttgctgacaagctgctgaagtggcctctccatattccagctgagcctgaatctgactcttgagggttggggctgcacttatttattgcggggagacagctctctctcccacctcctccccagatgggaggagagcctgaggcccaagcaggacccgggggttccagcccctagctgctctggagtgggggaggttggtggaccatggagtccctggtgctgcccctcaggtgggacccaggcgttctcagctgtaccctctgccgatggcatttgtgtttttgatatttgtgtctgttactacttttttaat

SEQ ID NO: 874 - DNA, 2381 bp, Homo sapiens
  source 1..2381: mol_type = genomic DNA
gaagccactagccggttactagctgcgcttttgttccacttgagcgggcactcttctgcggcaagcaggtctaggaattcgcctggttcccacctcgcgtcccttgccttccttcctagtctacccactgtagtgccccctgcgtcccgctccctcctagccgactcagagcacaagaaggattgccacggtttccattgcagcagccgtggcgcctctgaccctttttttatatcgcggcgacggcgggctgtcgtcacgacgacgtgcggacgcagcggcgggggcctttcagcttatgtggagaagtcgctgtgaagccacctataaatccatttactgaatttatggagaaggctgtaaatgatggaagtcattcagaagaactcttttgccatcttaaaactatatcagagaaagaagatttaccacggtgtaccagtgaaagtcatctcagctgcctgaagcaggacattctaaatgaaaagactgaattggaagcaacacttaaggaagcggagttggtaactcattctgtagaattgcttttgccactatttaaggacaccattgaaaagattaattttgaaaatgcgaatctttctgcattgaatttgaagatttctgaacagaaggaaatattaataaaagaattagacaccttcaaaagtgtaaaactagctttagaacatcttcttagaaagagagactacaaacaaacaggagacaatttatccagcatgttgctagaaaatctaactgataatgaaagtgaaaatactaatcttaagaagaaggtatttgaaaaggaggcccatatccaagaactttcttgtttgtttcagagtgaaaaggcaaatactttgaaagcaaaccgtttttcccaatcagtaaaagtagtacatgaacgactacagatccaaattcataaaagggaagccgagaacgataagttgaaagaatatgtaaagagcttagaaaccaagatagccaagtggaacctgcaatcaagaatgaataagaatgaggctatagtgatgaaagaagcaagtaggcaaaaaactgtagctttaaaaaaggcatctaaagtttacaaacaaaggcttgaccattttacaggagctattgaaaagcttacttcccaaattagagatcaggaagccaagttgtctgaaacaatttcagcttccaatgcctggaaaagtcattatgagaaaattgtgatagaaaaaaccgaattggaagtacagattgaaacaatgaaaaagcaaatcattaatcttttggaagatctgaagaaaatggaagaccatggaaaaaattcatgtgaagaaattcttagaaaagttcactcaattgaatatgaaaatgaaactctgaatcttgagaatacaaaattaaagcttagattcccatgtagaattactgagtcaaagaatatgaacattttgattgttcttgatatgctttgctacatttcttctgaaaagactacacttgctgctttgaaggatgaagttgtatctgttgaaaatgaactctcagaattgcaagaagtagaaaaaaaacagaaaacccttattgaaatgtataaaactcaggtacaaaagttgcaagaagcagctgaaatagtaaaaagcagatgtgaaaatttgctacataaaaataaccaaataacaaaaaccaaaaataaaaatgtagagaagatgagaggccagatggagtctcatctgaaggagttagagcgtgtctgcgattccttgacggcggcggaacggaggcttcacgagtgtcaggagagtctgcagtgctgcaaggggaagtgtgcagaccaggaacacaccattagggagcttcagggccaggttgatggaaatcacaatcttctgacaaagctttctctggaagaggaaaactgtcttattcagctgaagtgtgaaaaccttcaacaaaaattagaacagatggacgcagaaaataaagagcttgagaagaagctggcaaaccaagaagaatgtcttaagcacagcaatcttaagtttaaagagaaatctgcagagtatacagcattggccagacaactggaagctgctttagaagaaggaagacaaaaggttgctgaagaaatagagaaaatgtcatctagagagagtgctttacaaattaaaatattagatctggaaactgagcttagaaagaaaaatgaagaacaaaatcaacttgtttgcaaaatgaacagtaaagcacaacatcaggaagtgtgtttgaaagaagtacaaaatagtcttgagaagtcggaaaatcaaaatgagagtattaagaattatttacagtttcttaaaacttcttatgtaacaatgtttgaataaattgtcaaattt

SEQ ID NO: 875 - DNA, 2186 bp, Homo sapiens
  source 1..2186: mol_type = genomic DNA
ggtttgggaggcccaggcggcggagcctccgggacggcgagcggcgggcggcggaggaggagacggcaggtcgggcattaaaaaatatttaatcattcatgtgttgagactcattcttgagttatggatgacaaggcttctgttggaaaaatcagtgtctcttcagactcagtatctactcttaatagtgaagattttgtcttggtttccaggcaaggagatgagacaccatctacaaataatggaagtgatgatgagaaaacaggactcaagattgtagggaatggaagtgaacagcagctgcaaaaagagctagcagatgtactgatggatcctccaatggacgaccagccaggggaaaaggagcttgtgaaaaggtcacaactggatggtgaaggagatgggcctctttctaatcagctctccgcttcatccaccattaaccctgtgccattagtagggctccaaaaaccagagatgagcctaccagtgaaacctggacaaggagattctgaagcttcaagtcctttcacaccagtggccgatgaggacagcgtagttttcagtaaactgacttacttaggctgtgcctcggtaaatgctcccaggagtgaagtggaagccttaaggatgatgtccatcttaagaagccagtgtcagatttcactagatgttaccctttcagtgccgaatgtgtctgaaggaattgtgagactcttagatcctcagacaaacactgaaatagcaaactaccctatctacaaaatcctcttctgtgtcagagggcatgatggaactcctgagagtgactgttttgctttcactgaaagtcattacaatgcagagctcttcagaatacacgtcttccggtgtgaaatacaagaagctgtaagtcctcaagagaaaactctctgcaaatgaaacttcaccagtgccctcactaggttgaaatgattatggtatttattatgatcactcataagccagatgaaattctctgctattgttttagtgattctagcctcatgggccaaaatataaattaactaaaaatttgattaactagaactttgttactactactaagaatgtcagaggagatctgttggctacttttgattgggttaagtaggcattctggttctaacattgacagatttgcaaaccattcttttaaatcaaaacttgttaggactgttttcattgtaatatcttcagatagtttctaacaatttaggaagtgatttttaaattggatttatagtgcttacaaccatttcttttttaaaaccccttgtctggacatttttagtgttgcttgctttataggcctaacaaattaggtaatttaccaaaagaaataagtgggataaagataattattgccctccaaagtaggtaatcttccagccttaataaaggtattttatatcttttgataacagcccatttcctaacatgtctggttgtaggtaagccggatactttacagttttgccactgccttccgccgttctgccaagcagaccccactttcagccactgctgcaccccagactcctgacagtgacatctttaccttctctgtgtctttagaaataaaagaagatgatggtaaaggttattttaggtagggaatcttattttattcatgtattaacatgctgtggttcaggggaaattctaggtcagattataactttcataccataaaatgatggcttttaaagggagggcttttaaaaaaaatctggatgataaaggcatataaatacataaatttaacagaggcaaagtttgaagaattttaaagcaattaaaaaaattgtcatattgggaacatgttgctaccttcttttagtcagataccaagtggctaactgctcacaaaaatatggccaaaccgccaggcgctgtggctcacacctgtaatcccagctctttgggtggctgaggcggacggatcacctgaggtcgggagttcgagatgagcctgaccaacatggagaaaccttgtctctactaaaaatacaaaattagccgggcgtggtggtgggtgcctgtaatcccagctacttgggaggctgaggcaggagaatcgcttgaacccggcaggcagaggttgcagtgagccgagatcctgccactgcactccagcctgggcaacgagaacgaaactccgtctc

SEQ ID NO: 876 - DNA, 1310 bp, Homo sapiens
  source 1..1310: mol_type = genomic DNA
attagctgacatcaggaactgagccaggcagtgtggttgtgatgtcactatctcacctcacccccacctaagagattgtggtggggaatctcagacactctaaccctctgggcccaagtcacctttctatcaggggagggaggctgtgctctcactggcttcttgttagaagttctgcctgccctacagcctgcactgagggctctcatcactgcttctgagatcttaatgggggtcaacgaagatgtgggcttctctgagtttagaccatccatctgccaaggaaaaccaagccctgagactgatagagatgagagaagagaatggtaatgtccccaagacagagcaggcaggaagtttgaagcctctgagggatacaggaaaatctaacctcaaagagaagaaggccaacagcaagctgaagcagattgagaaggaatacactcagaagcttgccaaatcttcacagatcatagcagaacttcagacaaccatttcctctctgaaagaagagaacagccagcagcagcttgctgcagaaaggcggctccaggatgttagacaaaagtttgaagatgagaagaagcagctgattagagataatgaccaagcaatcaaggttttacaagatgaattagaaaaccgttctaatcaggtgcgatgtgcagagaaaaaattacaacacaaagaattggagtcacaggaacagataacttacatacgacaagaatatgaaacaaaattgaaaggattgatgccagcatccctaagacaagaacttgaagacaccatttcctccctaaaatcacaggttaattttctgcaaaagagagcttccatccttcaggaagaactgactacatatcaaggcagaaggtaactgcacgagagaatgcaacggatgcaatttccaggctgtgctgtggacttcttccagcaggtttgaagatttggatattgtaaactgtgagatcagtggcattttttaaatccttaaatgtaattaagatcataaaaacatgcatcattcatacactagtggggtggttttatttgtgtctgcctaagttatttttttaacattcctttatttccgattttcatgtttgtgtgcatttgagtatgtgctgagaactgcttatattgggcaaagtgatttcctatgatatgccttgttaatccttttgcatagaattttaccagttgcgtacgatcaaaatcacgtttgtagtatcatatcaaaaattctaacctgtttacattgttttcatgttcatgttcctatgttattaaaatattattttgtactt

SEQ ID NO: 877 - DNA, 2615 bp, Homo sapiens
  source 1..2615: mol_type = genomic DNA
gaacactcatcagtgcgcaggcgcccatcttagttggtcttctagtccggtaaacagagggcctgcccccgacagcttctgcttccgggtcacgccttgacagcggctttcaacccccacctcagcccagcaattcggcagtttggagcatgtgaacaccttgagccttgatgagttccagtatgtggtatattatgcagagcattcagagcaaatactctctctccgagcgcttaatccgaacaattgctgccatccgttccttcccacatgataatgtagaggacctcatcagagggggagcagatgtgaactgcactcatggcacactgaagcccttgcactgtgcctgtatggtgtcagatgctgactgtgtggagttacttctggaaaaaggagccgaggtgaatgccctggatgggtataaccgaacagccctccactatgcagcagagaaagatgaggcttgtgtggaggtcctattggagtatggtgcaaaccccaatgctttggatggcaacagagataccccacttcactgggcagcctttaagaacaatgctgagtgtgtgcgggctctcctagagagcggggcctctgtcaatgccctggattacaacaatgatacaccgctcagctgggctgccatgaagggaaatcttgagagtgtcagcatccttctggattatggcgcagaggtcagagtcatcaacctaataggccagacacccatctcccgcctggtggctctgctagtcaggggacttggaacagagaaagaggactcttgctttgagctcctccacagagctgttggacactttgaattgaggaaaaatggcaccatgccacgagaggtggccagagacccgcagctatgtgaaaaactgactgttctgtgctcagctccaggaactctaaaaacactcgctcgctatgccgtgcgccgtagcctgggactccagtatctccccgatgcagtgaagggccttccactgccagcttctttgaaggaatacctgttacttttagaatagccggagaagatgtttgcaccatcgtgcaggcagctctgggtgaggttgtccctgcagtactccttgtcacagaaaacagaaaaacagttgttcctgttgtgtggtttatagatttcgaagcaacatgtcacaacaataacctccatagcacctccccttcccaaaccaaacaacccaacaaaaaaaatccctcacttttgttttctgtttattgcttacctggctttttatattgcattttgcaaaagaagaggtctccctcaatcctcccctttagggaaggagtcaacagtgtaactaaatttctctaggaagatggaaagtacttaaataatgtgtgtgtggttttcctttggggacgtggttaacggtccagaagaatcccttctagaaagcattttaggccagccatggtggctcacgtctgtaatcccaggactttgggaggctgaggcaggtggatcacctgaggtcaggagttcgagcccagcctgaccaatatgatgaaaccccgtctctactaaaaatacaaaaattagctgggcatggtggcatgcgcctgtaatcccagctactcaggaggctgagacagaagaatcgcttgaacctgtgaggcagaggttgcagtgagccaagatcgcgccattgcactccagcctggacaacaagagcaaaactgtctcaaaaaaaaaaaaaaaaaaaaaaaaccattttaattgatctgtgaaaaaacttaagaaaatcacaatttcagctaacagcaattgtgtcccaaagatgaagatactataacctcaaatggtgcagatccagaactgggctggatgacatccctactgtgccatgtcctggggcatttggaagggactggacctctttcccctcatcaaaggaaacagcagtctttgcctctttctgttggttgtgcccaagggctacagtagctctgaaataacaagagctctgtaataacagtaataaatagctctgaaataacagtcctaagaactcctaaagtcctgagaacttttcttgtaatgcagctttttctcttcctgagaaacagtgtgttctaatgggattcccaggcagttcctacacctacggtgtgtgttccagcagggaggagttatgggctgggctgccttttcccatgggtcttcattcccaatggaaagttcactctgcttagtttggaattatttttctttcagttgttctggaacctttgctttttattgatttatacaatacaattggtgggagggtggacttgggatgggagtgggaaaagcatgtaagagctccttttgtgatggtccatctacccaaaagagatctgctttagtgaacgatactctttcatttttctaaattagatcaagttgttattgattttagatgacttgtatgcaaatttgaaaaacttttttttttaaagctgattgggaactacaaacaatgaatggaatctactgacacagctaattggaaaacagatgtcttcttctgtcctattgatgctggtgtttaaaaaacatcacttaaaaaaaaagaataaatagttctaaaagcaag

SEQ ID NO: 878 - DNA, 2002 bp, Homo sapiens
  source 1..2002: mol_type = genomic DNA
ctcccggcaagggtcccccgactggcgcccgcgcgtcctccctcggctgctgcaggccgggccgcggcgtcgagcgggggcggcggggcggggcccgcagccattggcgagcggcggggcgggggcgggggcgcggagggtcggccccgggacgcgcgcagccggcccgcagttgccgctgtcgtccgcagagccagttcctagcgcagagccgcgcccgccatgagggagatcgtgcacatccaggcgggccagtgcgggaaccagatcggcaccaagttttgggaagtgatcagcgatgagcacggcatcgacccggccggaggctacgtgggagactcggcgctgcagctggagagaatcaacgtctactacaatgagtcatcgtctcagaaatatgtgcccagggccgccctggtggacttagagccaggcaccatggacagcgtgcggtctgggccttttgggcagcttttccggcctgacaacttcatctttggccagacgggtgcagggaacaactgggcgaaagggcactacacggagggcgcggagctggtggacgcagtgctggacgtggtgcggaaggagtgcgagcactgcgactgcctgcagggcttccagctcacgcactcgctgggcggcggcacgggctcaggcatgggcacgctgctcatcagcaagatccgtgaggagttcccggaccgcatcatgaacaccttcagcgtcatgccctcgcccaaggtgtcggacacggtggtggagccctacaatgccacactgtcggtgcaccagctggtggagaatacagacgagacctactgcatcgacaacgaggcgctctatgacatctgcttccgcactctgaagctgacaacgcccacctacggggacctcaaccacctggtgtccgccaccatgagtggggtcaccacctcgctgcgcttcccgggccagctcaatgctgacctgcgcaagctggcggtgaacatggtgcccttcccgcgcctgcacttcttcatgcctggcttcgcgccgctcaccagccgcggcagccagcagtaccgggccctgaccgtgcccgagctcacccagcagatgttcgacgccaggaacatgatggccgcctgcgatccgcgccatggccgctacctgaccgtggccaccgtgttccgcgggcccatgtccatgaaggaggtggacgagcagatgctggccatccagagtaagaacagcagctacttcgtggagtggattcccaacaacgtgaaggtggccgtgtgcgacatcccgccccgcggcctgaagatggcctccaccttcatcggcaacagcacggccatccaggagctgttcaagcgcatctccgagcagttctcagccatgttccggcgcaaggccttcctgcactggttcacgggtgagggcatggatgaaatggagttcaccgaggcggagagcaacatgaacgacctggtatccgagtaccagcagtaccaggatgccaccgccaatgacggggaggaagcttttgaggatgaggaagaggagatcgatggatagtcggaatagagccgccccaactcagatcctacaacacgcaagttccttcttgaaccctggtgcctcctaccctatggccctgaatggtgcactggtttaattgtgttggtgtcggcccctcacaaatgcagccaagtcatgtaattagtcatctggaacaaagactaaaaacagcagagaattgcgggttctacccagtcagaagatcacaccatggagactttctactagaggacttgaaagagaactgaggggccacaaaataaacttcaccttccattaagtgttcaagcatgtctgcaaattaggagggagttagaaacagtctttttcatcctttgtgatgaagcctgaaattgtgccgtgttgccttatatgaatatgcagtatgggactttgaaataatgattcataataaaatactaaacgtgtgtcttca

SEQ ID NO: 879 - DNA, 1930 bp, Homo sapiens
  source 1..1930: mol_type = genomic DNA
aggtcaacatcagcacccaagagctttgggaggaaatgctcagttccaaaggactaactgttgttgatgtctatcaaggctggtgtggcccctgcaaacctgtggtgagcctcttccagaagatgaggatcgaggtcggcctggaccttctgcactttgcattagcagaggcagatcgtcttgatgtcctcgaaaagtacagagggaagtgcgagccaacctttctgttttatgcaattaaagatgaggctctttctgatgaagatgaatgtgtttcccatggaaagaataatggtgaagatgaggacatggtttcatcagagaggacctgtaccttggccatcattaaaccagatgcagtggcccatggaaagactgatgagattatcatgaagattcaggaagctgggtttgaaattctaacaaatgaagagagaaccatgacagaggcagaagtgcgacttttctaccaacacaaagctggagaggaggcatttgagaagctggtacatcacatgtgcagtggaccaagccacctcctgatcctcaccaggactgagggcttcgaggacgtggtcactacctggcgaaccgtcatgggcccccgtgaccccaatgtggccaggagggagcagccagaaagtctccgagctcagtacggcacagaaatgcccttcaatgccgtccatggaagccgggacagagaagatgctgacagagaactggcattgctcttccccagtttgaaattttcagacaaagatacagaagcccctcagggtgagtccagtacacagccaaggttgaagatcactgacctagactaaaatgagaggattcagaagtctgaccttagaacatgagagagtggaaaacctcaggatgtttcagccaaacaagaagagaagaaaatattgttgaaattaacaatgatcagggaaaatatcatctattaagaacagggaaccacattttagctgtagattaggaatggtaatttttatctggtgttttagtttccaaaacatttacatattgatctactcctcgccctagaccaaacctaattccattcttactgatatgcacaatcactctctgtcctcattgtcacctctagcccctaaattcctccctttctcagtctacctactctttgtgactccctcatatcttttccccctggcatggatgtcctgctcagacactccacttagaagacagtttccctttttcactgtcctcccaccattcattactcctcctccagataccaactgctgatgttgctctagaaaaaccaccaaacatgactgttctttccgtgtaagctatcccacctcagcggcaccctcactgctggtgaccagccttgtaaccccctggagatgcccatgttccttatggtagctacctcttacttcaaattcttctgcctccctcatgctcgcagccactctgtgcccacctcatcttcgtagggaccttgattttggggacacacattgcaacttcccacttctgacgaaaggtctccatgcttttgctgttttctttactcttgtcaaggttgggtacttcaagctcaaagcctatctaccttgatccaaaaactacctttccataatgttctcacatctttactctgtcctacctctcattttcaatcctgtttaaaagacgtttaagtgtccaaactttaacctcttgaagctagtcctctccccactttccatctttaaatgggcatatatacaataaaggctctgtccatctccatctcttatatataacaatactgtgacttaaaaaccaactcagtattggaaattttctaaagttctgtcctagagttctttcctgacctctagctccatacttctgattgcctaataaatatgacatggatgttcagtggaacttcccatct

SEQ ID NO: 880 - DNA, 1682 bp, Homo sapiens
  source 1..1682: mol_type = genomic DNA
ggcagacgtccctgggttccggtgttcgcggaggagtcgagcagaagaatagaaggaaggtgataggatgtgatgatagaatttgtgatagccaagcaacaacttttcctaattcggcatgttaaaaaataagggtcactcatctaagaaagataacttggcagtcaatgcagttgctttacaagatcacattttacatgatcttcaacttcgaaatctttcagttgcagatcattctaagacacaagtacaaaagaaagagaacaaatctctaaaaagagatacaaaggcaataatagatactggacttaaaaaaactacacagtgccccaaactagaagactcagaaaaagaatatgttcttgatcccaaaccgccgccgttgactttggcacagaagttgggcctcattgggcctccaccacctccactgtcatcagatgaatgggagaaggtgaaacagcgctctctcctgcaaggggactccgtgcaaccatgccccatctgtaaagaagaattcgagcttcgtcctcaggtgctgctttcatgctcccatgtgttccacaaagcatgtcttcaggcttttgaaaagttcacaaataagaaaacctgtcctctctgtagaaagaaccagtatcaaacccgagtgatacacgatggggcccgcctgttcagaatcaagtgtgtgaccagaatccaagcctactggagaggatgtgttgttagaaagtggtacagaaacctgaggaaaacagtacctcccacagatgccaagttaagaaaaaaattctttgaaaaaaagttcacagaaatcagccaccgcatcctgtgctcatacaacaccaacattgaagagctctttgcagaaatcgatcagtgcttggccataaatcgaagtgttcttcagcagttggaagaaaaatgtggccatgagatcacagaagaggaatgggagaaaatccaagtgcaggctctgcgccgggagacccacgagtgctccatctgcctggcccctctctccgctgctggcggtcagcgcgtgggtgcaggcaggcgttccagagagatggccctcctgtcctgctcacatgtgttccaccatgcgtgtctgctggcactagaggagttctccgtgggagacaggcctcctttccatgcctgtcctctctgccgctcctgctaccagaagaagattcttgaatgttgaattcatagtcaaggaaagttaggtaattctgaggaaaaaagtttaccatcattttggatgaactgcatgagttctgggttaagtactacaatgtaatctgtttcccagggaaataagctattggtagttgtaggaaatcttagtatattttaaaagctgacatcccacctaattttaatctttggtctctaaaaagtaaatttcaaatttatgagtttaatcacttcaaatatgaatagcaaaaaatgagagcttgcttacttctaaaaattgaggttaagatatagctagtgtctgaacgacactccttaaagtaagttccaaatgtaaaacactccttaagttccaaatgttttccgctaatagtctgtcctaaagcctttgccattcctaatactcgttttgtaataattgctgtatttctgtgtaataaaatataaaaataaaatattcagtggtattcaacatcaaaaaa

SEQ ID NO: 881 - DNA, 600 bp, Homo sapiens
  source 1..600: mol_type = genomic DNA
gcggccgcgggcaccagagtgccgagcccaggacgcccccggcccaggcccttgggttaatacctctgccaaccgaggccaccctccctcggacccccattcggaggaagcagacccaagttcgaattctgacattgccactgagcagccgtacaacttttgggtggacaagtccttcacttctcgccggagtgtgtggaggagcgatgggcagaaccagcacttccctcaggcactagacctgtcacgagtgaacttagttccctcctatactccttcactctaccctaagaacacagatctatttgagatgattgagaagatgcagggaagcaggatggatgaacaacgctgctccttcccgccgcccctcaaaacagaggaggactacattccatacccgagcgtgcacgaggtcttggggcgagaaggacccttccccctcatcctgctgccccagtttgggggctactggattgagggcaccaaccacgaaatcaccagcatccccgagacagagccactgcagtcgcccacaaccaaggtgaagctcgagtgcaaccccacagcccgcatctaccggaagcactttctcggcaa

SEQ ID NO: 882 - DNA, 3671 bp, Homo sapiens
  source 1..3671: mol_type = genomic DNA
ggttaagagagacgcgcgcgcagtcgcgcgcgggtcgtgccgtaccaccgtcgcgggcaggctcggccacgagcgccagagccccgcgcctcccctcgcggcctgtcccaagtccctgccccgcaacagagcgtcacttccgccatccccggcagcggttggggcggggcgcacgggggagggggccaggtcggagggaagcccgcccgtgcccgagcccgcgcccgagcagggactacatttcccgaggggcctcggcggcggctgcggcgacgggcgcggcaacgtcccccggaagtggagcccgggacttccactcgtgcgtgaggcgagaggagccggagacgagaccagaggccgaactcgggttctgacaagatggccgggctgccccgcaggatcatcaaggaaacccagcgtttgctggcagaaccagttcctggcatcaaagccgaaccagatgagagcaacgcccgttattttcatgtggtcattgctggccctcaggattccccctttgagggagggacttttaaacttgaactattccttccagaagaatacccaatggcagcccctaaagtacgtttcatgaccaaaatttatcatcctaatgtagacaagttgggaagaatatgtttagatattttgaaagataagtggtccccagcactgcagatccgcacagttctgctatcgatccaggccttgttaagtgctcccaatccagatgatccattagcaaatgatgtagcggagcagtggaagaccaacgaagcccaagccatagaaacagctagagcatggactaggctatatgccatgaataatatttaaattgatacgatcatcaagtgtgcatcacttctcctgttctgccaagacttcctcctctttgtttgcatttaatggacacagtcttagaaacattacagaataaaaaagcccagacatcttcagtcctttggtgattaaatgcacattagcaaatctatgtcttgtcctgattcactgtcataaagcatgagcagaggctagaagtatcatctggattgttgtgaaacgtttaaaagcagtggcccctccctgcttttattcatttcccccatcctggtttaagtataaagcactgtgaatgaaggtagttgtcaggttagctgcaggggtgtgggtgtttttattttattttattttattttatttttgaggggggaggtagtttaattttatgggctcctttcccccttttttggtgatctaattgcattggttaaaagcagctaaccaggtctttagaatatgctctagccaagtctaactttatttagacgctgtagatggacaagcttgattgttggaaccaaaatgggaacattaaacaaacatcacagccctcactaataacattgctgtcaagtgtagattccccccttcaaaaaaagcttgtgaccattttgtatggcttgtctggaaacttctgtaaatcttatgttttagtaaaatattttttgttattctactttgcctttgtacagtttattttactgtgtttatttcattttcccaatttgacaatcgtattttaaaattgaaactgatggaacattctttcttggtcttcaccatctgacaaattgaatggcaagaggtggattttgccagtttcttttcactgatgcagatttgtgttaagatagtactgaatggagtatttataaactggccctgagcatgcataaagcatcagtatctgacctttttttaaccttctaggaatttgaaataaatgtgtttgtgttgtctgattagatgatcattggtgtcttgccacaatgtttaaaaattactgtacaggaaagtcacagcaaagatagcagttgtgactgacatgtaggactttcacagttgtgccacatttttgcctaaaatttgggttatgacatttttcttggttcttatctgaaaatttcatctgtaacctttcatgtgtgttaagaaacactgatctgatcatttgggatttgctgaggcatttgtgagtcttccttataaacctgatgagcagatctcaactatctagcttgtgtgtcatcagaaaggtttatccctttgagagtatcaagtcctcagttaatgattcttgctttcatccctccagtatttgctgtgggagctcgttttattctttaatttggaattcagtaatttttcttctttattgacgaattcctcccctcacaaaactgttctttcccacctctctccatatctaattcctgattcttgttatttttaagtcataaatgtagccagtcataaatacataaatgttaaccttcgggttgcaaccttgtctcttgcagtttaaggtaatggatattgtagcccatttgaattttcttcactcttattctcgtaattctggagtttcttcagattgtggtgtattttattgtgctcctatgtaagatgaagaattaactattaaaattacattttcaacatacaaaagcttttgatgactggtaactggtatccttccaaataaatgcattgcttggtaacaaatgttagcttaattcagaatgaaatagttaacaaccctaatattgtaaaatttgaaaactgatagcagctgtcatttataacaattcttgggctgtttaaagggtacatttgactatagctaaggaaattgaatctcactttaaaaatgaaccacacaaaacttcaagaaacgaaatagaaatcaacatttactgcccgtaatattgctcatggttatagctagtatcacatagtgatttacaaaccatgaaattccagatttaaatctgttgcactacaaaaatgtctaaatgatgtctgctaaatttgtgagttatagaagtacagaaataagtcattttcatttcaaatgcagtgaatttctaatttcatggtatcatatttttttcctttgcagttttggtaagactcccccattactttgctaagacttgctttctcaaccagtgggatgaaacgagtgccagtgtgttgactgagccttcttaggacttaaggggctctgggagaggccaaggcagcagttgaaaactgcagcttcacctggcctttgggcctgttttccctggcccacacagtgtggctggttaaaacattctgaatttgatgccaacatttttaaaaattgggagatttgcatgaaaatccagaattcgggtaacttttgaatgatctgaagatctggcaacagtagacctgacccacctttgtgcacgggacttaactgagaggatctgagtagcagacaccctaagagcatgtcattgtcttctcaccagttactctccagttggctagagtcccctccgagcacacctgctagtccttcccccttgtaagcctttgactttgtaatccctgggctaaaggaaacacattattcaacaaaagtgtttcatgtttgcccactagttgttggggatgattaggtggtgagtgaatggcatggggctttcctttggggaccatatactctaatggggaagggggacagacaaatagttgtaactctgtcatggaaaagagaagtaacttggacagacttttggattcaggccagatgaacatctccaggcagagggaacagcagcatctgcaaagtc

SEQ ID NO: 883 - DNA, 3432 bp, Homo sapiens
  source 1..3432: mol_type = genomic DNA
ctgcggcggcgcgctccgagcctgcgtctagggcgcccccgggtcagagctgtcgccgtggccgccgctgcaagaaccatgtaccgcagcagcgctcgctcctccgtctcttcccaccggcctaaagacgacggcgggggcggcccgcgcagcggccgcagctctggctcctcctcaggcccggctcgccgcagctcaccgccgcctccgccctccggctcctcgtcgcggaccccggctcgccgaccccgctcgccctcagggcaccgcggccgccgggcctcgccgtccccgccacggggtcgtcgcgtctccccgtccccgcctcgggcccgtcgcggctccccgtcgccaccgcggggccgacgactcttcccgccgggcccggccggcttcagaggcagcagccggggggagtcccgcgccgactatgcccgggacggccgcggagaccatccaggcgacagcggcagccggagacgctctcctggtctgtgttctgactctttggaaaagagcttaaggatcactgttggcaatgaccacttctgtgttagcacaccagaacggcgacggcttagtgatcggctggggtcaccagtggataatctggaagacatggacagggatgacctgactgatgattctgtcttcactcgaagctcccagtgctctcggggtcttgagcgatatatttcccaggaggaagggcctctcagtcccttcttgggacaacttgatgaggactaccgaacaaaagaaactttcctgcatcgatctgattatagtccccatatcagttgtcatgatgagctgttgcggggaacagaacggaatcgagaaaaactcaaaggctactccatacgatctgaagaaaggagccgggaggccaaaagaccccgttatgatgacacagtgaagataaacagcatgggaggggatcacccaagttttacatcaggaactcgcaactatcgacagcgtagaagaagcccaagtcctaggtttctcgaccctgagtttcgagaactggatcttgccagacgaaagcgagaggaagaggaggagcgaagtaggagcttgagtcaggagctggttggagttgatggtggtggtactggctgttccatccctggattgtcaggtgtcctaacagcatcggagccaggatattctttgcatcggcctgaggaagtatctgtgatgcccaagaaatccattttgaagaagcggattgaggtggacataatggagccctccatgcagcttgagagtttttccagcagtaccagctccagccaggatcaccctctctactctgggcacccatcccttccactaagtggtgctattgctgcttttgcctcagagattgaaaacaaggggactatggtagagactgccttgaaggaacctcagggcaacctctaccaatggggtccccttcctgggattcccaaagacaacagtcctctcagagaaaaatttggaagttttctatgccacaaggataatttggatttgaaggctgagggacctgagcgacacacagacttcctgctgccccatgagagagctagccaggatggcagtggtttttcccgcattctgagcatgttggctgattctaccagtacacaggaaaaaaggcgacgtagctttcccgacattgaagatgaggagaaatttctctatggggatgaagaagaggatttaaaggcagaatccgtaccaaagccccttgggagctctgagagtgaagttatgaggcagaaggcaagctccctgccgtcttcagctccagctgtaaagctagaatcactagaagagaccaatccagaatatgcgaagatccatgacttgctcaagacaatagggctggatattggagtagcagagattagtcaattggctgcacgcacccaggaacgacttcatggcaagaagccatcattacgctcctcagctgaccgccgttcctcagttgaccgatacttttcagctgaccactgttcctcagttgaccaccgcttctcagctgaccgctgttcctcagttgaccactgcttctcagctgatcgacgttcctcagatccccacagactagagagcagggaggcacatcatagcaatacccactctccagaggtgtcccatccacacccaccttctcctgtggatccttacctgctcacaaaaaacagccctccattcctaaagtctgaccatccagtgggtcatatttcaggaccagaggtggttggtagtgggtttcagtcatctgttgcagtcaggtgcatgttgccatcagccccatctgccccaattagacttccacacactgctgctttatctcagtttcacatgccaagggcctctcagtttgctgcagctcggatacctccgaactaccagggacctgccattccccctgcctcttttgatgcctataggcactacatggcatatgcagcctccagatggcccatgtatcccacctctcaaccgtcaaaccaccctgtacctgaaccacacaggataatgccaataaccaaacaagctactcgtagccgtcccaatcttcgtgtgatccccactgtgactcctgataagcctaagcagaaagagtctctgcgaggctcaattcctgcggcccaagtgcctgtccaggtgtccattccatcactcataagatataatccagagaagatctctgatgagaagaaccgtgcttcccagaagcaaaaggttattgaagagagggaaaaactaaagaatgaccgggaagcccgccagaagaagatgtactatcttaggaccgagttagagcggcttcataaacaacaaggagaaatgctgcgcaagaaacgaagggagaaggatggccacaaagatcctctcttggtggaggtgagtcggcttcaggataacattatgaaggacattgcagagctacggcaagaggcagaagaggcagaaaagaagcaatctgaactggacaaagtggctcagatcttgggaattaacatcttcgataaatcccagaagtctttaagtgacagtagagagcctacagagaagcctgggaaagcagaaaaatctaagagcccagaaaaagtgtcatcgttctcaaactcctcctccaacaaggaatcaaaagtaaacaatgagaagtttcgtactaagagccccaagcctgccgaaagcccccagtcagccactaagcagttggatcagcccactgctgcttatgagtattatgatgctggcaatcactggtgcaaagactgcaacaccatctgtgggaccatgtttgatttcttcactcatatgcacaataagaagcacacacaggggcaattccaaaagtcttcagatttccaaaaggaaggactgcagcagacatttctgcccccagaaaggcagggatag

SEQ ID NO: 884 - DNA, 2394 bp, Homo sapiens
  source 1..2394: mol_type = genomic DNA
gatctcagttttatcatgaatgacttctccattgtgattcttgatttccttcatgggttaatttagaggttatgtatgtatgtctgtgtgtgtctgttgctaaggtcaccatggctgaccgggctgctgccgaaagggcctgcaaggatcccaatcccatcattgatggcagaaaggccaacgtgaacctggcatacttaggagcaaaaccaaggatcatgcaaccaggttttgcctttggtgttcaacaacttcatccagcccttatacaaagacctttcgggatacctgcccactatgtctatccgcaggcttttgtgcagccgggagtggtcattccacacgtccagccgacagcagctgccgcctccaccaccccttacattgattacactggagctgcatacgcacaatactcagcagctgctgctgctgccgccgccgctgctgcctatgaccagtacccctatgcagcctctccagctgctgcaggatatgttactgctgggggctatggctacgcagtccagcagccaatcaccgcagcggcacctgggacagctgccgccgccgctgcagcagctgctgccgctgcagcatttggccagtaccagcctcagcagctgcagacagaccgaatgcaatagaccagccatctgatcaaagttgaattgttttctctttccctcccaattttccaatttttagtagctaataagagagttaacattgacttaacagctttaaaaaaaaaaacagccatgctattgtgaagcagagttattattttttttatactccaggtagtgttctagatgagaaagaggtaagaatgaggggaatgggcacaattttggaaatcaatcccaaagagcctgagtaaatgaaaggccactacgaaatgacgccaggagtaacaacggaacttcacttttgtaacgggatttttatttttgctctttttatagtatcagggaagcaaactgccttttacaagttagaaaatgctgtttgaatctagttgaaccagggaatacagagcgagcaatatgtagcttgaattacatttaaaagcagattttttacaaacaaaatggcgaaagcactgattgtcatttttagcagtcacttaaggcctatagaacttttttcaagtcggaaggtcctgttcttactatctcaaaaatgggcatcgaacaatcaatctaggagcgtggcagtgggtaaaatggtggacaggcaccaaagctattttctcatctgtcctgtggatgagtggaactgtggaacaagtgatgtggaattaatgggtgcaacagctgtacagacaatcaataacacacacagttctggaaagaacacatcacttgtgcttgtttgatgagcttgtcacattctaatccctctccccatcctgtttcaattttgggaaacttgtatctgctggtgtcagcaattctgattctgaaataggatcaggcttttactacaacagccttctctttctatttattgtgtcgactcgtggcttatgaataaaggcaggcaaagtttgcagaactgtcttaaggacatttattttttttccctttttaagtaattttacactttagtatctatttcagagtcatatttaaaactatttattagtgactacagtacatgagacaacaaggttactgagattacaattcttcaaaggttaatgataatgtggtttatactgtgccttaatagtaatgctatttaagatatttatttttaagttttactatgctgcactctaaagaaaggaactttagatgtgacactgtaaaattatgtattcatctcatggcataaattatttagtaagtctagatgtagcgtattaaatattaacctattcaactaaagatgttgacttggatttatttaaattcatatgtgcactgtataagagagtactcttacattaacacattttagtttagtttttagatttttttttaaacgatatattgctagtttcatgcttcctcctctgattttgcctgtgtagatttcatttattggtaattcattagtttaacactattatgtagtttttaaatgctgctttacatttttcttctgaaactgcaatacttgcaatttttattcttaaactaaattgaatactattttacactgtattggatttttatacttgaacaatttcatacaagggaagacaggttagcatttttatggactttctccattatcactggatttactttaagtattcccatactagacagtgttatgtaatgtagacatgactctcctgtgcaaattatttattcgttgtgtatattgctttataacatttcagatcttctaatctattcacttgtattaaatataattttt

SEQ ID NO: 885 - DNA, 626 bp, Homo sapiens
  source 1..626: mol_type = genomic DNA
gggcgggccagggccgcactccggagactcgcggttgctacgcgcaccatggctggagcgcccacggtctcgcttcctgaactccgttcactcctagcctccggacgggcccggctcttcgacgtgcgctctcgcgaggaggcggcagctgggaccatcccaggggcgctcaacatcccggtgtccgagttggagagtgctctgcagatggagccagctgccttccaggctttatattctgctgagaagccaaagctggaagatgagcatctcgttttcttctgtcagatgggcaagcggggcctccaggccacgcagctggcccggagtcttggatacactgggtacggggaggtgtggctgctagctgggaggtgatggggactgcctgtcattcctgtcagtctctcacgcttctttgtctccacagggctcgcaactacgctggagcctatagagaatggttggagaaagagagttaggcaggaggcagcttactgattgccaccccctggccccttaatggccaccttaactaagggtgtgaacgggctgacttggtgaattgggcaactccttatagtgttgtgcacacaaaagcatcaaataaagaacatttaatcaaa

SEQ ID NO: 886 - DNA, 2145 bp, Homo sapiens
  source 1..2145: mol_type = genomic DNA
ccggagcctgcggcgggcggctgtgacggccccggcgctgacggcggcggccgggggggcggtgtcgacgcccgcggcgccggctggggcatcaccgcgggcctcgaccccgaaatggcgctgctggccgaacacttgctgaagccgctgcccgcggacaagcagatcgagaccgggcccttcctcgaggcggtgtcccacctgccgcccttcttcgattgccttgggtccccagtgtttactcccatcaaggcagacataagcggcaacatcacgaaaatcaaagctgtgtacgacaccaacccagccaagttccggaccctgcagaacatcctggaggtggagaaagaaatgtatggagcagagtggcccaaagtaggggccacactggcgctgatgtggctgaaaagaggcctccgcttcatccaggtcttcctccagagcatctgcgacggggagcgggacgagaaccaccccaacctcatccgtgtcaacgccaccaaggcctacgagatggccctcaagaagtaccatggctggatcgtgcagaagatcttccaggcagcactgtacgcagcaccctataagtctgacttcctgaaagcgctctccaaggggcagaatgttacggaggaggagtgcctggagaagatccgcctcttcctagtcaactacacggcgaccatcgatgtcatctacgagatgtacacccagatgaacgctgagcttaactacaaggtgtaggcatgcccactgctggacacgtccccgactcgtggccacatggagaaacaggcaaaccagaatcactgtgaatcaagtcggtgaactgcccctggcctgtgtcccccagagcagcccagggtcctgccagagtctgcaggggacagccctcgttttttaagtcttttttttttttttttttggtctattctaaaggaccagtaaataatgatcttacttccaaatctccttggaatttcacgacagcacagactgactttataccttcatttcagcgtggtaaaaaccgattaacacttctaatgagtcaagtcctagggttttttggttttgttttgttgccaacgaggaacacagctctgggggaatggtgtcatccacctcgctttaaaaataagcacatgatggctgggcaccgtggctcacgcctgtaatcccagcactttgggaggctgaggcgggtggatcacctgaggtcgggagtttgagaccagcctggccaacatggtgaaaccccatcgctactaaaaatataaaaaattagctgggcatggtggcgcacgcctgtagttccagctactcaggaggctgaggcaggagaatcgcttgaacccgggaggtggaggttgcagtgagctgagatcgcaccattgcactccagcctgggcaacaagagcgaaactctgtctcaaaaaaaaaaaaaagaggtgggtggattacttgaggtcagggtttgagatcagcctgaccaacatggtgaaaccctatctctactaaaaatatagaattagccaggcatggtagcgcacgcctgtaatcccatcttcttgggaggctgaggcaggagaatcgctagaaactgggaggtggaggttacagtagccgagatcgcgccactgcattccagcctgggcaacaaaagcgaaactctgtctcaaaaaagaaaaaaaagaaaaaaaagcacgtgaccttatgaggctctcgctgtattgttattttaaggactataaagagtttgatttaaaattatgcagggcccctatgtgggattttttaaaaagcaaactggtgtgtattctcatgtggtttgcacagcccagcctcacagcactattgtaaaccctgctctttctgtctcgctagacagatttttttgtttgttttcttttttctggttgttttttgttgttgttgttgttgttttacagctgaaaccaaccagcaagcccttgatgaccaagaggcgtttctttcaaagctatagggcacaaacaattgaccatagatgactccgtttgcattcttctgcagaattatttccttcagggacagattttccaacctaagaaactacctaccgtgtgtattctcttgacggggagagatgaacccttcagctgc

SEQ ID NO: 887 - DNA, 1456 bp, Homo sapiens
  source 1..1456: mol_type = genomic DNA
ctgactcagatggaggaagcccagaggaaacggacacaactccgggaagcctttgagcagctccaggccaagaaacaaatggccatggagaaacgcagagcagtccagaaccagtggcagctacaacaggagaagcatctgcagcatctggcggaggtttctgcagaggtgagggagcgtaagacagggactcagcaggagcttgacagggtgtttcagaaacttggaaacctgaagcagcaggcagaacaggagcgggacaagctgcagaggtatcagaccttcctccagcttctgtataccctgcagggtaagctgttgttccctgaggctgaggctgaggcagagaatcttccagatgataaaccccagcagccgactcgaccccaggagcagagtacaggagacaccatggggagagaccctggtgtgtccttcaaggctgttggtctacaacctgctggagatgtaaatttgccatgacttcctggaggacagcagcatggagaaagatcctagaaaaggtcagacccaactcaggccttggtgtccctggactgcaagtgtggaaggagggaaagcctggtttacctctctctgcatctgagctctgctacccatggagcagatggatggtgggaacaggaaagagcttatgttacacctcattcccatgcttagcccacccagagctaacccctgtcttcttccccaggcctctgacttccctcacctcccaaccatcattacaggaaagactgtgaactcctgagttcagcttgatttctgactacatcccagcaagctctggcatctgtggattaaaatccctggatctctctcagttgtgtatttgttcatcttcatatgctggcaggaacaactattaatacagatactcagaagccaataacatgacaggagctgggactggtttgaacacagggtgtgcagatggggagggggtactggccttgggcctcctatgatgcagacatggtgaatttaattcaaggaggaggagaatgttttaggcaggtggttatatgtgggaagataattttattcatggatccaaatgtttgttgagtcctttctttgtgctaaggttcttgcggtgaaccagaattataacagtgagctcatctgactgttttaggatgtacagcctagtgttaacattcttggtatctttttgtgccttatctaaaacatttctcgatcactggtttcagatgttcatttattatattcttttcaaagattcagagattggcttttgtcatccactattgtatgttttgtttcattgacctctagtgataccttgatctttcccactttctgttttcggattggagaagatgtaccttttttgtcaactcttacttttatcagatgatcaactcacgtatttggatctttatttgttttctcaaataaatatttaaggtta

SEQ ID NO: 888 - DNA, 2650 bp, Homo sapiens
  source 1..2650: mol_type = genomic DNA
agaaggccaagccccaagcccagcctctcgccagctgggagtcgcgcgctgcccacctcgctgcccaggcccccgacgccgcggcaggagccccccaagagcgcgggaagccccgtggacctggcgctcccggctcgggcgtggacggggcgggcgccggggcggggcgcgcgtcctcgcgggtctgaatggaagggtcgaggtcgtcgtcggcggcgagcagatcctgaagccagaactccaccccggcgcccgcgccatgcggcgggagaggtgcggcgccccccacccgcgtcgccgccatggaggtgctgcggcgctcctcggtcttcgccgccgagatcatggacgcctttgaccgctcgcccacagacaaggagctggtggcccaggccaaggcgctgggccgggagtacgtgcacgcgcggctgctgcgcgccggcctctcctggagcgcgcccgagcgtgccgcgccggtcccgggacgcctggctgaggtgtgcgcggtgctgctgcgcctgggcgatgagctggagatgatccggcccagcgtctaccgcaacgtggcgcgtcagctgcacatctccctgcagtctgagcctgtggtgaccgatgcgttcctggccgtggctggccacatcttctctgcaggcatcacgtggggcaaggtggtgtccctgtatgcggtggccgcggggctggccgtggactgtgtgaggcaggcccagcctgccatggtccacgccctcgtggactgcctgggggagttcgtgcgcaagaccctggcaacctggctgcggagacgcggcggatggactgatgtcctcaagtgtgtggtcagcacagaccctggcctccgctcccactggctggtggctgcactctgcagcttcggccgcttcctgaaggctgccttcttcgtgctgctgccagagagatgagctgcccacctggcagtggccgcagcctggccctctgggcccaacgcaggaggccctcagcacccgaacacatcttcctcctccccacccgagcctggagcactctaaccctcggagaccccctaagccccgttcctccgcagacccaggccctccggaaggggtgagtggggaggggctttcctgagcctggagctgggctttggggcagcctgcgaccctccccgcttgtgtcccttctcctgtgatctctgtgttttcccttttctttctggggccaggaagtcagggtcaactcccaggcctcagatgcaggggcccagaacacctgctctcacctgagccccaggtgaaggggcccgggaacacctgctctcacctgagccccaggtgaaggggcccgggaacacctgctctcacctgaaccccaggtgaaggggcccggaacacctgctctcacctgagccccaggtgaaggggcccggaacacctgctctcacctgagccccaggtgaaggggcccgggaacacctgctctcacctgagccccaggtgaaggggcccgggaacacctgctctcacctgaaccccaggtgaaggggcccagaacacctgctctcacctgagccccaggtgaaggggcccggaacacctgctctcacctgagccccaggtgaaggggcccgggaacacctgctctcacctgagcccctggtgaaggggcccggaacacttgctctcacctgagccccaggtgaaggggcccggaacacctgctctcacctgagcccccggtgaaggggcccggaacacttgctctcacctgagccccaggtgaaggggcccggaacacctcctctcacctgagccccaggtgaaggggcccggaacacctcctgtcacctgagccccaggtgaaggggcccgggaacacctctcacctgaacccgggggtcccatcccaggaagaagggccatctcaggacatgagtcctcaggggccctgcacattcaatctgaaggtgaccctggcctggctgaagctggaagagctgtggggactcagcctgtaaacagagcgtaaggttcacatgctggttgcttaatccgtttctggaggaagagtatgacacccacttgtgatggggtccttgtgcggtggggaccggggccggcgggctccaggccagcacacctaacccatggatgtggaacctacggccgagaaggaatgttgcatgagtcggatcccagtccattgtcagtggagggtgagggtgaccccatctgctatttttgtgctcatcctcatacaaccatttggggatgtgcctattagggctccgtaagaactcagatgcctgggaagcccagcccctcaggtgcccccacacacagccttcccttgacgcctacatttctaggcacatgtgaggcatctttcctggagccccgagccagccctgtccctccccagtgcagcatggcactcaggagatacaggctggacatggggcagtcgttctggggaggcctggcctagcagccacccacctgagccctcccggccaggcttcgtgctggggtgggccatgtgccaggacaggagggtcccggcggaaagccagccccggactcatcgtgacattgagatcccactggagggtaggggtggtaataaacttctccaaacgatcgttgtcatttta

SEQ ID NO: 889 - DNA, 3148 bp, Homo sapiens
  source 1..3148: mol_type = genomic DNA
tcgggtgactccgcaacctgtcgctcaggttcctcctctcccggccccgccccggcccggccccgccgagcgtcccacccgcccgcgggagacctggcgccccggccgaggcgcgaacagacggacgcaccggcgagcgccgaggggacaggccgagcgcggggcgccggaggcaggtgtgggacaggcactggcctcagaccggggccacactgaggtctgcccttctcccgctggccgccacccaagacaccatgagccagtccggggccgtgagctgctgcccgggtgccaccaatggcagcctgggccggtccgacggtgtggccaagatgagccccaaggacctgtttgagcagaggaagaagtattccaactccaacgtcatcatgcacgagacctcgcagtaccacgtccagcacctggccacattcatcatggacaagagcgaagccatcacgtctgtggacgacgccatccggaagctggtgcagctgagctccaaggagaagatctggacccaggagatgctgctgcaggtgaacgaccagtcgctgcggctgctggacatcgagtcacaggaggagctggaagacttcccgctgcccacggtgcagcgcagccagacggtcctcaaccagctgcgctacccgtctgtgctgctgctcgtgtgccaggactcggagcagagcaagccggatgtccacttcttccactgcgatgaggtggaggcagagctggtgcacgaggacatcgagagcgcgttggccgactgccggctgggcaagaagatgcggccgcagaccctgaagggacaccaggagaagattcggcagcggcagtccatcctgcctcctccccagggcccggcgcccatccccttccagcaccgcggcggggattccccggaggccaagaatcgcgtgggcccgcaggtgccactcagcgagccaggtttccgccgtcgggagtcgcaggaggagccgcgggccgtgctggctcagaagatagagaaggagacgcaaatcctcaactgcgccctggacgacatcgagtggtttgtggcccggctgcagaaggcagccgaggctttcaagcagctgaaccagcggaaaaaggggaagaagaagggcaagaaggcgccagcagagggcgtcctcacactgcgggcacggcccccctctgagggcgagttcatcgactgcttccagaaaatcaagctggcgattaacttgctggcaaagctgcagaagcacatccagaaccccagcgccgcggagctcgtgcacttcctcttcgggcctctggacctgatcgtcaacacctgcagtggcccagacatcgcacgctccgtctcctgcccactgctctcccgagatgccgtggacttcctgcgcggccacctggtccctaaggagatgtcgctgtgggagtcactgggagagagctggatgcggccccgttccgagtggccgcgggagccacaggtgcccctctacgtgcccaagttccacagcggctgggagcctcctgtggatgtgctgcaggaggccccctgggaggtggaggggctggcgtctgcccccatcgaggaggtgagtccagtgagccgacagtccataagaaactcccagaagcacagccccacttcagagcccacccccccgggggatgccctaccaccagtcagctccccacatactcacaggggctaccagccaacaccagccatggccaagtacgtcaagatcctgtatgacttcacagcccgaaatgccaacgagctatcggtgctcaaggatgaggtcctagaggtgctggaggacggccggcagtggtggaagctgcgcagccgcagcggccaggcggggtacgtgccctgcaacatcctaggcgaggcgcgaccggaggacgccggcgccccgttcgagcaggccggtcagaagtactggggccccgccagcccgacccacaagctacccccaagcttcccggggaacaaagacgagctcatgcagcacatggacgaggtcaacgacgagctcatccggaaaatcagcaacatcagggcgcagccacagaggcacttccgcgtggagcgcagccagcccgtgagccagccgctcacctacgagtcgggtccggacgaggtccgcgcctggctggaagccaaggccttcagcccgcggatcgtggagaacctgggcatcctgaccgggccgcagctcttctccctcaacaaggaggagctgaagaaagtgtgcggcgaggagggcgtccgcgtgtacagccagctcaccatgcagaaggccttcctggagaagcagcaaagtgggtcggagctggaagaactcatgaacaagtttcattccatgaatcagaggaggggggaggacagctaggcccagctgccttgggctggggcctgcggaggggaagcccacccacaatgcatggagtattatttttatatgtgtatgtattttgtatcaaggacacggagggggtgtggtgctggctagaggtccctgcccctgtctggaggcacaacgcccatccttaggccaaacagtacccaaggcctcagcccacaccaagactaatctcagccaaacctgctgcttggtggtgccagccccttgtccaccttctcttgaggccacagaactccctggggctggggcctctttctctggcctcccctgtgcacctggggggtcctggcccctgtgatgctcccccatccccacccacttctacatccatccacaccccagggtgagctggagctccaggctggccaggctgaacctcgcacacacgcagagttctgctccctgaggggggcccgggaggggctccagcaggaggccgtgggtgccattcgggggaaagtgggggaacgacacacacttcacctgcaagggccgacaacgcaggggacaccgtgccggcttcagacactcccagcgcccactcttacaggcccaggactggagctttctctggccaagtttcaggccaatgatccccgcatggtgttgggggtgctggtgtgtcttggtgcctggacttgagtctcaccctacagatgagaggtggctgaggcaccagggctaagcaattaaaccagttaagtctcccagga

SEQ ID NO: 890 - DNA, 2111 bp, Homo sapiens
  source 1..2111: mol_type = genomic DNA
cgggagcggggcggcgggcgccggggctggcatggcgtggccctgtatcagccgcctgtgctgcctggcgcggcgctggaaccagctggaccgctccgacgtggcggtgccgctcactctgcacggctactcggacctcgacagcgaggagccgggcacgggcggcgccgcctcgcgcaggggccagcctcccgcgggcgcccgggattccggccgggacgtgccgctcactcagtaccagcgggacttcggcttgtggaccacgcccgccgggcccaaggatccgccgccggggcgcggaccgggggcgggcggccgcaggggcaaatcctccgcgcagtcctccgcgccacctgcgcccggcgcccgcggggtctacgtgctgcccatcggcgacgcggacgcggctgcagcagtgaccacgtcgtacagacaggaattccaggcttggactggagtgaagccctcaagatccacaaagacaaaaccagcccgagtcatcacaacccacacttcgggatgggacagcagccctggggccggcttccaggtcccagaggtgaggaagaagttcactcctaacccctccgccatctttcaggcctcagctccccggattctcaacgtgtgactgcctgcaccgtgacaccatggctgccgacaggacagggctggggagcggcctcaggacccactgccgcggggctgggcgagagcatggcatgggcccctgcgggagggcacagcccctctcaaagctgtcaccagggccaaagtgctggtgtggagcagatgcaccgatggacttggcacacccagctcagcctcaagcatcctcttgagaagcctgtggaaggctcctgcgttcgttaactgccatctggccgtctctcagttttgaaatctctgaggagcctgaggatcaagtcagttgggaaccgaattggtccatggaagctgaggaatgtggacacatccggcccttgaaagaaccagttatgtccacttttggtggatttcccaggatgcgtgagcacttgattaatttcataacctacagtgagacccttggctcttcctacaaatggcccctgcagttgaagctgttggaatcttgggccgtcacctgcatgactcatggtgatgctgagtatccaggaggaaatttccagaagaaacagaccgtcagtcacgggcttccacttcacagacctccttatggccaagatgagcctcatgttttaacaaaacagttcttgggattgaatgactcacatttaccttgtgctaggttctaaagattgaatccacattttgttactaatgattttcccgctaacataaggatgatgagcagggcactatcatacacactggctgagaactggaactgtttttgggaaggtggcatttgtctcattccctgaaataccttaaaatgtcctctacaccaacccttccgtctaccctgctcacatgtacagtgacggggaactcaccaccttttgaagaggcagttcattttctttgcaaagctctctcctaacttcctccgtaaattccagccagcatggccacatgggtcacgcctggtgccttcacacgtttgaggggtcttcgtctctttttaaagcttagaggtacaagctcaggacagtcttcagtaaggaaatttgtggatttccctttggatctttcttcctctccagcccacaagtggctctagtgagacgagcatttaagctgcaggtggtggcactcgggtctcagagccaccagacgtgcaggtgggacagtggttccagctccgactgcctgtcagcgtccctcccaggtgctagccctggcaggcacagccctcccctcatgccagcaaaggaaatgctcttgatgagaggctcgctttaaagaagcccaaagcgtgtgcttatccaaggggttcagctattcctgacttcacggcttgcatgtttgatttttctaagagaaaagaggctgcctgctgggtgtctgtggaaatgagattaaaaactgtacaatctcagattttactaaaatgcaaaaatgtagtttcagtttcttaaattataagcacgagtcttctcacgctt

SEQ ID NO: 891 - DNA, 5916 bp, Homo sapiens
  source 1..5916: mol_type = genomic DNA
ggctctgtgtatgaatgacaaggataccttcagccagctcattctggatgaatgaatgattacactaagtgtcctccacattcctctgtgggctcacttcatggactcactttgcgtgcttgttaaatgtgctgtgttgctcccaagaccatgtaaagcctactgaccactaacctccctcacagcagaaactagacgtcaggttaaaatgggcaactccgacagtcagtacacccttcaaggatctaaaaatcatagcaatactattactggtgctaagcaaattccttgctccctgaaaatacgtggcattcatgcaaaagaggaaaagtcattgcatggatggggtcacggaagcaacggagcaggttacaagtccaggtccctggcccgaagctgcctttctcactttaagagtaaccagccttacgcatcgagactcggtggccccacatgcaaggtctccagaggtgttgcctactccacgcacaggacaaatgccccagggaaggatttccagggcatcagtgctgctttctcaactgagaatggcttccactctgttggccacgagctggcagataaccacatcacctccagagactgcaacggacaccttctcaactgctacgggaggaatgagagcattgcctccaccccaccgggcgaagaccgcaagagcccccgagtgctcatcaaaacgctggggaagctggatgggtgtttaagggtcgagttccacaatggtggcaaccccagcaaagtgcctgcagaggactgcagtgagccggtgcagctgctgaggtactcacctaccttagcatcggaaacctcccctgtgcctgaagccaggagggggtccagcgccgattccctgcccagccatcgcccctctcccacggactctcgcctgcggtccagcaaaggcagctccctgagttctgagtcatcctggtacgactccccttggggcaatgctggagagctgagcgaggctgagggctccttcctggcccccggcatgcctgaccccagtctccatgccagcttcccacctggcgatgccaaaaagcctttcaaccaaagctcttccctctcctccctccgggaactgtacaaagatgccaacctggggagcctctccccctcaggtatccgcctttctgatgaatacatgggcacgcatgccagcctgagcaaccgtgtctcttttgcttccgacattgatgtgccctccagagtggcacacggggaccccatccagtacagttccttcactctcccctgtcggaagcccaaagcctttgttgaggatactgcgaagaaggactccctcaaagccaggatgcgacggatcagtgactggacgggaagcctctcaaggaagaaaaggaaactccaggagccgaggtccaaggagggcagtgactactttgacagtcgctctgatggactgaatacagatgtgcagggatcctcccaggcatctgcttttctgtggtcagggggctctactcagatcctgtctcagagaagtgaatccacacatgcgattggcagcgatcccctccggcagaacatttatgagaatttcatgcgagagttggaaatgagcaggaccaacactgagaacatagaaacatctacagaaaccgccgagtccagcagcgagtcactcagctctctggaacagctggatctgctctttgagaaggaacagggggtggtccggaaggccgggtggctcttcttcaagcccctggtcactgtgcagaaggaaaggaagcttgagctggtggcacgaaggaaatggaaacagtactgggtaacgctgaaaggatgcacgctgctgttttatgagacctatgggaagaattccatggatcagagcagtgcccctcggtgtgctctgtttgcagaagacagcatagtgcagtctgttccagagcatcccaagaaagaaaatgtgttctgcctcagcaactcctttggagatgtctaccttttccaggccaccagccagacagatctagaaaactgggtcactgctgtacactctgcttgtgcatccctttttgcaaagaagcatgggaaagaggacacgctgcggctgctgaagaaccagaccaaaaacctgcttcagaagatagacatggacagcaagatgaagaagatggcagagctgcagctgtccgtggtgagcgacccaaagaacaggaaagccatagagaaccagatccagcaatgggagcagaatcttgagaaatttcacatggatctgttcaggatgcgctgctatctggccagcctacaaggtggggagttaccgaacccaaagagtctccttgcagccgccagccgcccctccaagctggccctcggcaggctgggcatcttgtctgtttcctctttccatgctctggtatgttctagagatgactctgctctccggaaaaggacactgtcactgacccagcgagggagaaacaagaagggaatattttcttcgttaaaagggctggacacactggccagaaaaggcaaggagaagagaccttctataactcaggtcgatgaacttctgcatatatatggttcaacagtagacggtgttccccgagacaatgcatgggaaatccagacttatgtccactttcaggacaatcacggagttactgtagggatcaagccagagcacagagtagaagatattttgactttggcatgcaagatgaggcagttggaacccagccattatggcctacagcttcgaaaattagtagatgacaatgttgagtattgcatccctgcaccatatgaatatatgcaacaacaggtttatgatgaaatagaagtctttccactaaatgtttatgacgtgcagctcacgaagactgggagtgtgtgtgactttgggtttgcagttacagcgcaggtggatgagcgtcagcatctcagccggatatttataagcgacgttcttcccgatggcctggcgtatggggaagggctgagaaagggcaatgagatcatgaccttaaatggggaagctgtgtctgatcttgaccttaagcagatggaggccctgttttctgagaagagcgtcggactcactctgattgcccggcctccggacacaaaagcaaccctgtgtacatcctggtcagacagtgacctgttctccagggaccagaagagtctgctgccccctcctaaccagtcccaactgctggaggaattcctggataactttaaaaagaatacagccaatgatttcagcaacgtccctgatatcacaacaggtctgaaaaggagtcagacagatggcactctggatcaggtttcccacagggagaaaatggagcagacattcaggagtgctgagcagatcactgcactgtgcaggagttttaacgacagtcaggccaacggcatggaaggaccgcgggagaatcaggatcctcctccgaggtctctggcccgccacctgtctgatgcagaccgcctccgcaaagtcatccaggagcttgtggacacagagaagtcctacgtgaaggatttgagctgcctctttgaattatacttggagccacttcagaatgagacctttcttacccaagatgagatggagtcactttttggaagtttgccagagatgcttgagtttcagaaggtgtttctggagaccctggaggatgggatttcagcatcatctgactttaacaccctagaaaccccctcacagtttagaaaattactgttttcccttggaggctctttcctttattacgcggaccactttaaactgtacagtggattctgtgctaaccatatcaaagtacagaaggttctggagcgagctaaaactgacaaagccttcaaggcttttctggacgcccggaaccccaccaagcagcattcctccacgctggagtcctacctcatcaagccggttcagagagtgctcaagtacccgctgctgctcaaggagctggtgtccctgacggaccaggagagcgaggagcactaccacctgacggaagcactaaaggcaatggagaaagtagcgagccacatcaatgagatgcagaagatctatgaggattatgggaccgtgtttgaccagctagtagctgagcagagcggaacagagaaggaggtaacagaactttcgatgggagagcttctgatgcactctacggtttcctggttgaatccatttctgtctctaggaaaagctagaaaggaccttgagctcacagtatttgtttttaagagagccgtcatactggtttataaagaaaactgcaaactgaaaaagaaattgccctcgaattcccggcctgcacacaactctactgacttggacccatttaaattccgctggttgatccccatctccgcgcttcaagtcagactggggaatccagcagggacagaaaataattccatatgggaactgatccatacgaagtcagaaatagaaggacggccagaaaccatctttcagttgtgttgcagtgacagtgaaagcaaaaccaacattgttaaggtgattcgttctattctgagggagaacttcaggcgtcacataaagtgtgaattaccactggagaaaacgtgtaaggatcgcctggtacctcttaagaaccgagttcctgtttcggccaaattagcttcatccaggtctttaaaagtcctgaagaattcctccagcaacgagtggaccggtgagactggcaagggaaccttgctggactctgacgagggcagcttgagcagcggcacccagagcagcggctgccccacggctgagggcaggcaggactccaagagcacttctcccgggaaatacccacaccccggcttggcagattttgccgacaatctcatcaaagagagtgacatcctgagcgatgaagatgatgaccaccgtcagactgtgaagcagggcagccctactaaagacatcgaaattcagttccagagactgaggatttccgaggacccagacgttcaccccgaggctgagcagcagcctggcccggagtcgggtgagggtcagaaaggaggagagcagcccaaactggtccgggggcacttctgccccattaaacgaaaagccaacagcaccaagagggacagaggaactttgctcaaggcgcagatccgtcaccagtcccttgacagtcagtctgaaaatgccaccatcgacctaaattctgttctagagcgagaattcagtgtccagagtttaacatctgttgtcagtgaggagtgtttttatgaaacagagagccacggaaaatcatagtatgattcaatccagatatgggttaaattcctcattttacttttaaactggtggtaaagtggaaattgcaaaaaaaaaaaaaaaaaaaaactgttcattcctgggttttgtgcagtatacattttcccacaaaatggttgtaaagatttaagttattttaatttattgtggatcagaaacctagatgaaactggtcagaatctgtaaattacttagtttatatccactttgagcaggtatcaaatgatttaggatccttaaaattacattctaataattaagttatgtggaaaaagtaaggctggggaagtcgtgattaatagttttcaaagggccattttttaaaatcctctgggcattttctttcagctgtttgttagtttttgctttatttaaagcatatttaagttattttaatgtggtttaggggcaaaatgtgcagatacttcatttttgtaagatagattgtaatagatgctgtttatactaaacatgtcataactatctatacagtatatattaaaagaaagcttgtactgtatcttatttgatgatatttattttctctgccaagctgtatagtaaaaggaaaataagtcaca

SEQ ID NO: 892 - DNA, 3741 bp, Homo sapiens
  source 1..3741: mol_type = genomic DNA
aggcctaagcgcggccgccgtggctcctgcgtctcccatcgtgccgtgcgtcccgcgccgcgttcgagttctcggaggggagggggcgttagccccgcgcagccgccggcgtcgccgccatggacctaggacccttgaacatctgtgaagaaatgactattctgcatggaggcttcttgctggccgagcagctgttccaccctaaggcactggcagaattaacaaagtctgactgggaacgtgttggacggcccatcgtggaggccttaagggagatctcctcggctgcagcacactcccagccctttgcctggaagaagaaagccctgatcatcatctgggccaaggttctgcagccgcaccccgtgaccccgtccgacacagagacacggtggcaggaagacctgttcttctcggtgggcaacatgatccccaccatcaaccacaccatcctcttcgagctgctcaaatccctggaagcttctggactctttatccagctcctgatggccctgcccaccaccatctgccatgcagaactagagcgctttctggaacatgtgaccgttgacacttctgccgaagacgtggccttcttcctggacgtctggtgggaggtgatgaagcacaagggtcacccgcaggaccccctgctctcccagtttagtgcaatggcccataagtacctgcctgccttagatgagttcccccatcctccaaagaggcttaggtcagacccagacgcgtgccccaccatgcccctgttggccatgctgctccgcgggctgacacagatccagagtcggatcctgggcccggggaggaagtgctgtgcgctggccaacctggctgacatgctgactgtgtttgcgctgacagaggacgacccccaggaggtgtctgcaaccgtgtatctggacaaactggccacggtgatctctgtgtggaactcggacacccagaatccctaccaccagcaggcgctggcagagaaggtgaaggaggcagaacgggatgtcagcctgacctcgctggccaaactccccagtgagaccattttcgtgggctgcgagttcctgcaccacctgctgcgggagtggggggaggagttgcaggccgtgctccgcagcagccaggggacaagttacgacagctaccggctgtgcgacagtctgacttccttcagccagaacgcgacgctctacctgaaccgcaccagcctgtccaaggaggacaggcaggtggtctctgagctggcggagtgtgtcagggacttcctgaggaaaacgagcacggtgctgaagaacagggccttggaggatatcacagcttccattgccatggccgtcatccagcagaagatggaccgccatatggaagtgtgctacatttttgcctctgagaagaagtgggccttctcggacgagtgggtagcctgcctggggagtaacagggccctcttccgacagccagacttggtgttgaggctgctggaaacagtgatagacgtcagcacagctgacagagccatccctgagtctcagatccggcaggtgatccacctgatcctggaatgttacgcagacctctccctgccaggtaaaaataaagtccttgcaggtatcctgcgttcctgggggcgaaagggcctctctgaaaagttgctggcttatgtggagggttttcaggaagacctcaatacaacttttaaccagctcactcagagtgcctccgaacagggcttggcaaaagctgtggcctccgtggcccgcctggtcatagtgcacccggaagtcacggtgaagaaaatgtgcagcctggctgtggtcaatctcggcacccacaagttcctggcccagattctcactgccttccctgcccttaggtttgtggaagagcagggtcccaattcatctgccactttcatggtgtcatgcctcaaagaaaccgtctggatgaagttctctacacccaaggaagaaaagcaatttttagagctcctgaactgcctgatgagtcccgtgaaaccccaagggattccagtggctgctcttcttgagccagacgaggtgctgaaggaatttgtcctgcctttcttgaggttagatgttgaagaggtagacctcagtctgaggatcttcatccagactctagaggcaaacgcgtgccgagaggaatactggctccagacctgctccccgtttccactcctcttcagcttgtgccagctcttggaccgcttcagcaaatactggcagcttcccaaggagaagcggtgcctctctttggataggaaggatctagcgatccatatcctggagctcctgtgtgagattgtatcagccaatgctgagaccttctccccggatgtctggatcaagtccctgtcctggctccaccgcaagttagaacagctagactggactgtgggcctgaggctgaagagcttcttcgaggggcacttcaagtgtgaagtgccagccacactttttgagatctgtaagctttcagaagacgagtggacctcccaggcccacccagggtacggggctggcacggggctcctggcctggatggagtgctgctgcgtctccagcggcatctcggagaggatgctgtctctcttggtggtggacgtgggcaatcctgaggaggtcagactgttcagcaaaggctttctggtggccctggtgcaagtcatgccttggtgcagccctcaggagtggcagcgccttcaccagctgaccaggagactgctggagaagcagctcctccatgtcccttatagcctggaatatattcagtttgttcccctgctcaacctgaagccctttgcccaggagttgcaactctccgtcctcttcctgaggactttccagtttctctgcagccatagctgtcgtgattggcttcctctggaaggctggaaccacgtggtcaaactcctctgtggcagtctgacccgcctcctggactcagtcagggcgatacaggcagctggcccttgggttcaaggaccagagcaggacctgacccaggaagccctgtttgtttacacccaggtgttctgccatgctctgcacatcatggccatgctccacccggaggtctgtgagccactctacgttttagccttggaaaccctcacctgctatgagactttgagcaagaccaacccttctgtcagctccttgctccagagggcacacgagcagcgcttcttaaagtccattgctgagggcatcggccctgaagaacggcgccaaaccctgttgcagaagatgagcagcttctgacttggcgtggggagctgggccccaacatggcgggtctgcagaagatcagcagcttcttacctgtgcgggagcgaaaaagctgggcttcaacatggcaggtctgtaggggtcagacccgagcagcctggactttacagttatgtgaaactgtccacaaaaagtcatggcaataatggtgtaaagaaaatagtttcttgggtatttgtaacgtacaaactatcataaaaattctcctctttcgcatctcactttgtctcttctaagtcggcctcagcaatagcccaggattaaatatgctctgaaattgggtttagtgtcttcaagatcaaatccagccaggaggaacatgttcataactggacttttccatcctagattttggcaaataagcccaaagttgaaaccatgtgagtggaaaaagcattacatggtacgtataaccccc

SEQ ID NO: 893 - DNA, 768 bp, Homo sapiens
  source 1..768: mol_type = genomic DNA
cctctgcccgccggcccgtctgtctacccccagcatgagcggcctgcgcgtctacagcacgtcggtcaccggctcccgcgaaatcaagtcccagcagagcgaggtgacccgaatcctggatgggaagcgcatccaataccagctagtggacatctcccaggacaacgccctgagggatgagatgcgagccttggcaggcaaccccaaggccaccccaccccagattgtcaacggggaccagtactgtggggtatgggctgggggacgggggggtggggggagtgttggaagaggactctagccagggtcatatctgccacaaagcacttgggccccctgcattcaggtgaccacccctcgcctccccttctccaggactatgagctcttcgtggaggctgtggaacaaaacacgctgcaggagttcctgaagctggcttgagtcaagcctgtccagagttcccctgctggactccatcaccacactccccccagccttcacctggccatgaaggaccttttgaccaactccctgtcattcctaacctaaccttagagtccctcccccaatgcaggccacttctcctccctcctctctaaatgtagtcccctctcctccatctaaaggcaacattccttacccattagtctcagaaattgtcttaagcaacagccccaaatgctggctgcccccagccaagcattggggccgccatcctgcctggcactggctgatgggcacctctgttggttccatcagccagagctc

SEQ ID NO: 894 - DNA, 1050 bp, Homo sapiens
  source 1..1050: mol_type = genomic DNA
gacgtcacgtccggcgcggagacggtggagtctccgcactgtcggcggggagctttctcttgcataccctcgcttaggctggccggggtgtcacttctgcctccctgccctccagaccatggacggctccttcgtccagcacagtgtgagggttctgcaggagctcaacaagcagcgggagaagggccagtactgcgacgccactctggacgtggggggcctggtgtttaaggcacactggagtgtccttgcctgctgcagtcactttttccagagcctctacggggatggctcagggggcagtgtcgtcctccctgctggcttcgctgagatctttggcctcttgttggactttttctacactggtcacctcgctctcacctcagggaaccgggatcaggtgctcctggcagccagggagttgcgagtgccagaggccgtagagctgtgccagagcttcaagcccaaaacttcagtgggacaggcagcaggtggccagagtgggctggggccccctgcctcccagaatgtgaacagccacgtcaaggagccggcaggcttggaagaagaggaagtttcgaggactctgggtctagtccccagggatcaggagcccagaggcagtcatagtcctcagaggccccagctccattccccagctcagagtgagggcccctcctccctctgtgggaaactgaagcaggccttgaagccttgtccccttgaggacaagaaacccgaggactgcaaagtgcccccaaggcccttagaggctgaaggtgcccagctgcagggcggcagtaatgagtgggaagtggtggttcaagtggaggatgatggggatggcgattacatgtctgagcctgaggctgtgctgaccaggaggaagtcaaatgtaatccgaaagccctgtgcagctgagccagccctgagcgcgggctccctagcagctgagcctgctgagaacagaaaaggtacagcggtgccggtcgaatgccccacatgtcataaaaagttcctcagcaaatattatctaaaagtccacaacag

SEQ ID NO: 895 - DNA, 1021 bp, Homo sapiens
  source 1..1021: mol_type = genomic DNA
ggcacccccgtccgttccgactctcgcgagatccctactggctataaaggcagcgccccggagagctcttgcgcgtcttgttcttgcctggtgtcggtggttagtttctgcgacttgtgttgggactgctgataggaagatgtcttcaggaaatgctaaaattgggcaccctgcccccaacttcaaagccacagctgttatgccagatggtcagtttaaagatatcagcctgtctgactacaaaggaaaatatgttgtgttcttcttttaccctcttgacttcacctttgtgtgccccacggagatcattgctttcagtgatagggcagaagaatttaagaaactcaactgccaagtgattggtgcttctgtggattctcacttctgtcatctagcatgggtcaatacacctaagaaacaaggaggactgggacccatgaacattcctttggtatcagacccgaagcgcaccattgctcaggattatggggtcttaaaggctgatgaaggcatctcgttcaggggcctttttatcattgatgataagggtattcttcggcagatcactgtaaatgacctccctgttggccgctctgtggatgagactttgagactagttcaggccttccagttcactgacaaacatggggaagtgtgcccagctggctggaaacctggcagtgataccatcaagcctgatgtccaaaagagcaaagaatatttctccaagcagaagtgagcgctgggctgttttagtgccaggctgcggtgggcagccatgagaacaaaacctcttctgtattttttttttccattagtaaaacacaagacttcagattcagccgaattgtggtgtcttacaaggcaggcctttcctacagggggtggagagaccagcctttcttcctttggtaggaatggcctgagttggcgttgtgggcaggctactggtttgtatgatgtattagtagagcaacccattaatcttttgtagtttgtattaaacttgaactgagacctt

SEQ ID NO: 896 - DNA, 1143 bp, Homo sapiens
  source 1..1143: mol_type = genomic DNA
atagagaactcccgtaattggtcggagctctggaggcggggcttcgagcgtggctcgtgggttttccgtgaagtcgcggtgcagcggtgggcggcatgtctgtggccggtggggagattcgtggggacacggggggagaggacactgctgctcccggccggttcagcttcagcccggagcccacgctcgaggacatccgccgcctccatgctgagtttgctgcggaacgagactgggaacagttccatcagcctcggaatctcctcctggccttggttggggaagtgggggagctggcagaactctttcagtggaaaaccgatggggaacctggcccccaaggctggtcccccagggaacgggcagcccttcaagaggagcttagtgacgtcctcatctacctggtggcattagcagcccgctgccgtgtggatctgccgctagcagtgctctccaaaatggacatcaaccggcgacgctacccagcccatctggcccgcagctcttcccgcaagtatacagaattgccccatggggccatctctgaagaccaggctgtggggcctgcggacattccctgtgactccacaggccagacctcaacctagaaagatggccacaggacttgcaactcagggtggtgtctgaagagcagagagtggcctggccctggagcctttttctagtcttttcagaatagatcatgggcctgaggcctccacttcttgaggtctgaggcccagcagcctctagaaggtagcctcctggtgtttgttctcccagtaaaatggttttgggcgataacttctagattattcctggatggccagggaggctctctgtctcagcaggtgatgacgggggtaccaggggtgcctctgagacccattctcgtgtttccctgttgtaccttttgcctgcagggcagagagatctggtttctagcaaattcccagtaggatgtcatgtaagttccttccccctcttagagattgaaggctgtaagagtccagatggtggagccaggctgtctgggttcaaatgccatctttgacacttgcaagctaaatgacattactcaaattaatcgttctgcacttcagcttccttgtctatcaaataaaaagaatagtacctgcccaa

SEQ ID NO: 897 - DNA, 1023 bp, Homo sapiens
  source 1..1023: mol_type = genomic DNA
acacaaaggggtggtcaccctgccctcaccttgacctgtaagttgcctaggacagtggcctggtcccaggggctgttgtggggagttgaagaacaccctggcctcctccatcatgtcggccaagagggcagaattgaagaaaacacatctgagcaagaactacaaggcagtttgcctggaattgaagccagagccgaccaaaacatttgattacaaagcagttaaacaagaagggcggtttaccaaagcaggagtgacacaggacctaaagaatgaactcagggaagtgagagaagagctcaaggagaaaatggaggagataaaacagataaaggatctaatggacaaggattttgataaacttcacgaatttgtggaaattatgaaggaaatgcagaaagatatggatgagaagatggacattttaataaatacacagaagaactataagcttccccttagaagagcaccaaaggagcagcaggaactcaggctgatgggaaagactcacagagaaccacagctcaggcccaagaaaatggatggagccagtggagtcaatggagcaccctgtgctcttcacaagaagacgatggcaccacaaaaaacaaaacagggctcactggatccccttcatcactgtgggacctgctgcgagaaatgtttgttgtgtgctctaaagaacaactacaatcgggggaacattccttcagaggcctcaggcctttacaaaggtggagaggagccagtgaccacccaaccttctgtgggccacgctgtgcctgccccaaagtcccagactgagggaaggtgaagcttaactgccagcttgaaatgagagtaaagaagatacagagcaaacagtgtttcagaaactgtcctgccctgggtgtgattctttggcttcaatttgaaggacgaggaatgatgggatttcatattttatttcacaccagttcctccttgtttcatctctttgctaagctggctgcttctaccatctaataaataattggccaagtt

SEQ ID NO: 898 - DNA, 2824 bp, Homo sapiens
  source 1..2824: mol_type = genomic DNA
cgttcacacctcctttccgagtatctgcatgccttgctggcccagagcacaagacccccattgtgctcccccggctcagaatccaaggaaagaaaggaagcgaagcctctgcattgagttctaggacagctgagacacttggattggacttaatcttaaacctctggagttcaagaccttttaaaaagggctaaataaacaatctctacatgtaaaaggccactgactcctacttcctctgtatagagcaactgttgaactcagctgcctgtagatagcggtgggtgtgctcgcaaacgtgccgccatgtctgttacgctaacatctgtgaagagagtgcaaagttctccaaacctattggctgcagggcgtgattctcagtcaccagactcagcttggagatcttacaatgatggcaatcaggagacactgaacggagatgctacatattcctctcttgcagcaaaaggttttagaagcgttcgaccaaacctacaagataaaagatcaccaactcagagccagataacagtgaatggaaactcaggaggtgccgtgagtcccatgagttactatcagaggccgttttccccctcggcatattctctcccagcctcactcaactccagcattgtcatgcagcacggcacatccctcgattccacagacacatatccccagcatgcgcagtctctggatggcaccaccagcagctctatccccctgtaccgatcctcagaggaagagaagagagtgacagtcatcaaagccccgcattacccagggatcgggcccgtggatgaatccggaatccccacagcaattagaacgacagtcgaccggcccaaggactggtacaagacgatgtttaagcaaattcacatggtgcacaagccggatgatgacacagacatgtataatactccttatacatacaatgcaggtctgtacaacccaccctacagtgctcagtcacaccctgctgcaaagacccaaacctacagacctctttccaaaagccactccgacaacagccccaatgcctttaaggatgcgtcctccccagtgcctcccccacatgttccacctccagtcccgccgcttcgaccaagagatcggtcttcaacagaaaagcatgactgggatcctccagacagaaaagtggacacaagaaaatttcggtctgagccaaggagtatttttgaatatgaacctggcaagtcatcaattcttcagcatgaaagaccaccccctctcccaacaactccgacacctgttccaagggaacctggccggaagcctctttctagctcccgactcggagaagtcactggtagcccctcccctccgccccggagtggcgcccccacaccaagctcgcgcgccccggctctgtctcccacccggcctcctaaaaagcctctggactatgttcaagatcattcttctggtgttttcaatgaggcctccttgtatcagtcctctatagacagaagcctggaaagacccatgagttctgcaagcatggccagtgacttcaggaagcggaggaagagcgagcctgcagtgggtccaccacggggcttgggagatcaaagtgcgagcaggactagcccaggccgagtggacctcccaggatcaagcaccactcttacaaagtctttcactagctcttctccttcttccccatcaagagcaaaagaccgtgagtcccctagaagttactcatccactttgactgacatggggagaagtgcaccaagggaaagaagaggaactccagaaaaagagaaattgcctgcaaaagctgtttatgattttaaggctcagacatctaaggagttgtcatttaagaaaggagatactgtctacatcctcaggaaaattgatcaaaattggtatgagggagaacaccacgggagagtgggcatcttcccgatctcatacgtagagaaactcacacctcctgagaaagcacagcctgcaagaccacctccgccagcccagcccggagaaatcggagaagctatagccaaatacaacttcaacgcagacacaaatgtggagctgtcactgagaaagggagatagagttattcttcttaaaagagttgatcaaaactggtatgaaggtaaaatcccaggaaccaacagacaaggcatcttccctgtttcctatgtggaggtcgtcaagaagaacacaaaaggtgctgaggactaccctgaccctccaataccccacagctattctagtgataggattcacagcttgagctcaaataagccacagcgtcctgtgtttactcatgaaaatattcaaggtgggggggaaccgtttcaggctctgtataactatactcccaggaatgaagatgagctggagctcagagaaagtgatgtcattgatgtcatggaaaagtgtgatgacggctggtttgtggggacctcaagaagaaccaaattctttggtactttccccggaaactacgtcaagaggctgtgaattgcgctccctccttctgtagaggccgcctgccagccatgcacctgcgtcaacgcgcctgaaacaccccgcgggcctcccgttgtcatgccttacggtttccaatgcgccgtcaccatctccacctgccaccaaaccaccagcagagtagccgccgctgctgtgagcctggggacgacatggcaggctggtccccctccgtgaaagtgtggattcctacttcctgctctaagctttgacacgtcaaaatgtgggatcagaaagaaaaaaatcatgatatttaaaaatggtcaaatatttgaggcaaaaaaaaaaaaaaaaa

SEQ ID NO: 899 - DNA, 3036 bp, Homo sapiens
  source 1..3036: mol_type = genomic DNA
ccccgctcccaagtgcgcgcggacccctagctccctctgagttgcgctgggcttggctgctgcaccatgaccctggaggcgatccgctactcgcggggctccctgcagatcctagaccagctgctgctgcccaagcagagccgctacgaggcggtgggctcggtgcaccaggcctgggaggccatccgcgccatgaaggtgcggggcgccccggccatagccctggtgggctgtctcagcctcgccgtggagctgcaggcgggcgccgggggaccgggactcgccgcgctcgtggccttcgtgcgcgacaagctgagcttcctcgtcaccgcccggcccaccgctgtcaacatggcccgcgccgcccgcgacctggctgatgttgcagcccgggaggccgaacgggagggcgctacggaagaggcggtccgggagagacgtgaaacggagctatgcgagcattgggaagagcataccaggcagagggaactgccactgcgagggcccctgggcgggactgtgctcgagacccggccctacaaccagggagcccggctgacggcctttgagctggtctatgagcagatccccgccacccttatcaccgacagcatggtggctgctgccatggcccataggggcgtgtcagctgtggtcgtgggagctgaccgcgtggttgccaacggcgacacagccaacaaggtgggcacctaccagctggccattgtcgccaagcaccatggcattcccttctacgtggctgcccccagctcttcatgtgacctccgtctggagaccggcaaggagatcattattgaagagcgaccgggccaggagctgaccgatgttaatggggtccggattgcagcacctgggattggagtttggaatcctgccttcgatgtcaccccccacgacctcatcactggtggcatcatcacagaactgggggtctttgcccctgaggagctccggacagccctaaccaccaccatctcttccagggatggaaccctagatggaccccagatgtaaccaactcagctctccctagcctgcctctctaggtttttcaatacatttcttgaatggctacccaaaagctgaccgtccagcccctgaccacacttgttcctagtgcagggagctcagacagggccttccatctagagcccagcacctagagccaggctgcccagattcaaatcctgactccgccacttttcccactgtatgatcttgggcaagtcacttcacctctctgtgccttggtttcctcatttataaaatgtggataacaggccgggcgcagtggctcacacctgtaatcccagcactttgggaggccgaggcaggtggatcacaagatcaggagattgagaccatcctggctaacatggtgaaaccccatctctactaaaaatacaaaaaattagccgggtgtggtggtgggcacctgcagtcccagctacttgggaggctgaggcaggagaatggcgtgaaactgggaggcagagcttgcagtgagccgagatagcgccactgcactccagcctgggcaacagagcgagactccgtctcaaaaataaatataattaattaattatttaattaaaaaaataaaaaataaatgtggataatactagtacctccctcttaaggtcagggctggagctagggtgacatctccagggcagaattttaagaggacaccaaaaaagctcagcaaccaagataaaaaatattttaaagcaatattttgttttgggttttttttttttgagatcaagtatcactcgttacccaggctggaatgtagaggcgagatctcagctcactgaaacctgtgcctccccggttcaagcgattctcctgccacagcctcctgagtagctgggattacaggcatgcgccaccatgcccagctaatttttctatttttagtagagacatgatttcaccatgttggccaggctggtctcgaactcctgactcaaatgatccccctgcctcagcctcccaaagtgctgggactacaggcatgagccactgtgcctgaccttacagcagtattttttaaaaatcaaaattaatgcaaaaatccatgatgaggccaggcttggtggctcatgcctgtaattccagcactttgggaggatcccttgagcccaggtgtttgagaccagtttgggtaacataggaagagcttgtctctacaaacaaaaatttaaaaacaatgagctgggcatggaactcacacctctagccccagctactcaggctgaagtgggaggatggcttgagcccaggagttcaaggatgcagtgtgctttgattgcactactgcacttcaccctaagcaacagagtgagaccccatctctttaaaaaaaaaaaaaaatccatgatgaacaaaacaagtatttgtttgagacggggtctcgctctgtcgcccaggctggagtacagtggtgccatctcagctcactgcaacctccgccttctgggttcaagcgactctcctgcctcagcctcccgagtagctgggattacaggagcctggcactatgcctggctaatttttgtatttttattggagacaccatgttagtcgtggctggtctccaactcctgacctcgggtgatccgcgccccgcggcctccgaaagtgctgggattacaagcgtgagccaccgtgcccggcctaaataaaattttgaagaggctagaaccccgcacttgtgccttgagcttactgacctcaacaccctggttccactaaaactttatttacaaaattatgctgccggtctgcaggatgtagtttaacaatttgattattttggatattaaaatattttttaagtcttgaaaatattgtttactattaccaaagtttttgaaccttcttaaattctgtaccagaggtgagtgccacaccctaacctagtctgagtttttatgtgtaaagatcataaaacgttgtaagttttctaaaacacataagctctcaataaacgttagcttatcattgtca

SEQ ID NO: 900 - DNA, 6434 bp, Homo sapiens
  source 1..6434: mol_type = genomic DNA
gccgcagccgcagccgcagcgacggcagccacgggagccgccgcgcattatgcaaagcggcggcagatgcgagcggggccagccgggcgcgcgtcggcctcccctcccagcggctccccccgccgccgcctgactctcccgggagactccctaggcccggacctggggccgaggagggccgggatggcctgagtgcccgcggcgcggcggcgcagcagcgggattgcaccatggggaaccaggatgggaagctgaagaggagcgcaggtgatgctttgcacgaaggcggcggtggcgccgaggatgcgctggggcccagggatgtggaagccacaaagaaggggagcgggggcaagaaggcgctaggcaagcacggcaaggggggagggggcggcggcggcggcggggagtcgggcaagaagaagagcaagtccgactccagagcctcggtgttttccaacctgcggatcaggaagaatctgtccaaggggaaaggcgccggcggctcccgcgaagatgtactggattcccaggccctgcagaccggggagctggacagcgctcactccctgctcaccaagactccagacctcagcctctcggcggacgaggccggcctgtcggataccgagtgtgcggacccttttgaggtgaccggtccagggggtcctgggcctgccgaggctagggtcgggggccggccgatcgccgaggatgtggaaactgcagcaggggcgcaggatggacaaaggaccagctcgggctcggacacggacatctatagcttccattcggctacggagcaagaggatttgctttcagacatccagcaggcgatccgcctgcagcagcagcagcagcagcagctccagctccagctccagcaacagcagcagcagcagcagctccagggcgccgaggagcctgcagcgccccccactgccgtctcccctcagcccggggccttcctgggcctggaccggttcctgctggggccgagcggcggggctggggaggccccgggcagtccggacaccgagcaggcgctgtccgcgctctccgacctgcccgagagcctggccgccgagccccgggagccccagcaaccgccgtcccccggcggcctcccggtctccgaggcgcccagtctcccggcagcgcaacccgcggccaaagactcgccctcctccacggctttcccatttcccgaggccgggccgggggaggaagcggccggagcccccgtgcgaggggctggggacacggatgaggagggtgaggaggatgcttttgaggatgcgccccggggctctccgggggaggagtgggccccggaggtgggagaggacgccccgcagaggctgggggaagagccggaggaggaggcgcaaggacctgacgcccccgcggccgcttccctgcccggcagccccgcgcctagccagcgctgtttcaagccctacccgctcatcaccccctgctacatcaagaccaccacccggcagctcagctcgcccaatcactccccgtctcagtcccctaatcagagccccaggatcaagaggcggccggaaccctccctgagccgagggtccagaactgccctggcctccgtagccgccccggccaagaagcaccgggccgacggcggccttgcggccggcctgagccgctcggctgactggacggaggagctaggcgcccgcacgccccgggtgggaggctccgcgcacctgctggagcgcggggtggcgagtgacagcggcggtggggtgtccccagcactggccgccaaggcgtctggggcccccgcggctgcggatggcttccagaacgtgttcacagggcgaacgctgttggagaagctgttcagccagcaggagaacgggcctccagaagaagcagagaagttttgctcccggatcattgccatgggtcttctccttccttttagtgattgcttcagggaaccgtgtaatcagaatgcccagacgaatgcagcttcgtttgatcaagatcaactttatacctgggctgcagttagtcaacccacacactcattggactattcagaagggcagtttcctaggcgagttccatccatggggccaccatccaaacctcccgatgaggaacacaggctcgaggatgctgaaacagaatctcaatctgctgtttcagaaactccccaaaaacgctcagatgctgtccagaaggaagttgttgacatgaagtctgagggacaggccactgtaattcagcagctggaacagactattgaggatctgagaaccaaaatagctgaactagagaggcagtatcctgccctggacacagaggtggccagtggtcatcaagggcttgagaatggagtgacagcctcaggcgatgtctgtctcgaagctctcaggttagaagaaaaggaagtacggcatcataggattttagaggcgaaatcgatacagacttcccccacggaagagggcggggtgctgacactgcctcctgtggatgggctgccagggcgtcctccatgcccccctggggctgaaagtggacctcagacaaagttctgttcagagatttctttgattgtgtctccaaggcgaatatcagtccagctcgacagccatcagcccacacagagcatctcacagcctccaccacctccatcccttctgtggtctgctgggcaaggacagcctgggtcacagccgccccattctatttctaccgagtttcaaaccagccacgaacactctgtttcctctgcctttaaaaacagctgtaacatcccatctccaccacctctgccttgcacagagtcctccagctccatgcctggcctgggcatggtgcctcccccacctccccctctccctggcatgacagtgcctactctgcccagtacagccattccccaacctcctcctctgcagggtacagaaatgctgccaccccctccccctcctcttcccggagcgggcatacctcctccgccgcctctacccggagcaggcatactccctctgccccctctacccggagcgggaatacctcctccgccccctctacccggagcggcaataccccctccgccccctcttcccggggcaggcataccccttcctccccctcttcccggagcaggaatacctcctccaccccctctacccggagcgggcataccccctcctcccccacttcccggagcgggcataccccctccgcccccacttcccggagcgggcataccccctcctccccctcttcccggagcgggcatacctcctccaccccctctacccggagcgggcataccccctccgcccccacttcccggagcgggcataccccctccgcccccacttcccggagcgggcataccccctcctccccctcttcccggagcgggcatacctcctccaccccctctacccggagcgggcataccccctccgcccccacttcccggagcgggcatacccccacctccccctctacccggagcgggcataccccctccgccccctctacccggagtgggcatacctcctccgccccctctacccggagcgggcataccccctcctccccctctacccggagcgggcataccccctcctccccctcttcccggagcgggcatacctcctccaccccctctacccagagtgggcataccccctccgcccccacttcccggagcgggcatacccccacctccccctctacccggagcgggcataccccctccgccccctctacctggagtgggaatacctcctccgccccctctacctggagtgggaatacctcctccgccccctctacctggtgctgggattcccccacctcctcccttgccaggtatggggattccacctgctccagctcccccactccctccacctgggacaggaatcccaccgccccctctgcttcctgtatcaggccctccactcctcccacaagttgggagtagcactttaccaaccccacaggtgtgtggatttcttcctcctccattgccaagtggcttgtttggattagggatgaatcaggacaaagggagtaggaagcagcccatagagccttgtcgaccaatgaagcctctttactggaccaggattcaactacatagtaaaagagactccagtacttcacttatttgggaaaaaattgaagagccatccatagattgtcatgaatttgaggaattattttctaaaactgctgtaaaggagagaaagaaacctatctctgatactatctcaaagacgaaggctaaacaagttgtcaagttattaagcaacaaaagatcacaagcagttggaatactaatgtctagccttcatttagatatgaaagacatacaacatgctgttgtgaacttggataattctgtggttgacctggagacccttcaagctctctatgagaatagagcacagtcagacgaactcgaaaaaatagaaaagcatggccgatcttccaaagacaaggaaaatgccaagtctctggacaaacctgaacagttcctttatgaactgtcactaatccccaacttttcagagcgagtcttttgcatcctgttccagtccacattttcagaaagcatttgctcaattcgtcgcaaactggaattactacagaaattgtgtgagacattaaaaaatggcccaggggttatgcaggttctaggtttggttcttgcctttggcaactacatgaatggaggaaataagactcgaggacaggcagatggctttggattagacattcttccaaaactgaaagatgtcaagagcagtgacaatagcagaagccttttgtcatatattgtttcgtattatctccgaaattttgatgaggatgctggaaaagaacagtgcctctttccactgccagaaccccaggacctttttcaggcctcacagatgaagtttgaagattttcaaaaagatctcagaaaactgaagaaagacttgaaagcctgtgaagttgaagcagggaaagtataccaggtctcctcaaaagagcatatgcagcctttcaaggaaaacatggaacaatttattattcaagccaaaattgaccaagaggcagaggaaaattcactgacagagactcataaatgctttttggagaccacggcatatttcttcatgaaaccaaaacttggagagaaggaggtgtccccaaatgctttcttcagtatctggcatgaattcagctctgactttaaagacttctggaagaaagagaacaaacttcttctacaagagagagtaaaagaagccgaagaggtgtgtagacagaagaaaggaaaatcactttataaaataaaaccaagacatgactctggaattaaagcaaagataagcatgaaaacttgaacaatgaaaagcagaatgaaaatgagtcattgcaacgactttcacaaaattcagctgacctgagagtgggagggaaactaccgtcattctgctcatgtttcttcttgacctcttgcataatctttttgttttctagacagttcactaattgttgaattttactgtatattcatataaaaatgcaaacgtactagaccagtggagaatttgacaccttttctttttgtaaaagtttatggtattataccgatagaccaaaacagcatgtgtaagaggcagtatctgcactaattctcaacatgctaaacattaactacaattcactgttgtgagaatattcctcgtcacagcaaaaacactttcctttctactgacaaccagtcctccacatcacagcatttagacatatgggtaaaatgttatttctagtgaattgtttgtatcagtttcatgtctaagtataaattttctattttaaaatttaagaaccgtttataatcagtgctttcccaactcttgggttgctctccataactatgtatttgtgaaagaaaatggtcattttttttactgaagtcatataatgacttgggtcagctcgtaatgcattgtgatggttttgtatgagctgggtgtttttttccattacttttaatgatcttcgttgcaagttatagttgtggataaaggggagaatttattgctcttgcaaaccaattatggaaagcaacttaagaaaaccaatgttctaaatcataattgtttgtatttatgtaaagtatggtctcttactttttagtttgtagtttaagtgcaaagaaacagtagtggttttttttctattgttttgtagtcttcctgtccccttcagtccctccagtgtgtatattaccattctccaatgaaataatagggcatttaacaaagatcgctatgtgcaatactgtatttagtgtttctatttcaatttttctaggatgttaatttatatgaaaataaaatgaataataaaagaataaagatacttgcaaaaga

SEQ ID NO: 901 - DNA, 5219 bp, Homo sapiens
  source 1..5219: mol_type = genomic DNA
ctcgcgcggcttcccgcttccggctcccagctgctagctactgtggatctgggggggccggacggaggcatcggaggcggctgcgagagtggcagaggagctggcggagagcggcctgcgggcgatcgggccgagcctcgctcaaggagcacccccggggcaccctcctgtccgatggcagcccggccctgtccaggaatgtcggtatgacggtctctcagaaagggggtccccagccaacaccgagcccggctggccctgggacgcaactcggaccaatcacaggagagatggatgaagccgattctgcgtttttaaaatttaagcagacagctgatgactctctgtcccttacatctccaaacaccgagtccatttttgtagaagatccctacaccgcctcgctgaggagtgagattgagtcagacggccacgagtttgaagctgagtcctggagcctcgccgtggatgcagcctacgccaagaagcaaaagagggaggtggtgaaaagacaagatgtcctttatgagctgatgcagacagaggtgcaccacgtgcggacgctcaagatcatgctgaaggtgtactccagggccctgcaggaggagctgcagttcagcagcaaggccattggccgcctcttcccatgcgctgacgacctgctggagacgcacagccacttcctcgctcggctcaaggagcgccgccaggagtccctggaggagggcagtgaccggaattatgtcatccagaaaatcggcgacctcctggttcagcagttttcaggtgaaaatggggagagaatgaaagaaaagtacggtgtgttttgtagtggccacaatgaagctgttagtcattacaagttgctgcttcagcaaaacaagaaatttcaaaacttgatcaagaaaattggcaacttctccatcgtgcggcggcttggcgtgcaggagtgcattctcctggttacacaacgcataaccaaatacccagtgctggtggagcgcatcatccagaacacggaagctggcactgaggactatgaagacctgacccaggccttgaacctcatcaaagatatcatctcacaagtggacgccaaggtcagtgagtgtgagaagggccagcgcctcagggagatcgcagggaagatggacctgaagtcttccagcaaactcaagaacgggctcaccttccgcaaggaagacatgcttcagcggcagctccacctggagggcatgctatgctggaagaccacatcagggcgcttgaaagatatcctggctatcctgctgaccgacgtacttttgctgctacaagaaaaagatcagaaatacgtctttgcttctgtggactcaaagccacccgtcatctcgttacaaaagctcatcgtgagggaagtggccaacgaggagaaagcgatgtttctgatcagcgcctccttgcaagggccggagatgtatgaaatctacacgagctccaaagaggacaggaacgcctggatggcccacatccaaagggctgtggagagctgccctgacgaggaggaggggcccttcagcctgcccgaagaggaaaggaaggtggtcgaggcccgcgccacgagactccgggactttcaagagcggttgagcatgaaagaccagctgatcgcacagagcctcctagagaaacagcagatctacctggagatggccgagatgggcggcctcgaagacctgccccagccccgaggcctattccgtggaggggacccatccgagaccctgcagggggagctaattctcaagtcggccatgagcgagatcgagggcatccagagcctgatctgcaggcagctgggcagcgccaacggccaggcggaagacggaggcagctccacaggcccgcccaggagggctgagaccttcgcgggctacgactgcacaaacagccccaccaagaatggcagtttcaagaagaaagtcagcagcactgaccccaggccccgagactggcgaggccccccaaacagcccggacttgaagctcagtgacagtgacattcctgggagctctgaggaatcgccgcaggtggtggaggcgccaggcacggaatccgatccccgtctgcccaccgtcctggagtcggagcttgtccagcggatccagacactgtcccagctgctcctgaaccttcaggcggtaatcgcccaccaggacagctatgtggagacgcagcgggctgccatccaggagcgggagaagcagttccggctgcagtcgacgcgtgggaacctgctgctggagcaggagcggcaacgcaacttcgagaagcagcgggaggagcgcgcggccctggagaagctgcagagccagctgcggcacgagcagcagcgctgggagcgcgagcgccagtggcagcaccaggagctggagcgtgcgggcgcgcggctgcaggagcgcgagggcgaggcgcggcagctacgcgagcggctggagcaggagcgggccgagctggagcgccagcgccaggcctaccagcacgacctggagcggctgcgcgaggcccagcgtgccgtggagcgcgagcgggagcgcctggagctgctgcgccgcctcaagaagcagaacaccgcgccaggcgcgctgccgcccgacacactggccgaggcccagcccccaagccaccctcccagcttcaacggggaagggctggagggccctcgtgtgagcatgctgccatccggcgtggggccagagtacgcagagcgccccgaggtggctcgccgggacagcgcccccaccgagaaccggctggccaagagcgatgtgcccatccagctgctcagcgccaccaaccagttccagaggcaggcggccgtgcagcagcagatccccaccaagctggcggcctccaccaagggtggcaaggacaagggcggcaagagcaggggctctcagcgctgggagagctcagcgtccttcgacctgaagcagcagctgctgctcaacaagctcatggggaaagatgagagcacctcacggaaccgccgctcgctgagccctatcctgcccggcagacacagtcctgcgcccccaccagaccctggcttccccgccccgagcccaccgccagctgacagcccctccgagggcttctctctcaaggccgggggcacagccctcctgcccgggcccccagctccctcgccactgccggccacaccactcagcgccaaggaggacgccagcaaagaagacgtcatcttcttctaaaagggccgtgactcaaggaaagtttttaatggaaagttgagccagaactaaaccagggagctgtctgaaatcatagcaccccatccgggtggcggggagatcaactccgagctgtttttccgaggcagtgaggaacggtgccggctctgcacggagctgaggacaggacagaccttgctttgagaaggagctgccggccggggccacgctccacagccgccgcgcgacagtggagccaagggttagggcaccaggaggggccaggtggcgtcggcagcatctgtccccagaatcaggcagaatccacttcccaaacagagccccacgcaggttcaccatgaacctcagggtcagggaatgagccaggcacgggggcatgggcagagagggccacggggcagggcccactgagggaacatcagtggccctccagtcaggttctgtgggtttggaagcccatcgtgaaaggggctgacctttgcccctttttacttggcattggttttgaaaccagctgtttcccaaactctgcttcccaagggcaaccgttgctgttcacacgctcagcctgtctgggggagcgggcctctagcttcagccagggcgggtacacaccctgggcacagggtcctcagcccccgggaaatgagctcccagggctggcgtcccaccttccaggtgggggctggcacatcacagactgtcgagagcgccatgtcccagggcatgcagaggatgcacctagagacgttgcagcaagtggacaagtggccgctgtgcgggcccctcgcttgtagtgagctgttgcagcttacggtccgttccctggaggggtggaggaaggaggtgttgggcagcatcaaaggtgctgggacatcccagggtggtgagatccatccacgatccagctccggtggagaaagggcccatgtcaagccttgttctgcaccccaagcattggtggtaggactgggtcctggctgatcgtccttgttcccagtggggtacatgtgagcccctgccagggccaagtccttctcccgaacccagggtcctgggaactgcagatcccggggggattcagcccttctcccactgtgctggcagaggcactcctgtgacgctgaatacagtgaacagggacattcccgccactcggggacagatgggcacaagggaggggaaactccatcaggaagtgctcccctgggcagaggcgcccactgggtgctgtgggctcaggagggggcggggcaggagctggtgccaaccgggaaccagagccccacagccatacagcccattggtgacaaggtcctgagaacacagtggccaggtgtccccaggctcctggcccctccgacgacctcaactctgcccagcccggtccctggccatcagcgacgctgtccgccccccgtcagatcccatgtgtgccatgtttatcatcagtgttttgtatttttgtactgagtatcggagcactttacagaagctgactgtacattcctgttctgttgtgaagagaacattcccagaccctggcaccctcctgagccggcgtgtgccggtccagccctccgagatgccacaattccttggatgggggagaagttcaaggaatttctgctcggccacgcggtgggaaccccgcgtccccgccatgtggcagaggggtctcagtcgtgctaggcatcgggcggcagcgccgacagcccttccctcgccagtgcccctcggccactcctgggttggagcccgattttatttgtaaagttgacagtcgagcaaatgttcctattttcgtgggatctgcacacgtctttgtcagttgtggtcatgatcttagtcacctgctaattatttttacaatgattacaacatttcctcactgcgggatatttctgacccgctttagaacttaagacctgattctagcaataaacgtgtccgagatgagcggtg

SEQ ID NO: 902 - DNA, 3190 bp, Homo sapiens
  source 1..3190: mol_type = genomic DNA
agcgcttgtgacggtgtgaccagggaggggaagtgtaagtgtctggccgtccgtggtggcggggccagcaggctgtcccagccctcacccggagctcctcacccggcaccacatctgtgttttcccaggacccacgcagccacccagcctcagcactcatctgcgcagccatggaggccctgggacctgggggcgaccgcgcctccccggcctcgtccactagcagcctggacctgtggcatctgtccatgcgcgcggactcggcctacagctctttctccgcagcctccggcggccccgagccgcgcacgcagtcgccggggacagacctccttccttacctagactgggactacgtgcgtgtggtttggggcggcccgggccccgccccgcccgacgctgccctttgcacatccccgcggccccggcccgcggttgcagcccgcagtgggccgcagccaacagaggtcccggggaccccgggaccactgaacaggcaggccaccccgctgctgtacgcgctggcggccgaggcggaggccgcggcgcaggctgccgagccgcccagcccgccggcctcgagggccgcctaccgccagcggcttcagggcgcgcagcggcgagtgctccgggagacgtcgttccagcgcaaggagctccgcatgagcctgcccgcccgtctgcggcccactgtcccagcgcggcccccggcgactcacccgcgctccgcctcgctcagccacccgggcggggagggggagccggcgcgctcccgggctcccgcgccaggaactgccggccggggtcccctcgccaaccagcagcggaagtggtgcttctcagagccaggaaagctggatcgtgtgggtcggggcggtgggccggcgcgggaatgcctgggtgaggcctgctccagctctggcctccctgggcccgagcccttggagttccagcatccggcgctggctaagtttgaagatcacgaggtcggatggctgcccgagacgcaaccccaaggctccatgaacctggactccgggtccttgaagctcggtgatgccttcaggcccgccagtcggagtcggagcgcttcaggcgaagtcttgggttcctggggaggatcaggagggaccatacccattgtccaggctgttccccaaggagcagaaacccccagaccattgtttcagaccaaactttccaggttcttgcctcagaaagaggctgcggtgatgtatcctgcagagttaccccagagcagccctgctgacagtgaacagagggtctcagagacctgcattgtgcctgcctggctcccctcccttcctgatgaagtgttcctagaagaggccccactggtcagaatgagatcaccaccagacccccatgcctcccaggggcccccagccagtgtccatgcctctgaccagccgtatggaactggcttaggccaaagaactggccaggttacagtccccacagagtacccgctccatgagtgtccaggaactgcaggggcagatgactgctggcagggggtgaatggttctgtaggtatttccaggcccacaagccacacccccactgggactgcaaatgataacatcccaactattgaccccactggactgaccaccaatccccccacagctgcagagagtgacctcctcaaacctgtcccagctgatgccttgggactttcaggcaatgatactccaggtccctctcacaatactgccctagccaggggcactggccagcctggttccaggcccacatggcctagtcagtgcctcgaggagctggttcaggagctggccagattagatccctctctatgtgaccctcttgcttcccagcccagcccagagccacccctgggcctgctggatggactgattcctttagcagaggtccgggctgcaatgcggcctgcctgtggggaggctggagaggaggctgccagtacttttgagccagggtcctatcagttcagcttcacccagctcctgccggctcctcgggaggagacaaggcttgaaaaccctgccacccaccctgtgcttgaccagccatgtgggcaggggctccctgcaccaaacaacagcatccagggcaagaaagtggagctggccgcccgcctccaaaagatgcttcaggaccttcacacggagcaggagcggctgcagggggaggcacaagcgtgggccaggcgccaagcggctctggaggctgcagtgcgccaggcctgtgcccctcaggagctggagcggttcagccggttcatggccgacctagagcgcgtgcttggccttctgctgctgctgggcagtcgcctggcgcgcgtgcgccgcgccctggcccgggcggcctcagacagcgaccctgatgagcagcgactccggctcctgcagcggcaggaggaggacgccaaggagctgaaggagcacgtagcgcggcgcgagcgggccgtgcgggaggtgctggtgcgagcactaccggtggaggagctgcgcgtctattgcgccctgctggcgggcaaggccgccgtcctggcccagcagcgcaacctggacgagcgcatccgcctccttcaggaccaactggacgccatcagggacgaccttggccatcatgccccgtctcccagcccggcgcggcccccagggacctgtcctccagttcagccgcccttccctcttctccttacatagttataggtggagagggtggggtgcaccgcccctatctctcacccacgtaagtggggtgatgctgatttagtctctgcttttcccttgagggattggggaggacccagtccaggcctttctaagatactcctccagccgggcgcggtggctcacgcctgtaatcccagcactttgggaggccgaggcgggcggatcacaaggtcaggagatcgagaccatcctggctaacacggtgaaaccccgtctctactaaaaatataaaaaattagccgggcgtggtggcgggtgcctgtattgccagctactcggaaggctgaggcaggagaatggcgtgaacctgggaggtggagcttgcagtgagcggacatcgcgccactgcactccagcctgggcgacagagcaagactccgtctcaaaaaaaaaaaaaaaaaaaaaaaaaaaaaagatacttctccaaagtgttctcatgtggcctc

SEQ ID NO: 903 - DNA, 3018 bp, Homo sapiens
  source 1..3018: mol_type = genomic DNA
ggactgtgggagcggcttccttggattccgcgcttggcaacggctcggcgtcgcgctttggccaaccgctgcgtcgtccctgggcccgaataactgtcgcccgcttccctcagcgtgaggtgaagcacttcaaattgcctgatgaaagttgaatcaggaatgaagataaaagtacacaacaatgcagaaagcggtacttagcctcacaaagatggaaacattccaaaaacgtgaaaaactgcagtaggcttcttggaagtagaccaagggtgtccaatctttggcttccctgggccacatcggaagaagaattgtcttgggccacacatgaaattcacaaacactaaggtacaaatgatgcaaaatgtgcacctggctccagagacagatgaagatgatctttattccggctataatgactacaatccaatctatgatatcgaggaattggagaatgatgcagcttttcagcaagctgtgaggactagtcatggcagaagacctccaataactgctaaaatatcaagcacggcagttactagacctatagctactggatatgggtccaagacatctctggcatcatcaataggaagaccaatgacaggggctattcaggatggagttactagacccatgacagcagtgagagcagctggttttaccaaagcagctttgagaggctctgcatttgacccccttagtcagtcaaggggccctgcttcccctttggaagccaagaaaaaagatagcccagaggaaaaaataaagcaattagagaaggaagtaaatgagttggtagaagaaagctgtattgccaatagttgtggagacttaaaattggccttagaaaaggcaaaagatgcaggaagaaaagagagagtcctggtgagacagcgagaacaagttacaactccagaaaatatcaatttggatttaacttactcagttcttttcaatttggccagtcagtattcagttaatgaaatgtatgccgaagcacttaacacttatcaagttatagtcaaaaataagatgtttagcaatgcaggaatattgaaaatgaatatgggaaatatctatttaaagcaaagaaattattccaaagccattaaattctaccgaatggcattagaccaagttccaagtgtcaataagcaaatgaggattaaaataatgcagaatattggagttacatttattcaggctggtcagtattcagatgctattaattcatatgagcacataatgagcatggcaccaaatctgaaggcaggctacaacctaactatctgttattttgctattggagaccgagaaaaaatgaagaaggcattccaaaaattgattactgttccattagaaattgatgaagataaatatatttcaccaagtgatgatcctcatactaacttagtaactgaagctataaaaaatgatcacctcaggcaaatggaacgtgaaaggaaagccatggcagaaaaatatattatgacatctgcaaaactcattgctcctgtaattgaaacatcttttgctgcaggttatgattggtgcgtggaagtggtgaaagcttctcaatatgtagagctagccaatgatctggaaataaacaaagcagttacatacttgagacaaaaagactataaccaagctgtagagatcttaaaagtgttggaaaaaaaggacagtagagtgaaaagtgcagctgcaaccaatctctcagccctgtattatatgggaaaggattttgcacaagccagcagctatgcagatatagctgtgaactctgatagatataatccagcagctcttactaataaagggaatacagtttttgcaaatggtgattatgagaaggccgctgaattctataaagaggctctaagaaatgattcttcttgtactgaagcactttataatattggccttacctatgagaaactaaatcggctagatgaggctttggactgtttcctgaaacttcacgcaatcctacgaaacagtgccgaagttctttaccagatagcaaatatatatgaattaatggaaaatcccagtcaagctattgaatggctaatgcaggtggtcagtgttattccaaccgatcctcaagttttatctaagctaggagaattatatgatcgtgaaggagataaatctcaagcatttcaatattactatgagtcatataggtattttccttgtaatattgaagtcattgagtggcttggagcctattacattgacacccaattttgggaaaaagctattcagtactttgaaagagcttctcttatacagcctacacaagtgaaatggcagctgatggtagctagttgtttcagaagaagtggtaactaccaaaaagcattagatacttacaaagatactcacagaaaatttccagaaaatgtcgaatgtctgcgtttcttagttcgtctctgcacagatcttggattaaaagatgctcaagaatatgccagaaaactgaagaggttggaaaaaatgaaagaaataagggaacagcgcataaagtcaggcagagatggcagtgggggctcccgtggcaaaagagaaggaagtgctagcggtgatagtggccagaactatagtgccagtagtaaaggtgaacgactaagtgccagactcagagctttacctgggacaaatgaaccttatgaaagtagcagtaacaaagaaatagatgcctcctatgtggacccacttggccctcaaatagaacgaccaaaaactgcagccaagaaaaggatcgatgaggatgattttgctgatgaagaattaggagatgatttgcttccagaataatattcactttaatatttattaaaggaaagaaattgccttatgagatcatcctcatgttaaaccttggattaaatatctaacctgtaattattttttttcactgtcaaaacttaagtaagtgtattctattctgtatgtatgcatttaagttgtttttttcttttaaggaataaaaacaggtaaaactaa

SEQ ID NO: 904 - DNA, 2207 bp, Homo sapiens
  source 1..2207: mol_type = genomic DNA
ccgcgccggaggacgagcctcggtcatcgcgctgccctcccaggttcaacaggctacccatgtgcccgctccagtaagcgtgcaaccagcccggtcagtcccagggactttaccggctaggagacaccttgaacgtccccagcgcgactcccacaaactgccttgactctttaacgcttcctcgctggcgcccattgggccaggcgtttacgtcatcgctgcgcgccgggcggcggcgacttcccgctccttgactctgacgtcagagcggcgccggcctcggcggctgaggaaagcaggaggaggtggcggcggcgggaagatgctgctctttggcgtaaattgcaatcgattagggatcgtttctcagaatcaagttagaagtgagagttcagataagtgaggccgccattgctgctttgaacacctcagaaggggagaatggatttatcaggagtgaaaaagaagagcttgctaggagtcaaagaaaataataaaaagtccagcactagggctccttcacctaccaaacgcaaagaccgctcagatgagaagtccaaggatcgctcaaaagataaaggggccaccaaggagtcgagtgagaaggatcgcggccgggacaaaacccgaaagaggcgcagcgcttccagtggtagcagcagtaccaggtctcggtccagctcgacttccagctcaggctccagcaccagcactggctcaagcagtggctccagctcttcctcagcatccagccgctcaggaagctccagcacctcccgcagctccagctctagcagctcttctggctctccaagtccttctcggcgcagacacgacaacaggaggcgctcccgctccaaatccaaaccacctaaaagagatgaaaaggagaggaaaaggcggagcccatctcctaagcccaccaaagtgcacattgggagactcacccggaatgtgacaaaggatcacatcatggagatattttccacctatgggaaaattaaaatgattgacatgcccgtggaaaggatgcatccccatctgtccaaaggctatgcgtacgtagagtttgagaatccagatgaagccgagaaggcgctgaagcacatggatggaggacaaattgatggccaggagatcactgccaccgccgtgctggccccctggcctaggccaccccccaggagattcagccctcccaggagaatgttgccaccaccgcctatgtggcgcaggtctcccccacggatgaggagaaggtcccgctccccgaggcgcaggtcccccgtgcgccggagatcacggtccccgggccgccgccgccacaggagccgctccagctccaactcctcccgataaacaggccactgaagctctcgcccctgtaacttataccccacccagctcagttttgtcacttttctagccaaaggaagaccagtaggaaagcaaacccttgactctggcaggatttgcaggcagcaggcagcacccctctgccagccgggccccggctgcagaagtgctgttggtttggatgctgtgtgcctgtcaagattccctccggttttctggctagaaagctcatccgtttccggtttctaagagtcagttcagtggcagagccaccagggaaaagtgaggctcttgggggtggtttgaccctgcttacctgggagcacacttttcccttccccgatgacctgggatggtggccaggccgtgcccttgctgttgctgggcagtgtccttttggaaagggagctgccccaggctttagtgcagctgccaaccctgttaggcctggcctctcgaggcctcttctgacctcaagggtcacaccccctcaaagatcctctcacccatggtagttgctgctcgtggttctgtctgtccgtgcaccgatgcacacaccgcaccccaccactgtactctgaaattggcgagtgagtggagagccagctctgcggagtcatcacgcagccatggttgtgcctgccgttcatggtggtctttcaggttatcttggcaacatgtacattgcttttattttttttcttttttgctttcattgtacagtcagtactataaaatttctcttttgagttttatacctttgtagcattttagatgacattgtgtttgtactttgttgtgtagagtggaagaattgtgttgaataaacccaagatcggaatgcaaatcta

SEQ ID NO: 905 - DNA, 2818 bp, Homo sapiens
  source 1..2818: mol_type = genomic DNA
ggtgcgcggagggcgcgtctctgacggaagccggggcggacggtcggagtccggaagaaaaacagtccgcgacagctaggcgcgtgagaccggccgcccgcagggctgctctggccgggacccgctggccgggagacgcgaacctgccggaccaccgcgcggggacgacggcggccatgagctcgcggaagctgagcgggccgaaaggcaggaggctcagcatacatcaggaggtctgcctgatcccatggtgaaccccgggaatccgaaatcagattgagataagatcctttagggaagtgacttagcctggtctcttgcctgctctttcacggggaacaacgctaatcgcccacttagtctaagtcacgatgcttggatttgctgctaatcgtcggatttgagagtgggaacaagaaatccggacttttgctctccatcctcttagacatacacgtcgtgacttggaacgtggcttcggcagcgccccctctagatctcagtgacctgcttcagctgaacaaccggaacctcaatcttgacatatatgttattggtttgcaggaattgaactctgggatcataagcctcctttccgatgctgcctttaatgactcgtggagcagtttcctcatggatgtgctttcccctctgagcttcatcaaggtctcccatgtccgtatgcaggggatcctcttactggtctttgccaagtatcagcatttgccctatatccagattctgtctactaaatccacccccactggcctgtttgggtactgggggaacaaaggtggagtcaacatctgcctgaagctttatggctactatgtcagcatcatcaactgccacctgcctccccacatttccaacaattaccagcggctggagcactttgaccggatcctggagatgcagaattgtgaggggcgagacatcccaaacatcctggaccacgacctcattatctggtttggagacatgaactttcggatcgaggactttgggttgcactttgttcgggaatccattaaaaatcggtgctacggtggcctgtgggagaaggaccagctcagcattgccaagaaacatgacccgctgctccgggagttccaggagggccgcctactcttcccgcccacctacaagtttgataggaactccaacgactatgacaccagtgagaaaaaacgcaagcctgcatggaccgatcgcatcctgtggaggctgaagcggcagccctgtgctggccccgacactcccataccgccggcgtcacacttctccttgtctctgaggggctacagcagccacatgacgtacggcatcagcgaccacaagcctgtctccggcacgttcgacttggagctgaagccattggtgtctgctccgctgatcgtcctgatgcccgaggacctgtggaccgtggaaaatgacatgatggtcagctactcttcaacctcggacttccccagcagcccgtgggactggattggactgtacaaggtggggctgcgggacgttaatgactacgtgtcctatgcctgggtcggggacagcaaggtctcctgcagcgacaacctgaaccaggtttacatcgacatcagcaatatccctaccactgaagatgagtttctcctctgttactacagcaacagtctgcgttctgtggtggggataagcagacccttccagatcccgcctggctccttgagggaggacccactgggtgaagcacagccacagatctgagccaggatgggagtgaatcccaggcggaggccagagctggcagccagctctgcctttccactgccgggagtgctgggggcccagcctggccccctgaagagacagccaagtgtcgtccacatactcctcccagagtgagctctaaccaggctcatttgctctctccactactcatctctggaattagccgcttaaatacaggtttttgttgctgagatgtgagtgaaaccagctagtgtgtcaacagtgaagacctggggacagttctgcgtctcatttctggattcctaccccctcttctagtcttgcccaagtagtcctgccaggcacatgccccatttggcacaggcctgcattcttgtcgtgccgtcctgggcctcaggctgtctgggaggggagatgctcacatttgtacaggctacatagactggtgcaagcagtgctggattccaggagtcttggcatctcatagcttgtccccgtgaggagtgagcagagggtctgggatttctgctttcagcaaaagcagtctgactcagtgggcagaatggaggggcccctctagccaggctcttacgccatggttatgagcaggttgatgagggtccttcggccagcacaaccttcctccctactcacggcatggagtctgactgcatggaagttccagatcctgacagagagaactgggaaggatccaggttcgcttccgttggtagcttgagtcccatgcctccaccctgccatctgaggaaggggtgacaagtggtcaaggagctgtggccacagacttttccagggtggtccttggcaggtgaggtgcgtctgtgccacccttgtcaggagccattgacgacgggccccccctggaccccccgggacctcagagtgggggcaggcagaagggagaaccagctcaagacattttggaggatctggccctggggttcttcagagaacaccctctaggggctttggggacatggcctgtccccacatccagcacttgcctccgccatggtcactcggcagcccttttcccaggagaagacacctctgggagcct

SEQ ID NO: 906 - DNA, 2389 bp, Homo sapiens
  source 1..2389: mol_type = genomic DNA
cacaagctctagagggcttccgggaggaggcttagggagctgggaatccgggagcagatggtgggttcctaccgtcgagggtgggagagagggatctgaggccaagtttgaggtaaggactgtggagctccatcagatccccatccccacctcccctcatctgcgcaatcctgcgagaagccttagacaggttctggctcagagaaccggagagaggcacaacgcctggcccccaggacttggccacagcgtccctgaccttgtctgctccatgacctctcactgaggcccattaacccctcagttccctgatgaggcttgatttagcatccttgatgtcagctcctaagagtctgggaagtgcatttaagtcctggaggttggacaaggccccctccccacagcacacctttccatccacttctatcccaggcatggcttttgctctcctggcctccgtgcccccggtgtttggactctacacttctttcttccccgtcctcatctacagcttgctaggtactgggagacacctgtccacaggaactttcgccatactcagcctcatgacaggctcggccgtcgagcggctggtgccggaacccctcgtggggaatctgagcggaatcgagaaggagcagctggacgctcaacgggttggggtagccgcggccgtggccttcgggagcggggcgttgatgctggggatgttcgtgctgcagctcggcgtcttgtccacctttttgtccgagcctgtggtcaaggcgctgaccagcggggccgcgctgcacgtgctcttgtcccagctgccgagcctcttggggttgtccctcccgcgccagatcggctgcttctctctcttcaagacgctggcctccttgctgactgcgctgcctcggagcagtccggccgaactgaccatctccgcgctcagcctggcgctgctcgtgccggtcaaggaattgaacgtgagattccgagaccggctacccacgccgatcccgggggaagtcgtcttggtgcttctggcctccgtgctctgcttcacctcttctgtggacacaagataccaagtccagatagtggggctgttgcctggaggatttccccaacccctcctccccaacctggctgagctgcccaggattctggctgactcgctgcccattgcactggttagttttgcggtgtctgcctccctggcctccatccatgcagacaagtatagctacactattgactccaaccaggagttcctggcacatggtgcctccaacctcatctcctccctcttctcttgctttcccaactcggctacgctggccaccaccaatctactggtggatgctggtgggaaaacacagctggcaggcctcttctcctgcacagtggtcctgtcggtgctgctgtggctggggcccttcttttactatctgcccaaggctgtcctggcttgcatcaacatctccagcatgcgccaggtgttctgccagatgcaggaacttccacaactatggcacatcagccgagtggactttctcctccaggtcccggggctctgcatcctgagctatccaacaccactgtactttgggacccgtgggcagtttcgctgcaacctggagtggcacctggggctcggagaaggagaaaaggagacttcaaagccagatggcccaatggttgcagttgctgagcctgtcagggtggtggtcctagacttcagtggtgtcacctttgcagatgctgctggggccagagaagtggtgcaggtgagggagaggctggccagccgatgtcgagatgctaggatccgcctcctcctggctcagtgtaatgccttggtgcaggggacactgacccgggtaggactcctggacagggtgactccagatcagctgtttgtgagtgtgcaggatgcagctgcttatgccctggggagcctgttaaggggcagtagcaccaggagcgggagccaggaggcactgggctgcggcaagtgaggcaggggtaagtggctggagacccagggagaggggtttgggaaagggtctgaggaagatcaagaagaaaagggtggggacggaatgaatagtagattgaagaccaaatcagggagcccgggctgagctatgggtgaggaactgaagaactcagatccctaagtaggtggggtacccctgagaggactgccacatttcattaaggaagaggggtgcctaatctattcctgacatgtctcctctcttctccaggagctcactgacccaaagatttgcaccgtgtgggtctgacctcatcatgtggagtgcagagggccctgatgacatgtgtgtgatgaggaccatgacccttgaacccccttacctaacgtaactaataaaatgaa

SEQ ID NO: 907 - DNA, 4392 bp, Homo sapiens
  source 1..4392: mol_type = genomic DNA
cctcggcctccgtaacccccgcctagccgggccatggcggaacgcggaggggcgggcggtggtcccggaggcgccgggggcggcagcggccagcggggatccggggtcgcccagtcccctcagcagccgccgccgcagcagcagcagcagcagccgccgcagcagccgacgccccccaagctggcccaggccacctcgtcgtcctcgtccacctcggcggcggctgcctcctcctcgtcctcgtctacctccacctccatggccgtggcggtggcctcgggctccgcgcctcccggtggcccggggccaggccgcacccccgccccggtgcagatgaacctgtacgccacctgggaggtggaccggagctcgtccagctgcgtgcctaggctattcagcttgaccctgaagaaactcgtcatgctaaaagaaatggacaaagatcttaactcagtggtcatcgctgtgaagctgcagggttcaaaaagaattcttcgctccaacgagatcgtccttccagctagtggactggtggaaacagagctccaattaaccttctcccttcagtaccctcatttccttaagcgagatgccaacaagctgcagatcatgctgcaaaggagaaaacgttacaagaatcggaccatcttgggctataagaccttggccgtgggactcatcaacatggcagaggtgatgcagcatcctaatgaaggcgcactggtgcttggcctacacagcaacgtgaaggatgtctctgtgcctgtggcagaaataaagatctactccctgtccagccaacccattgaccatgaaggaatcaaatccaagctttctgatcgttctcctgatattgacaattattctgaggaagaggaagagagtttctcatcagaacaggaaggcagtgatgatccattgcatgggcaggacttgttctacgaagacgaagatctccggaaagtgaagaagacccggaggaaactaacctcaacctctgccatcacaaggcaacctaacatcaaacagaagtttgtggccctcctgaagcggtttaaagtttcagatgaggtgggctttgggctggagcatgtgtcccgcgagcagatccgggaagtggaagaggacttggatgaattgtatgacagtctggagatgtacaaccccagcgacagtggccctgagatggaggagacagaaagcatcctcagcacgccaaagcccaagctcaagcctttctttgaggggatgtcgcagtccagctcccagacggagattggcagcctcaacagcaaaggcagcctcggaaaagacaccaccagccctatggaattggctgctctagaaaaaattaaatctacttggattaaaaaccaagatgacagcttgactgaaacagacactctggaaatcactgaccaggacatgtttggagatgccagcacgagtctggttgtgccggagaaagtcaaaactcccatgaagtccagtaaaacggatctccagggctctgcctcccccagcaaagtggagggggtgcacacaccccggcagaagaggagcacgcccctgaaggagcggcagctctccaagcccctaagtgagaggaccaacagttccgacagcgagcgctccccagatctgggccacagcacgcagattccaagaaaggtggtgtatgaccagctcaatcagatcctggtgtcagatgcagccctcccagaaaatgtcattctggtgaacaccactgactggcagggccagtatgtggctgagctgctccaggaccagcggaagcctgtggtgtgcacctgctccaccgtggaggtccaggccgtgctgtccgccctgctcacccggatccagcgctactgcaactgcaactcttccatgccgaggccagtgaaggtggctgctgtgggaggccagagctacctgagctccatcctcaggttctttgtcaagtccctggccaacaagacctccgactggcttggctacatgcgcttcctcatcatccccctcggttctcaccctgtggccaaatacttggggtcagtcgacagtaaatacagtagttccttcctggattctggttggagagatctgttcagtcgctcggagccaccagtgtcagagcaactggacgtggcagggcgggtgatgcagtacgtcaacggggcagccacgacacaccagcttcccgtggccgaagccatgctgacttgccggcataagttccctgatgaagactcctatcagaagtttattcccttcattggcgtggtgaaggtgggtctggttgaagactctccctccacagcaggcgatggggacgattctcctgtggtcagccttactgtgccctccacatcaccaccctccagctcgggcctgagccgagacgccacggccacccctccctcctccccatctatgagcagcgccctggccatcgtggggagccctaatagcccatatggggacgtgattggcctccaggtggactactggctgggccaccccggggagcggaggagggaaggcgacaagagggacgccagctcgaagaacaccctcaagagtgtcttccgctcagtgcaggtgtcccgcctgccccatagtggggaggcccagctttctggcaccatggccatgactgtggtcaccaaagaaaagaacaagaaagttcccaccatcttcctgagcaagaaaccccgagaaaaggaggtggattctaagagccaggtcattgaaggcatcagccgcctcatctgctcagccaagcagcagcagactatgctgagagtgtccatcgatggggtcgagtggagtgacatcaagttcttccagctggcagcccagtggcccacccatgtcaagcactttccagtgggactcttcagtggcagcaaggccacctgaggccctgtctcccagccactttccctcctggcactgccaccagcctcaccgcctgcgggcagggggaggccagcaggcccgggcccagcaccccttccctggcaccagggtctgcctctcactcgcccaggtcccgaaggacactgccacagggacgccttccctcccctcccctccagcccacccctgcacagcccctcctccttcccgcttttccccttctccctcctgctccaggcccaaggcgtgttggttttgccttctggtgcccatagtcccctggactgagtcccccaggccttccttcacccgacttccaaactcttccttgtggtatcagtttccttctcggaaatgagaaagctggaatcctggtccccagcaggagagcctagtcctcccccagcccctccagccaccagggtgtcctctaggatgcagctgccagatccactcactctgctgcctccagcaggacccaaggccactttcaactcttatggggttctccacctgccccagagcttctcaagggagggtaagggggcaccctgagcccacaggacccctacttcacagctcacaggggcaggaggcagctcccctgcctccaggaccctgttgctatggtgacacagcgtttctaggacagaggggcctcccagtctccccccaccacccgtgcacgacttcctcaccacccccaggttccctgcagatgtcgtgtgtgtcctgagtgtttctttggttctttgcacgccaagtctcttggttgtaccatgtgacacaccctgtgcactggtcgctgtcttcgtggcttccacccttgttaatgatgctcctgcctctgcctcccagcccctcacccagcacagctctgcctggacttggagagatgggaggcagacccccaccaccatacatgctgtctgtggcccctcagacattctgtttcatctcccattcatctccctcctcccaccgtgtcagtttttctgcctttccctgctctgttcttccccctccttaggccccagcctgggcccagacccatcctcccagccaggtttccctccagcaggctccttccctccctgtcacctccctctcaccaacccggggtctgagcccctcattcctgaccgtccgtgttctcaggagtggttgaggacacagggccccagcccagccctctgcaccccccagcccggccatctgcgccccacagcccctttggagcttttctcttgtcctctcactccttcccagaagtttttgcacagaacttcattttgaaagtgtttttctcattctccatacctcccccaagctctcctccagcccttcccagggctcagccctgctgtcctgagcgtctcctgggccagagagaggagatgggggtgggagggactgagttgatgttgggtttttcattcaataaattggtgatttcttaccgactgc

SEQ ID NO: 908 - DNA, 1601 bp, Homo sapiens
  source 1..1601: mol_type = genomic DNA
aacggctagagacgcccagtgagttagcatggagggcagtgggaccggaaaaagacgtggaaaagctgcgaaaacgagccttcgaatcatggacgcgcgggcccagctcctcctccgagttcctcatccggggccgtcactcacatccggggccctcactcacatccgggaccctcatccggggctctcacccacatccgggaccctcatgcctgggcggaggagggggggccctcattcgggaccctgcactccgtcgccggaagtgccaccgagaagcgccggcctcggggctgtctacagcggcccgggagaggctgtggtggccccgagcgcgagtgtgtaggtgacaggacagcggccaggcccgcccctcccctcgtgatggtcattgtcctccagagcagtgatggaggaaataccagcccaggaagcagcagggtcaccaagggtccagtttcagtctttggagacccagtctgagtgtctgtccccagagcctcagtttgtgcaggacaccgacatggaacagggactcactggggctccacctgttcctcaggtgcctgctcttccccgtgagggaagcccaggagaccaggcagctgcgctcttgacagccaggtaccaggagtttgtgacattcgaggatgtggctgtgcaccttactcgagaggaatggggatacctggaccctgttcagagggacctctacagagaagtgatgttagagaattatgggaacgtggtctcactgggcatacttctccgccttcccaccacccggattcatagtgtgaattcctgcccggccctgagtcatacccaggcaagtgctttctctggagaaacacttgccgtccttacagcaggaatctccaagagatggcccaagtatcggcttcccatcgatattgctcgtccctgctcggaaactccttttccacgattgtgagatattaaaattgactgatggaatagaagctccccaggatgccaccactgtgtaaaatcgcagctcctcaaattacctctgtttaatttcaaatgttagggtccaaggaagccctctgttgcaaccagatatgttttgaacccagttcattcagaaaccatggttggtggtcatcatctacttgtattgtgaaaaaccagaaattccaaattcagctcttcagttatggtcttttcatattattttagaatgtgaaacttatgctgtgtgcccctccttttatgtggcgaacacaacctgccccgtatggtgcctaactctcctgtgaaccctgggcttccctcatgtttaacattctggtttcctccttccttgaagtccctgtggccctcttcaaggtcctaccttcctaccctttattctttgtggttctgtacagattgatgcaattatattgcctttcctgattaagtgttccttactctgtccttgatggaggggagaagggagggcaaagaagttaaatttatttcagggcatcaaattgaatatctacttaataactttgtaaactgtaaagtgacatacatataattgtaaagtactgttaattttatctaataattacagagtttccaacagttaa

SEQ ID NO: 909 - DNA, 2740 bp, Homo sapiens
  source 1..2740: mol_type = genomic DNA
gctgttcgcgctcatccccctcccccggccctgggtgtccccgtgacgaggcagcgcggagccgccgcgggccgggcccatcccgccgcagcggcccggggccgagcaggggctaggcggggagggagcggcgcccagcggggcccggagcgtggccagaatggtgctggaaggaaaccctgaagtggggtccccccgaacctcagacctccagcaccgggggaacaagggctcttgcgttctctcctctcccggtgaagatgcgcagccaggcgaggagcccatcaagtatggtgaactcatcgtcctgggatgctgtgaggaaggaggtgaggaaaccgaggctcagagaggggaagtgactggcccaagggcacacagctgctacaatggttgtctggcaagtggggacaagggccgccggcgaagccgcctggcactgagccgccggtcgcacgccaacggggtgaagccagacgtcatgcaccacatctccacgccgctcgtctccaaggcactgagtaaccgtggtcagcacagcatctcgtatacactgtcccggagccactcggtcatagtggagtatacacatgatagcgacacagacatgttccagattggccgctccacagagaacatgattgacttcgtggtaacagacacgtcccctggaggaggggctgccgagggcccttctgcccagagcaccatctcccgctatgcctgccgcatcctctgtgaccgccggccaccctatactgcccgcatctatgccgctggcttcgatgcctctagcaacatcttccttggagagcgagcggccaaatggcggaccccagatggcctgatggatggactgaccaccaatggagtcctggtgatgcacccggcaggcggcttctccgaggactcagccccgggtgtctggcgggagatctcggtctgtgggaatgtgtacacattgcgggacagccgctcagcccagcagcggggcaagctggtggaaaacgagtccaacgtgctgcaggacggctctctcatcgacctgtgtggggccacactgctgtggcgcacaccggcggggctgctgcgggctcccacactgaagcaactggaggcccagcggcaggaggcaaatgcagcgcggccccagtgccccgtgggcctcagcactctggccttccccagcccagcccgtggccgcacagcgcccgacaaacagcagccctgggtctacgtccgctgcgggcacgtccatggctaccacggctggggctgccggcgggagcggggcccccaggagcgcgaatgtcctctctgccgccttgtggggccttatgtgcctctatggcttggccaggaggccggcctctgcctggaccctgggccgcctagccatgcctttgcaccttgcggccacgtctgctctgagaagactgcccgctactgggcccagacaccactgccccacggcacccatgctttccatgccgcctgccccttttgcggggcctggcttaccggcgagcatggctgcgtccgcctcattttccagggcccgctggattaggctccctggggccccctgctgctgtgcccacctgcccacccaggtccccacctcctgcagcccagagggagctctgcatgtgggacactccctgctggcacagccacaccagatggacatgttggatgggctgtgcccttccccccaactgtggccccccaaggaggtccccaagatctccaccccagtcatgctgatggggccttcagcaccagctctgtcctgggtcgatggaggaaagcccagccccatggccttgcccttcctggggcatcccacatcgtgccgccgacactgtgtgcccctgggggagtgaaggggccaggggcctttgacccccagcttaggctggctatgccctgagcctgccaacccagtttcagacactcatccttcatccttcctgctgccgccctgggttcctctataaacctcgctgctcagctgcccccacaagtcccacatgccccgcatgcgtgcaatgcctccagcccccaagtgagtggtgggtgggtggcaggctgggcctagcacttgctgatagccactatgggctcgactctgtgctaagtggtatctggggacacagaggcaatcagacctggttccccccctggtggagttcacagtctagtggaggacagactgttaacaaatggcaacacggcttcatgcgtgccaggatcagagtacaaatcaggctgtggcaggcctcactggtaatggaaaagtgagggaggcttcacggaggaggtgtcataggagctcagcctcaacggctgctcggaaccctccgagtccacaagatgggaagcaagtccacaagatgggaagcgtgctctatacagaagggagggcctgtgcacaggctcaggtgtcagtaagccagaaatccagggacagagtcaggatggctggagcatggactgcggggggaacagagaagggggtggagcaaaaggttgggaccatgtgaccagggaagatgctggatggaggattctgaacctcatttgtggacggtcaggagtcaacaaagggaggagagaggactcactggtcaagagtgtcggctgtgacacaagggccatcatccctgaatgcccaccatgtgccccgcactgtgctgatgatgataataataactacgtccattgagcactctccaga

SEQ ID NO: 910 - DNA, 7919 bp, Homo sapiens
  source 1..7919: mol_type = genomic DNA
ccagctcgcgctgcccgggcgggcgccggccgctggcgccgctactgctgccgcccccggggcgcgagtccgccgcccgccgcccgggcacccggcgaggggcgggggcagctccgaaccggccccagatccttcccgcttccgcctcacgcttcccggaaagcttgtccctctccgccgagctgctccgggagccccgccgcgccgagggtatctcccagagccccagctggtgtggccaggccccaggagtaggatggggctccccctacgagggccggtggcagccagaactgatacagcccccctggtctggggccaggacgccagctgaggagggcaggagtgtctggagctatggctggtgcctcggtgaaagtggcagtgagggttcggccctttaacgcccgtgagaccagccaggatgccaagtgtgtggtcagcatgcagggcaacaccacctccatcatcaatcctaaacagagcaaggatgcccccaaaagcttcacctttgactactcctactggtcacacacttcgacggaggacccccagtttgcatctcagcagcaagtgtatcgggacattggagaagagatgctgctccacgcctttgaaggctacaacgtgtgcatctttgcctatgggcagaccggggctgggaaatcctataccatgatggggcgacaggagccagggcagcagggcatcgtgccccagctctgtgaggacctcttctctcgcgttagtgagaaccagagtgctcagctatcctactctgtggaggtgagctatatggagatctactgtgagcgggtacgagacctcttgaaccccaagagtcggggttctctgcgggtccgggagcaccccatcctgggcccgtacgtgcaggacctgtccaaattggctgtgacctcctacgcagacattgctgacctcatggactgtggaaataaagcacggactgtggctgccaccaacatgaatgagaccagcagccgttcccatgccgtctttaccatcgtcttcacacagcgctgccatgaccagctcacggggctggactcggagaaggtcagtaagatcagtttggtggaccttgctgggagtgagcgagccgactcctcaggggcccggggcatgcgcctgaaggaaggagccaacatcaataagtccctgactacactagggaaagtgatctcggcccttgcagatatgcaatcaaagaagcgaaagtcggattttatcccctacagggactctgtgctcacctggctgctcaaggaaaatttgggggggaactcacgcacagccatgattgcagccctgagccctgctgacatcaattacgaggagactctcagcaccctcaggtatgctgaccgcaccaagcaaatccgctgcaatgccatcatcaacgaggaccctaatgcccggctgattagagagctgcaggaggaagtagcccggctgcgggaactgctgatggctcagggactgtcagcctctgctctggaaggcctgaagacggaagaagggagtgtcagaggcgccctgccagctgtgtcatctcccccagctccagtttcaccctcatcacccaccacacataatggggagctggagccgtcattctcccccaacacggagtcccagattgggcctgaggaagccatggagaggctgcaggagacagagaagattatagctgagctgaacgagacatgggaggagaagctacgcaagacagaagccctgaggatggagagagaagcattgctggctgagatgggggtggccgtccgggaggatgggggaactgtgggcgtcttctctccaaagaagactccccacctggtgaacctgaacgaagaccctctgatgtctgagtgtctgctctaccacatcaaagatggcgtcaccagggtcggccaagtagatatggacatcaagctgaccggacagttcattcgggagcaacactgtctgttccggagcatcccccagccagatggagaagtggtggtcactctggagccttgtgaaggagctgagacatatgtgaatgggaagcttgtgacggagccgctggtgctgaagtcagggaataggattgtgatgggcaagaaccacgttttccgcttcaaccacccggagcaggcaaggctggaacgggaacgaggggtccccccacccccaggaccgccctctgagccagtcgactggaactttgcccagaaggaactgctggagcagcaaggcatcgacataaagctggaaatggagaagaggctgcaggatctggagaatcagtaccggaaagaaaaggaagaagccgatcttctgctggagcagcagcgactgtatgcagactcggacagcggggatgactctgacaagcgctcttgtgaagagagctggaggctcatctcctccttgcgggagcagctgccgcccaccacggtccagaccattgtcaaacgctgtggtctgcccagcagtggcaagcgcagggcccctcgcagggtttatcagatcccccagcgacgcaggctgcagggcaaagacccccgctgggccaccatggctgacctgaagatgcaggcggtgaaggagatctgctacgaggtggccctggctgacttccgccacgggcgggctgagattgaggccctggccgccctcaagatgcgggagctgtgtcgcacctatggcaagccagacggccccggagacgcctggagggctgtggcccgggatgtctgggacactgtaggcgaggaggaaggaggtggagctggcagtggtggtggcagtgaggagggagcccgaggggcggaggtggaggacctccgggcccacatcgacaagctgacggggattctgcaggaggtgaagctgcagaacagcagcaaggaccgggagctgcaggccctgcgggaccgcatgctccgcatggagagggtcatccccctggcccaggatcatgaggatgagaatgaagaaggtggtgaggtcccctgggccccgcctgaaggatcagaggcagcagaggaggcagcccccagtgaccgcatgccgtcagcccggcccccctcgccaccactgtcaagctgggagcgggtgtcacggctcatggaggaggaccctgccttccgtcgtggtcgtcttcgctggctcaagcaggagcagctacggctgcagggactgcagggctctgggggccggggcggggggctgcgcaggcccccagcccgctttgtgccccctcacgactgcaagctacgcttccccttcaagagcaacccccagcaccgggagtcttggccagggatggggagcggggaggctccaactccgctccaaccccctgaggaggtcactccccatccagccacccctgcccgccggcctccgagtccccgaaggtcccaccatccccgcaggaactccctggatggagggggccgatcccggggagcgggttctgcacagcctgaaccccagcacttccagcccaaaaagcacaactcttatccccagccaccccaaccctacccagcccagcggcccccagggccccgctaccccccatacactactcccccacgaatgagacggcagcgttctgcccctgacctcaaggagagtggggcagctgtgtgagtcccacatcctgggcagagggcctggtggggccccttgctaggagaagggaagacgcccgagacgctgcttccccagaagtgctggggcagggaggcccaggagatgagagagaaggtccgagtaggtgatagaagacaagggggagaccgagccggaggctgaggaaaggaagagggcacggagttgccaggagcaaaccaaagtgaagagagagataggaagctgcctcggggccaccccttgcaaagggggtgtgtcccacaaacgctgctatgggtggggtggggggctggggtgctgcgtagccagtgtttgactttcttttcaagtgggggaaagtgggagaggactgagagtgaggcaagttctccccagcccctgtccgtctgtctgtctgtctgtggtggtttctgtttcttgggaggcatggtaggatcataagtcattcccctccccttccaggcctcctgctatatttgggggacctgactggtttggctggagtcccatgaggatgtgggccctttaataaaggatagcaaacagggagcttgtggcctgtttgttttgggttttcatggaggtgtaggttatataaggcaatggcacaggtcttaagcatacttatcagtgaagtattgtatgtgtgctctgtgcaggcaccacccagatctggatataagaatgtttccatcttgtcttcctgaacttcaccctcctgtctcttccttcagggtgcgcagcccgatcttttccccgctttttttttttgggagacagggtcttgctttgttgcccaggctggaggtacagtcttggctcactgcagcctccgcctcctgagtagctgggattacaggcatgtgccaccacgcccggctcattactgttttttttgtagtgacgaggtttcaccatattggccaggctggtctcgaactcctgatgacctcaagtgatccgcccaccttggcctcccaaagtggtgggattacaggtgtgagccaccgcgcccggcctcccctgctttcatgtttgcttacccagtgtctcagtctgtgccagcagcaccactgtctgttatggacaaagcacagaagcggggatgcgaggggaggtagagggaccgccagcctgtcaatgcttaactggctgttgctgacagatacagaaggatttgtggggtacagaggagttctgctttaagtcacctaacttacttgaaaggtctcccaagcagccagtttctcttgatagtgaatgggttgggcaagcatactgcgcttacctgattgttttcatcctggttgtgttacctgccttctggcaggctacatcattgttcccagtcgttattttatttgtgttaagactgtttgttggccaggcgcagtggttcacgcctgtaatgccagcactgggaggccgaggcaggtggatcacgaggtcaggagatcgagaccatcctggctatcatggtgaaaccccatctctactaaaaataaaaataaaaaaattagccgggcatggtggcgggggcctgtagtcccagctactcaggaggctgaggcaggagaatggcatgaacctgggaggcggagcttgcagtgagctgagattgcgccactgcactccagcctgggcgacagagcgagactccatttcaagaaaaattaaaaaactgtttgttgcctgcttgttttaatgttctggcttgaggcagcgagcccttgactatgccacattgccaggattttgcaggttagattgtactacagcactgcctttggcttgccagactctggagtccccacattttcatcctgttctcaggaaaacactttgacccacttgaagctctgagctactgcttcacagcttcctggggtcagtctccagccaaaaccatagatatcccaactgcagccaaaccacggctctgggcgaaggaacgattaggtttactctaggtttccacaccctgatgctcctgcctttactttgacacctctgactgccaggttttcacagacctgttgacagtgactcaagatctggaatgtaatggatggtttggcaacagtgtttgcttgagcagtttaaaatctggccagggagactcaatgtgagcaagaaaatgatagaataccaagttttctggaggtcagagggagctgagttgagtgttaccgagaatgctgtggggtttgagatgagaaaaatagcttgctaatttaaaagacggattatttttccctaaagaccttgacttatgtaaatgtatattatccataattttaaaaatccacttatggctgggcacagaagctcacacctgtaatcccagcactttgggaggctgaggcaggaggatcagttgagtccaggagttcgagaccagcctgggcaacatagtgaaaccctgtatctacaaaacatagaaaaactagttgggtgtggtggtgtgtacctgtagttccagctactagggaggtaggaagatcacctgagcccatggagattgaggctgtggtgagctgtgaaggcaccacagcactctggcctgggcaagagtgggactctctcaaaaaaaaaaaaaaaaaaaaatccacatatccagccttccaagtcagtctttaataatgtgcacgggccaggcacagtggctcacacccgtaatcccaacactttggaatattagggtgggagcatcacttgaggccaggaatttgagaccagcctgggcaacatagtgagactgccccccccatctctacaaaaaataaaaatcaaaaataatactgtgggcaaactttacttagattttattcagagtagtgcctgtttatttttcatctgtgctacctgtgccggcattccatatgcatttgatttagtctttaaagtaccccggtaaaataggtcttttgtctgcatttttcagatgggaagactgaggttttgtttatttatttttatttatttattttttgagacggagtctcgctctgttgcctaggctggagtgcgatggcacaatcttggctcactacaacctccgcttcctgggttcaagcgattctcctgcctcagcctcctgagtagctaggattacaggcgcccacaaccgcacccggctaattttttgtatctttagtagagacagggtttcactatgttgtccaagctggtttcgaattcctgacctcaggtgatccacccgcctctgcctcccaaaatgttgggattacaggcgtgagccaccacgcccagcctatttatttatttttttagaatcaagatcttgctatgttgcccaggctgaactcgaactcctgggctcaagcaatcctgcctcccaagccaagcagctggtactgcaagcatgtgccaccgtgcctggctcctgaagactgaggttggtttagattaatgagttgcccaaattcagacagttcttaagtggcaaagttaggattccaacccaggtcaacataactaaagcccaaaccccatctcacccctctaggccatcaagtattggctgggtgcggtggtttatgtctgtaatcccagcactttgggaggcggaggcgggaggactgtttgagctcaggagtttgagaccagcctgggcaacataacaagaccctgtctctacaaaaatatataaattagccgggtgtactggctcacacctgtagctacttgggaggctgaggtgggaggatcgcttgagcctgggaggtcaaggctgcggtgacctgtgattgcaccaccaggagaccctgtcttaaaaatgtatatataaaaataaaaagaacatcagacatcaccatcacctcgcttagaatccatggggccttctcctcaaattcaatcttcccaggcatttcatgaacttgcgtctagtttctgttccctctcaaattgcccaggctgtcctgtgagtgacagcagctatttcgtgggcctcctctggaatcatgagaagtcacccaaacaatctcagttttctagctcactccgtcttgacatttctacactgtcatccttggttttcttggaaattaatttgcttttcttcattgtctttctttggagctgctttccttttgttggttactattttatttttagcttctcacaccataccgacatatgttggttattcttttagacatgttttttgttgttgttgtcacctggaacttttgtatcttgaataaatttggggatcaaataca

SEQ ID NO: 911 - DNA, 4512 bp, Homo sapiens
  source 1..4512: mol_type = genomic DNA
tgtggaggaaagtgtgccatggcggagcctgtggggaagcggggccgctggtccggaggtagcggtgccggccgagggggtcggggcggctggggcggtcggggccggcgtcctcgggcccagcggtctccatcccggggcacgctggacgtagtgtctgtggacttggtcaccgacagcgatgaggaaattctggaggtcgccaccgctcgcggtgccgcggacgaggttgaggtggagcccccggagcccccggggccggtcgcgtcccgggataacagcaacagtgacagcgaaggggaggacaggcggcccgcaggacccccgcgggagccggtcaggcggcggcggcggctggtgctggatccgggggaggcgccgctggttccggtgtactcggggaaggttaaaagcagccttcgccttatcccagatgatctatccctcctgaaactctaccctccaggggatgaggaagaggcagagctggcagattcgagtggtctctaccatgagggctccccatcaccaggctctccctggaagacaaagctgaggactaaggataaagaagagaagaaaaagacagagtttctggatctggacaactctcctctgtccccaccttcaccaaggaccaaaagcagaacgcatactcgggcactcaagaagttaagtgaggtgaacaagcgcctccaggatctccgttcctgtctgagccccaagccacctcagggtcaagagcaacagggccaagaggatgaagtggtcttggtggaagggcccaccctcccagagaccccccgactcttcccactcaaaatccgttgccgggctgacctggtcagattgcccctcaggatgtcggagcccctgcagagtgtggtggaccacatggccacccaccttggggtgtccccaagcaggatccttttgctttttggagagacagagctatcacctactgccactcccaggaccctaaagctcggagtggctgacatcattgactgtgtggtactaacaagttctccagaggccacagagacgtcccaacagctccagctccgggtgcagggaaaggagaaacaccagacactggaagtctcactgtctcgagattcccctctaaagaccctcatgtcccactatgaggaggccatgggactgtcgggacggaagctctccttcttctttgatgggacaaagctttcaggcagggagctgccagctgacctgggcatggaatctggggacctcattgaggtctggggctgacaccccactccctgtttgacggcccagcctggacttggggagaatgactttcccttttttgccccataagggctagcataagctgaggtagaacttatctttaagctgcagcaaaatcaaggagtgacttttgtcccctctcctgttgaccctggtttagagccgttaaccacttggtgagttatgtgggtgttgttgccctgggtggcctgtggctccgtccacaagtcatgctgagttttgcagcctctgtgacttggagatgtcccttcacccctcccctttcaccaccatcctcttttcctcatggaaatgtctgctttatgaaactatgcacatattgaaagtgagttgaaacaaatgagggttgggtaggagcttccaggcctgggatttacaccacgcctagcccagcagaggccttagtcccatttggggcttgggagtgacatttgcttgaggcttatacactggtgtggttgcctggcttgcaggaaatgaccaagctcacacatgctggctgaagcgtaagcagacaactgaggtactcttttgaaggatgaaggtggtggattctcagccctgggggtcttcctcacctgaggacccttcagagccaccctttctagtttgcatttcctggtgcacacatttaaggcataacagcacattcatccctttggtttgggatctcaggaatacagtcccatgcaaagattctctggttttatggcttttttccctttctttacaccatcctctcccataagcacccatgtctttgaatatgaatgtatttgtaaaataccacgtttcatgtgtgaatatgtgcttttactgtacatagtgctattgtgcaataggtcttatgctgttttcactcaatgtgtgctaagatctagccccattgactcttctagaaatgcagtattgctttgacctgccatgtggcactccacaatgtcaattgcagtttacacacattgcctaaagtgggggacacctgggtgcccctgaccccttggcaccggatacaggccacgataaacatcctttcgtgtgttcccttctgtgcttgtgtggcatgtgtacccaggatgggcctataggtcacagaggtcagtttctctttggttttccagattttctttagaacggtgactgaccctcctacttgaggccgcccttttctccttatccttgccagcacttgtattgccagactacctaatttttgccagtctcatgggtagatagtggtgcagtgctttaacatacattcatctgatcagcattaatttggggaattttttcacttagcctttctggtttcccttcctgtgcattgcccattttctcatggagtttcttatcttttttggtttattctcaggagttgcttgtacattcttgggcaattgcagataattccaagaatgcatatttgggctgggtatggaggttcactggtaatcccagcactttgggaggcccaggcagaaggatcgctgcagcccaggagttcgagactagcctgggcaacatagcgagacctcgtctctacaaaaaaaaattaaaaagggggctttgggaggccaaggcgggcagatcatgagggcaggagattgagaccctcctggccaacatggtgaaaccccgtctctactaaaatacaaaaaattagctgggcatggtggcgcacacctgtagtcccagctactctggaggctgaggcaggggaatcgcttaaacccaggaggcggagattgcagtgagccaaggttccaccactgcactccagcctggcgacagagcaaggctccactcaaaaaaaagatttaaaggggaaaaaattgaaattttctttgtatctaggggtatccgtcactgaacagaaattcttaattttggctaggcgtgatggctcaggtctgtaatcccagcactttcggtggccggggtgggtggatcacttgaggccaggagttcaagaccaccctgaccaacttggtgaaatcccatctctactaaaaatacaaaaattagctgggtgcagtggcgcatgcttgtaatcccagctactcaggaggcagaggcaggagaatcacttgaacccgggaggtggaggctgcagtgaacagagacagtgccactgcacatcagcctgagtgacagagagactttgtctcaaaaaaaaaagaaaattttaattttaatgtagacagtatgaattatcttgttctgcagttggttgctttttgattgcttatttaatagagttgttaagatattttacatcttctcctgttagctgttcagcttttcctttcatattgagaacactacacagtgctgaagtccagctggtacacaccggggtgacaccttggctgcatctgttctcaacagtcagacacttcttctaattggttgatgctgggctgtactggttgctaaatattgcacatcattttaaaactatttgagatgcacttttgtactcaggaggccaaggcaggaggattgcttgagcccaggagtttgagaccagcctgggcaacacagcgagaccttgtctcttaaaaaaaaaaaaaaaaaaaaatgagagaaatcggctgggcatggtttctcatgcctgtaatcccagaactttgggaggctgaggcaggtggatcaccggaggttaggaattcaagactgaaaccttgtctctactgaaaatacaaaaaaaaaaaaaaaaaaaaatgagctaggtgtggtggcaggcgcctgtaatcccagttacttcgggaggctgaggcaggagaatcgcttgaacccaggaggcagaggttgcagtgagccaagatcgcgccattgcactccagcctgggcgacaagagtggaaactctgtctcaaaaaaaaaaaaaaaaattcagtgaaatacacctttatatatgagatccaagtttcactttttgtgatataatgagccagttttctcagtaatgtctactaaaaaaaaagccattaacctttctctaatatttgcatgattctaataaaagtatgtcaacttcttaaaatgttttattgaaatgtggcattcctttgaattttatgacattaaaataatccacgacatggtacagctcttcactttttcagctttttaaatgtccattaataagtttgaatacgttaaaattatatgtttaacctcaacaaaataaatggcaatatgttcaacttgt

SEQ ID NO: 912 - DNA, 2049 bp, Homo sapiens
  source 1..2049: mol_type = genomic DNA
gtctcactctgatgcacaggctggagagcagtggcgcgatatgggctcactgcaacctccgcctcccgttttcaaacgattgtctcagcctcccaagcagctggggttacacgcgtgcaacacgacgcccggctaatttttgtatttttggtagagacggggtctcgccatgtcggccaggctggtctcgaattcctgacctcaagccatccacccacctcgcctcccaacgtgctgagattacaggcgtgagccaccgcgcctgggaagtgcgggaggcctttttaaaaaatgtaaactcgcgtgctcaagaagccctatcggagggaaacacccagaagaggccaccctccaaacacagggtaaaacaggggtgacgcacagaggtaacgggaaagcaggaacgagcgagagcgtgcggtcccgtacctgcgcgtgcctgcgtgcgcgtccgtgcggccgcgacgccgccgccggtgcctctctttctagacgtgcgcgcgcccgcagctcgcccccctgaccgtaaagaggcccggctgtgtcgtgaaaggggccgcaacgcgcagagcgctggttgacggccgggactccattttgttcgccgttactctgcgcacatcgctattgcggttccgaggcagtgggaagagatgcggcccctggacatcgtcgagctggcggaaccggaggaagtggaggtgctggagcccgaggaggatttcgagcagtttctgctcccggtcatcaacgagatgcgcgaggacatcgcgtcgctgacgcgcgagcacgggcgggcgtacctgcggaaccggagcaagctgtgggagatggacaatatgctcatccagatcaaaacgcaggtggaggcctcggaggagagcgccctcaaccacctccagaacccgggcgacgcggccgagggccgggcggccaagaggtgcgagaaggccgaggagaaggccaaggagattgcgaagatggcagagatgctggtggagctggtccggcggatagagaagagcgagtcgtcgtgagcgcggtcggcggtttccagccaatggattctggtcaactggtggagattggctgacaccctggagaagccgaaaccagagagccttttgttttctcttttttcctgtctatgctctgtctcacttaacactacgttttctgctatggtctgtggttgatgacctcaatatgagtttcgattgttaacgtgtttttgtttgggaagtaattttgtttgaaaatgctctcacatacaggaattagggcctagattgtaagctcttgcagcagtcacatttgttcccgggctttggtggttatttctaaatttttgaggtgctttgctatttcttgtgtgacctgatagctccctggaactttgggtctgtgtgtgacacatgagactcacagttggagttctccagctctggaggtgctgaaggagctgcattaattctggaagacgactccatgcagcaactactgaagaaaggaccagacttcaacggggagtgtggatgggccgacctggctgggactcgtgaatctggagaagagctggagaatggatagtattgtctgtatttggagactttaatttctgtgtgagaccaaaggaggagagatgtgttttgttcaaaatttaaatttgttgtggtacactatcttatgtaacctgtctggtgagtttgtttggacaacctaactcagctttatttgacatggaacctaaaatagaagataagatcttgatattctgtacaagttgatgtaataccctgatgcgttttagaggacttggcataaaatgaaagattggcaaaggcccttgaggggcttggggatgacagtatggaactgtctgcattggaccctaaactggactagaagaggcatcttcaaggttcatacgttgtccagctgtaagttcatttgagtagcagacctaacaaatatttgaggtcagaaccctaccatgttaaaacaaacaaaaacttaccatgttaataaaagtattcatttgcttgaaaa

SEQ ID NO: 913 - DNA, 1993 bp, Homo sapiens
  source 1..1993: mol_type = genomic DNA
tcctctcctattatgcaaacccacaccatggatccagcagactactctggccccagcatgctgctccttgggatgatgggagaagggggaaacctgtgttttctcttggttttagggtatgggtctacttctttgaacattcgctcagatcgtaaggtaaccccaagaatcggcatcactctctggtctgggcgcctggatagtcacgcatggagtccgcgaggtgctggcgccggagcacgctgggaacgccgggctcccggccggcctgacccggaagggctggcgcatggtaaccccagcttccctagcaaccaagcaggcgcaagaagcaaccagccgcgctatccgctcccgttgctaccggaatgcctcttcaggttagcgattacagctggcagcagacgaagactgcggtctttctgtctctgcccctcaaaggcgtgtgcgtcagagacacggacgtgttctgcacggaaaactatctgaaggtcaactttcctccatttttatttgaggcatttctttatgctcccatagacgatgagagcagcaaagcaaagattgggaatgacaccattgtcttcaccttgtataaaaaagaagcggccatgtgggagaccctttctgtgacgggtgttgacaaagagatgatgcaaagaattagagaaaaatctattttacaagcacaagagagagcaaaagaagctacagaagcaaaagctgcagcaaagcgggaagatcaaaaatacgcactaagtgtcatgatgaagattgaagaagaagagaggaaaaaaatagaagatatgaaagaaaatgaacggataaaagccactaaagcattggaagcctggaaagaatatcaaagaaaagctgaggagcaaaaaaaaattcagagagaagagaaattatgtcaaaaagaaaagcaaattaaagaagaaagaaaaaaaataaaatataagagtcttactagaaatttggcatctagaaatcttgctccaaaagggagaaattcagaaaatatatttactgagaagttaaaggaagacagtattcctgctcctcgctctgttggcagtattaaaatcaactttacccctcgagtattcccaacagctcttcgtgaatcacaagtagcagaagaggaggagtggctacacaaacaagctgaggcacgaagagcaatgaatactgacatagctgaactttgcgatttaaaagaagaagaaaagaacccagaatggttgaaggataaaggaaacaaattgtttgcaacggaaaactatttggcagctatcaatgcatataatttagccataagactaaataataagatgccactattgtatttgaaccgggctgcttgccacctaaaactaaaaaacttacacaaggctattgaagattcttctaaggcactggaattattgatgccacctgttacagacaatgctaatgcaagaatgaaggcacatgtacgacgtggaacagcattctgtcaactagaattgtatgtagaaggcctacaggattatgaagcggcacttaagattgatccatccaacaaaattgtacaaattgatgctgagaagattcggaatgtaattcaaggaacagaactaaaatcttaatgactattagaagtaactaagtattgttataagttttttaaaaacaactggaggcatctttgtacatattatggccagttgtacagaatcgctttctgtttagtactttagttctgttgagggcaaaatattataaatctatagaaaataaactgtttgacttgaatcatttctgaataagtaaatctaaataagaatctattttaattccttatttcttcatattaatacatatgtatacttttttgtgttactgaattaagcttgcccttgtaacaaaatatgttttggtatagttaccaggacacttactgattaatttttaacaaggtagaattttaaaataaaagatttataaataa

SEQ ID NO: 914 - DNA, 781 bp, Homo sapiens
  source 1..781: mol_type = genomic DNA
ggcatgctgggggtgctaggtaccgaaggcagatgccgtccctttggactcgcttcgtccaacgcccccacgagtttcggtggcccttcgccccacgctataagagcagtcacttccggaactgctgcccttcgcctttgccgcgaaaagtgcctgacgggggctgggaagggggagggggaaggagtcaacgactccctccccgtcgtcattggctgagcgcctcgtgacgtcactctgaggcgcctcatgcggcgccgcgcacgggtcccagagccttctgggtagcggtttaaccccgcctcttgcgtcggcgccttccttttcctccctgtcgccaccgaggtcgcacgcgtgagacttctccgccgcctccgccgcagacgccgccgcgatgcgctacgtcgcctcctacctgctggctgccctagggggcaactcctcccccagcgccaaggacatcaagaagatcttggacagcgtgggtatcgaggcggacgacgaccggctcaacaaggttatcagtgagctgaatggaaaaaacattgaagacgtcattgcccagggtattggcaagcttgccagtgtacctgctggtggggctgtagccgtctctgctgccccaggctctgcagcccctgctgctggttctgcccctgctgcagcagaggagaagaaagatgagaagaaggaggagtctgaagagtcagatgatgacatgggatttggcctttttgattaaattcctgctcccctgcaaataaagcctttttacacatct

SEQ ID NO: 915 - DNA, 1801 bp, Homo sapiens
  source 1..1801: mol_type = genomic DNA
ctcaacagggcgtgtttttgtgtcactggtgtccctgagctggaggtgatctgtgggctgcagcaggcggaatggccccgtctgggattgagccacctgggagctgtcggcgggggttggggcggccttcccacctccacctgggtttctcttcacactcaggaggtagatctggcctcggaagtggccttagaggtggtgcggacagcagagcctggcgtgtggttggaggctcaggccccggtggccctggtggctcagcctgagcccctgccggccacagctggtgtgaagagggagagcgtgggcatggaggtggcagtgctgactgatgacccgctgcccgttgtggaccagcagcaggtgctggcccgtctgcagctgttggagcagcaggttgtgggtggagagcaggccaagaacaaggacctgaaggagaagcacaagcggcgcaagcgctacgcagacgagcgcaggaagcagctggtggctgccctgcagaactcggatgaggacagcggggactgggtgctgcttaacgtctacgactccatccaggaggaagtgcgggccaagagcaagctgctggagaagatgcagaggaagcttcgggcagcagaggtggagatcaaagatctgcagtccgagtttcagctggagaagatcgattacttggccaccatccgccggcaggagcgtgactccatgctcttgcagcagctcctggagcaggtgcagcccctgattcgcagggactgtaactacagcaacctggagaagattctgcgtgagtcctgctgggacgaagataacggcttctggaagatcccacatcccgtcatcacaaaaaccagcctcccagtagcagtttcaactgggccacagaacaaaccagcccgcaaaacctctgcagcagacaatggcgagccgaacatggaggacgaccgctacaggctcatgctcagtcggagcaacagtgaaaacattgccagcaactacttccgatctaagcgggccagccagatcctcagcacagacgccaggaagagcctcacacatcacaactcgccaccaggcctcagctgcccactcagcaacaactctgccatcccacccacccaggcccctgaaatgccccagccccggcccttccgcctcgagtccctcgacatccctttcaccaaggccaagcgtaagaaaagcaaaagcaactttggcagtgagcctctgtgagcacagctgcttgccattgcctgccttataggcatgtagagactgccaggccctcccagggcagccccaaccaggtctcctcccacctgccacacagcgctccggggcctgagggctccctcagccctgggaagacacattcccttccctgttccccagagagcccacctccgccctgggcaggagcccctcggaggctgtatagtcctccttagagaggcctgctccagctgttcataccacatcagtgtttccgtctgctcacctgccacagagcccacacccatgcccaccagtgttggtctttgcctcaaagcctgagacctgcttcacggccttcaccagccctgatggagagggcagcagctgccacgtggaggaagctcaatatcagctgggaaggaactgtgcctctgtctgactggccccacttcctaagcactgccctgccccatggggtggcacaggggtcccacagcaggtcttcctgcactgcccacccctggctggtctgtggcccaaggaaggccactccacattaagctgcccaataaactgcttttaagat

SEQ ID NO: 916 - DNA, 1546 bp, Homo sapiens
  source 1..1546: mol_type = genomic DNA
aatcccgtgcggcgcgcacaggcaggaggttgcagttgggcgctcagcagctgtggcagccggttgaggtctggcagtagcgttgggctgaagcagcggagttcgccatgcgcgagtgtatctctatccacgtggggcaggcgggtgtccagatcggcaatgcctgctgggaactgtactgccttgaacatggaattcagcccgatggccaaatgccaagtgataaaaccattggtggcggggacgactccttcaacacgttcttcagtgagactggagctggcaagcacgtgcccagagcagtgtttgtggacctggagcccactgtggtcgatgaagtgcgcacagggacctacaggcagctcttccacccggagcagctgatcaccgggaaggaagatgcagccaataattacgccaggggccattacaccatcggcaaggagattgttgacctagtcctggaccggatccgcaaactggcggatctgtgcacaggactgcagggcttcctcatcttccacagctttgggggcggcactggctctgggttcgcatctctgctcatggagcggctctcagtggattacggcaagaagtccaagctagagtttgccatttacccagccccccaggtctccacagccgtggtggagccctacaactccatcctgaccacccacacgaccctggaacattctgactgtgccttcatggtcgacaatgaagccatctatgacatatgtcggcgcaacctggacattgaacgtcccacgtacaccaacctcaatcgcctgattgggcagatcgtgtcctccatcacagcctccctgcgatttgatggggccctgaatgtggacttgacggaattccagaccaacctagtgccgtacccccgcatccacttccccctggccacctatgccccagtcatctcagctgagaaggcctaccacgagcagctgtctgtggccgagatcaccaatgcctgcttcgagccagccaatcaaatggtcaagtgtgaccctcgccacggcaagtacatggcctgctgcatgttgtacaggggggacgtggtccccaaagacgtcaacgcggccatcgccaccatcaagaccaagcgcaccatccagtttgtggattggtgcccgactggatttaaggtgggcattaactaccagccccccacagtggtccccgggggagacctggccaaggtgcagcgggccgtgtgcatgctgagcaacaccacggccattgcggaggcctgggcccgcctggaccataagttcgatctcatgtatgccaagcgggcctttgtgcactggtacgtgggcgaaggcatggaagagggagagttctctgaggcccgcgaggacctggcagctctagagaaggattatgaagaggtgggcgtggattccgtggaagctgaggctgaagaaggcgaagaatactgaggggagggtgtggtgggttctcccctgccacccccgggatggctgcttccaagttgtttgcaattaaaggttctgtataaaaccaa

SEQ ID NO: 917 - DNA, 2169 bp, Homo sapiens
  source 1..2169: mol_type = genomic DNA
aatgagatgctcgcctccgcgcgtttccgcttccgccatcgcggacgcagcctcgtgccgggagtcgccgcattgtggtccgcttctctgcactatgtcgggtggcctcctgaaggcgctgcgcagcgactcctacgtggagctgagccagtaccgggaccagcacttccggggtgacaatgaagaacaagaaaaattactgaagaaaagctgtacgttatatgttggaaatctttctttttacacaactgaagaacaaatctatgaactcttcagcaaaagtggtgacataaagaaaatcattatgggtctggataaaatgaagaaaacagcatgtggattctgttttgtggaatattactcacgcgcagatgcggaaaacgccatgcggtacataaatgggacgcgtctggatgaccgaatcattcgcacagactgggacgcaggctttaaggagggcaggcaatacggccgtgggcgatctgggggccaggttcgggatgagtatcggcaggactacgatgctgggagaggaggctatggaaaactggcacagaaccagtgagtggtgagagctctgtcagtgacaaacactcctttggcctgttgaatttgctgaagaacatcacctaaagtctgcacacgagcccatttttaccaagatttgatcagtgtctttactgagctggaagcctctgaaagttattaaaggacagaatccaaaagaatgcctttaattcttgtctgagaatcttggccatgtgtcagattatcagaacaattttgttaccaggtcagaaattgtgttctttgacaacagattggatctgtaatgttgattagtctttagccataaccactacacttttagaaagacagaaaaatgtaagaatttgtttttaccataatgagtcttaagtaggttcatgatctacattggggcctgggattatttttttaattttaagtttgcatgagatagcctaataaatggaggtggggccaggcatggtggctcacacgtgtaatcccaacactttgggaggctgaggaggaaggatagcttgaggccaggagtttgagactagactgggcaacatagcaagaccccgtctctacaaagcacaacgaaaaacaacaaatggagttgtgctatgttgtattgctttgcacaaaattaggaacaggtgtttgacaattgaatttgttttctgtgaattctaacctctaaaggcatgcttagaggtcaaggaccttcctgtgtagttggtgcaaaagcaatctccacaggacagcactgcttccatgcttcatacatcaggaaatgaggccagaacttgagtatttactaacacgtttttcaaaagatgtcagtgttatacctaaagctaaaaaaaagcaagggtttgtcatagagggaacctctaaataatttcaggggtaggggagatgttgtcaataggaaatgggataaaatatcaagagacaatgaaaacactgccttgacatgaggaccagcaagtttattcttttcattttcagtgatgttgggaatggactgggttttaaaagggagcttgaagagggaatgtttgacagtcacagaaggttcctgcagcagatgcctcttttagccatttctcatttttttcctcaaattttacctactgaggctcaagccttcacagtgagctgatggtctctacagggaggggagtctagggaatttatttggtatttgtaaggcaagaggtgatttctctctaatatatctgagttattgctcatttaaaactgttaagtccagtataattttccctgatatgaaaaaatgtgcatttttttcacttagcaacaaagtaccttctaatttccaatagtccgtgaaagttggggctgaagtacctaagtgtgaatgtctctcccgttaaactgagtgtagaaatctgaatttttaaaagagctgtaactagttgtaagtgcttaggaagaaactttgcaaacatttaatgaggatacactgttcatttttaaaattccttcacactgtaatttaatgtgttttatattcttttgtagtaaaacaacataactcagatttctacaggagacagtggttttattcggattgtcttctgtaataggtttcaataaagctggatgaactta

SEQ ID NO: 918 - DNA, 1800 bp, Homo sapiens
  source 1..1800: mol_type = genomic DNA
gtgtttccggctccgctgcggaaggcggacgactagagtcgttgggcccggcgcgacccgcaggagcgtagagagcgcgggactagagtgcagagctccgggacgtggatcggagccggcgcgatgggcggagagcaggaggaggagcggttcgacggcatgttgctggccatggctcagcagcacgagggcggcgtgcaggagcttgtgaacaccttcttcagcttccttcgacgcaaaacagactttttcattggaggagaagaagggatggcagagaagcttatcacacagactttcagccaccacaatcagctggcacagaagacccggcgggagaagagagcccggcaggaggccgagcggcgggagaaggcggagcgggcggccagactggccaaggaagccaagtcagagacctcagggccccagatcaaggagctaactgatgaagaggcagagaggctgcagctagagattgaccagaaaaaggatgcagagaatcatgaggcccagctcaagaacggcagccttgactccccagggaagcaggatactgaggaagatgaggaggaagatgagaaggacaaaggaaaactgaagcccaacctaggcaacggggcagacctgcccaattaccgctggacccagaccctgtcggagctggacctggcggtccctttctgtgtgaacttccggctgaaagggaaggacatggtggtggacatccagcggcggcacctccgggtggggctcaaggggcagccagcgatcattgatggggagctctacaatgaagtgaaggtggaggagagctcgtggctcattgaggacggcaaggtggtgactgtgcatctggagaagatcaataagatggagtggtggagccgcttggtgtccagtgaccctgagatcaacaccaagaagattaaccctgagaattccaagctgtcagacctggacagtgagactcgcagcatggtggaaaagatgatgtatgaccagcgacagaagtccatggggctgccaacttcagacgaacagaagaaacaggagattctgaagaagttcatggatcaacatccggagatggatttttccaaggctaaattcaactagcccctgttttttcctccctgaactcttggggctgagctgcaaccacccaactttctttcccactcttctctgggacttgtgggcctcagggcttggggcaggcatgggactggcccaggcacacaggtcccggggcatcaggagaaaggctgggtcttgggaccttgtcctccccagttggcctactgttacacattaaaacgatttgcccagctccttctgtgtcctctcttgcctctggcctttctctggggcacaggcctcttacggctgctgctgggaactgggagtttggcttctagcccagattctgccatgtgacctagggcacatccttgcccctctctgggcctcagtttctcattacttaaagattaaaacaaggcttggccgggtgtgatggttcatgtctgtaatcccagcactttgggaggctgaggggagcagatcacctgatgtcaggagtttgagaccagcttggccaacatggagaaacccagtctctactaaaaatacaaaaattagccgggtgtggtggtgcacacctgtaatcccagctactcgggaggctgaggcaggagaatcgcttgaacccgggtggcggaggttgcagtgagccgagattgcactacttcactccagcatgggtgacagagactccatctcaaaaaaataaataaa

SEQ ID NO: 919 - DNA, 2243 bp, Homo sapiens
  source 1..2243: mol_type = genomic DNA
ccaaagccctcttgggacaagccggggattccccgccgccgcccgccccctggcgtcacggagtccccgcgaggccccgccccggcctggcgccgtcctgggcgggaggaacgcgccgctaggcgggagagcgcggccatggcggggccgggcgtccccggtgcccccgcagcgcgctggaaacgccacatcgtgcggcagctgcggcttcgggaccgtacgcaaaaggcgcttttcctggagctggtgccggcctataaccatctcttagagaaggctgagctgctggacaagttctcaaagaagctgcagccggagccaaacagtgtcactcccaccacccaccagggcccctgggaggagtcagagcttgactcagaccaagtcccatcactggtcgcactgagggtgaagtggcaggaggaggaggaggggctccggctggtctgtggtgagatggcctaccaggtggtggagaagggcgcggccctgggcacgctggagtcggagctgcagcagaggcaaagcaggctggcagccctggaggcccgcgtggcgcagctgcgagaggcgcgggcgcagcaggcccagcaggtggaggagtggcgggcgcagaatgcggtgcagcgggcagcctacgaggcgctgcgcgcgcacgtcgggctccgggaggcggcactgcgcaggctccaggaagaggcgcgcgacctgctggagaggctcgtgcagcgcaaggcgcgcgccgcggccgagcgcaacctgcgcaacgagcgccgggagcgggccaagcaggcgcgggtgtcccaggagctgaagaaggctgccaagcggaccgtgagcatcagcgagggcccggacaccctaggcgatgggatgagggagagaagggagactctggctctggcccctgagccagagcccctggagaaggaagcttgtgagaagtggaagaggcccttcaggtctgcctcagccacctccctgacgctgtcccactgtgtggatgtggtgaaggggcttctggattttaagaagaggagaggtcactcaattgggggagcccctgagcagcgataccagatcatccctgtgtgtgtggctgcccgacttcctacccgggctcaggatgtgctggatgcccacctctctgaggtcaatgctgttcgttttggccccaacagcagcctcctggccactggaggggctgaccgcctgatccacctctggaatgttgtgggaagtcgcctggaggccaaccagaccctggagggagctggtggcagcatcaccagtgtggactttgacccctcgggctaccaggttttagcagcaacttacaaccaggctgcccagctctggaaggtgggggaggcacagtccaaggagacactgtctggacacaaggataaggtgacagctgccaaattcaagctaacgaggcaccaggcagtgactgggagccgcgaccggacagtgaaggagtgggacctcggccgtgcctattgctccaggaccatcaatgtcctttcctactgtaatgacgtggtgtgtggggaccatatcatcattagtggccacaatgaccagaagatccggttctgggacagcagggggccccactgcacccaggtcatccctgtgcagggccgggtcacctccctgagcctcagccacgaccaactgcacctgctcagctgttcccgagacaacacactcaaggtcatcgacctgcgtgtcagcaacatccgccaggtgttcagggccgatggcttcaagtgtggttctgactggaccaaagctgtgttcagcccggacagaagctatgcactggcaggctcctgtgatggggccctttacatctgggatgtggacaccgggaaactggagagcagactacagggaccccattgcgctgccgtcaacgccgtggcctggtgctactccgggagccacatggtgagcgtggaccagggcaggaaggttgtgctctggcagtagggccacgacctgcctgcctgggctggagctcttgcccgaagcctgaagcttccttcggcgccatgcaggggttggggttgggactggagctggccttgggatttaatggggaagaaggcctggcaggacctggcctgtttgtttaaaaatgaagtatgggttgggggattacgctagtttttctttgtatttttatctctatctcctcactttttctcccaaagtagaaaaaaatgatatctgaa

SEQ ID NO: 920 - DNA, 7550 bp, Homo sapiens
  source 1..7550: mol_type = genomic DNA
ggaagcggaagtgaagggtgcgcttggcggcggcggcgggagctgcggagtcgggaatcaaaacaaagggcctggggggggcggggggaaggcggcggggccggaatgtgagcggaggtggagccggcggcagagggtggaagaatgaaagaaaagaaagatgaaaggatgttgaatcactttgcatggctgtatgatggaaggaaacggaactgagaactcctgcagtagaacacgtggatggcttcaacaagataatgatgctaagccatggctttggaaattctctaattgcttttctcgtcctgagcagacgctgccacatagtccccaaacgaaagagtacatggagaacaagaaagttgctgtggaactaaaggatgtaccatcaccccttcatgctggctctaagctttttccagcagtcccacttcctgatattcgttctcttcagcagcctaaaatacagctttcttctgtccccaaagtaagctgctgtgctcattgccctaatgaaccctccacttcgccaatgcgttttggtggtggtggtggcggtagcggaggtaccagtagcttgattcacccgggcgcactgttagactcgcaaagcaccaggacaatcacgtgtcaggtagggtcagggtttgctttccagtctgcatcttcactccagaatgcctcagctaggaacaatttggcaggcattgcaagtgactttcccagcatgtgtctagagagtaacctgtcttcctgcaaacacctgccctgttgtggaaaactccacttccagtcatgtcatggtaatgtgcacaagctgcatcagtttccgagtctgcagggctgcacctccgctggctatttcccctgttctgatttcacaagcggggctccagggcatttggaagagcacatttcacagtcggagctaacgcctcacttgtgcaccaactctttgcaccttaatgtggtacctccggtttgtttaaagggctcactttactgcgaagactgtctaaacaagccagcaagaaatagcataatcgatgcggctaaagtctggccaaatataccacctccaaatactcaacctgcacctcttgctgtccctctgtgtaatggctgtggaaccaaaggaacagggaaggagaccacgttgttattggcgaccagtctaggcaaagctgcttcaaaatttgggtcaccagaagttgcagtagctggacaggtgctagaaaacttaccccccattggagttttttgggatattgaaaactgctccgttccctctggccggtcagcaactgctgttgtgcaaagaatccgtgagaagttttttaaaggccacagagaagcagaattcatctgtgtatgtgacatcagtaaagaaaacaaggaagttattcaagagctgaataattgccaggtaaccgttgcccacatcaatgctactgcaaagaatgccgctgatgataaactgcggcagagtctccgcagatttgcaaatacacacactgctccagccacagtggttcttgtgtcaactgatgtcaattttgcattggaacttagtgacctgagacacaggcatggtttccacattattttggtccataaaaaccaggcctcagaagcactgctgcatcatgctaacgagctgatcagatttgaagagttcatttccgacttgccccccaggttaccactaaaaatgccacagtgccacactctgctctatgtttataacctaccagcaaataaggatggcaagagcgtcagcaacaggctcagacgcctgtccgataattgtggtgggaaagtgctgagtatcacaggctgcagtgcaattctccgcttcataaaccaagatagtgcagagcgcgctcagaagcgaatggaaaacgaagatgtctttggtaataggatcattgtgtcatttactccaaaaaatagagaactctgtgaaacaaagagttcaaatgcaattgctgataaagtgaagtctcccaaaaaacttaagaatccaaaattgtgcctcatcaaagatgcaagtgaacaatcttccagtgccaaagccacgcctggaaaagggtcacaggcaaattctggatctgctacaaaaaatacaaatgttaaaagtttacaggagctgtgccgcatggagtcaaaaactggtcatagaaacagtgagcaccagcaaggtcacctgaggctggtcgtacccactcacggtaactcaagtgctgcagtgtcgacgccgaaaaactcgggggtggcagaacccgtttacaaaaccagtcagaaaaaggagaacctcagtgcccgaagtgttaccagttctcctgtagagaaaaaagataaagaggagactgtattccaagtgagttacccgtctgcttttagcaagttagttgcatccaggcaagtcagtcctctgctcgcatctcagtcttggtcttctaggagtatgtctccaaaccttttaaacagagcatccccgcttgctttcaacattgcaaattcgagcagcgaagccgactgcccagacccatttgcaaatggtgctgatgtccaagtcagcaacatagactacagattatcccggaaggagctgcagcagctcctgcaggaagcatttgccaggcatggcaaggtgaagagtgttgagctcagcccccatacagattatcaactcaaggctgttgtgcaaatggaaaacttacaagatgcgatcggtgcagtgaatagcctccacagatacaaaattggcagcaaaaagatcctggtctcacttgccaccggggctgccagcaaatcactctctttactgagtgcagaaacaatgtctgttcttcaggatgcccctgcctgttgcctgcctctgtttaaatttacagatatctatgaaaaaaagtttggacacaagttgaatgtgtcagatctatataaattaacagacacggtcgcaatccgtgaacaaggaaacggacggctggtgtgtctcctacccagcagtcaggcccgccagagccccttggggtcttcccagtcacacgacggctcctccacgaattgcagcccaattatatttgaagagttagaatatcacgagcctgtctgcagacagcattgttccaataaggatttcagcgaacatgaatttgatccagactcttacaagattccttttgtgattctttctttgaagacatttgcgccccaggttcacagtcttctccagacccacgagggcaccgtgcctttactagacccttggcttctgcgttcgaagagtcctgtaggtaacccccagctgatccagttcagtagagaagtgattgacttgctgaaaagccagccatcttgtgtcatacccatcagtcatttcatcccatcctatcaccatcattttgcaaagcagtgccgagtgtcagactacggatactccaagctgattgagttattagaagcagtgcctcatgtattgcagattcttggaatgggctccaaacgtctgctgacccttacccacagggcccaggtgaagcgctttactcaggatttactaaaacttctcaaatcccaggccagcaaacaggtcattgtgagagaattctcacaggcttatcactggtgtttctcaaaggactgggatgtcactgaatatggtgtttgtgagttgattgacatcgtatcagagattccagacacaaccatctgcttgtcccaacaagataatgaaatggtgatttgtatccccaaaagagaacgcactcaggatgaaatagaaaggacaaaacagttctccaaggatgtcgttgatttgctgcgtcaccaaccccatttccggatgccctttaataaatttatcccttcttaccatcaccactttggccggcagtgcaaacttgcgtactatgggtttaccaaactacttgaactttttgaagccatacctgatactttacaagtattggaatgtggagaagaaaagatccttactctgacagaggtggagcggttcaaagctctagctgcccagtttgttaaactccttcggtcccaaaaagataactgccttatgatgacagatctccttacagaatatgctaaaacttttggttatacatttcgtctccaagactatgatgtcagttccatttcggctttaactcagaaactctgccatgtcgtgaaggttgccgatatagaatctggcagacagattcagctgatcaaccgaaagtctctgcgatctctcactgcccagttgctggtattgttgatgtcttgggaaggaaccacccatctttctgttgaggagctcaagagacattacgaaagtacccacaacactccccttaacccctgtgaatatggattcatgaccttgaccgaactgctgaagagcctgccatacttggttgaggttttcactaatgataagatggaagaatgtgtgaagctcacaagtctgtatttgtttgcaaagaatgtgcggtctttacttcatacttaccactaccagcagattttccttcatgagttttccatggcctataccaagtatgtcggagaaactctgcagcccaagacctacggccacagcagcgtggaggagctcttgggagcaattccacaggtggtctggataaaaggacatggtcataagagaattgtagtgttaaaaaatgacatgaaaagtcgtttgagttcactcagtctctcccctgccaatcatgaaaaccagccctcggagggcgagcgcatcctggaggtgcccgaatcgcacacagcctcggaactcaagcttggagctgacggcagtgggcccagtcacacagagcaggagcttctccgcctgaccgacgactcccccgtcgacctcctgtgtgcgcctgtcccctcgtgcctgccgtcccctcagctgagaccagaccccgttatcctccaatctgctgatctcattcagtttgaggagcgccctcaagagccttctgaaattatgattttaaaccaagaagaaaaaatggagattccaataccaggaaagagcaaaactctgacctctgactccagctcgtcctgcatctcagcagctgtccccgtgcctccctgcccctcctcggaaacctccgagtcactgctcagcaaggaccccgtggaaagcccggccaaaaagcaacccaaaaatagagtcaaattggcagccaacttttccttagcacctataaccaagctttaactcccatttggaatatagaattaggatgggaaaacactgtctgattctgcacacaaaagtgggtttcaaaaatacatccttttctgtgtcatgaaaaccccccgaagccattgacttcatcttacctgtgttctatcatgtttttcttttccattgaacacagctttgagctgaagtctttcttttcttcttcctttttctttcttttttcaattatttgaagaacttgtggcatttgttaaagaatccttaatatattttaccaaatttttagtaactattatgaaatacaatggtgttccaaaagaagaaagcactaaaaactcaactagcaggaagcggttttgcttccattgagccacgtcggtggtgtcatcctacatgtagcataatagagtctctcagcctttgcttactggtgtttccgacagtattaacccagtgcgtggcatgtctttgaagcaaagcctgtcccgctagcctgtgtgttcacacaccaaaggagaagggtaggcgaggggttcggagtgtattttcaggttggaatgtgaaggttcctggcttccatgtgacttgtaagtgtgccttgttttttatttaaactatgtctgtagttgacaaaagtggcttcatcacaaatttttttaaacgtttctactttggggttccatttaggagctttctagaaagttgaggatgtttgaagcttcccttctgtgttccagtttgatatgggttaggttaaggaaaaggagatggtctcgatgtcatggatttaaagtcagcatttggattacaacacacattattgtgtgtcgagaggcagcattggaaagagcctgattttctaaaatatgcatcaagtgcataaattacaaatcagagctgagtggggaggtgcttcagcagcagcgggatcaatacgatttccactgggaagagacaggaattctacctacacataggaaggccaaggttgatccacttaaccttgttattgtaattttaaagctggtatcggtagctgggaagctttatgtgtgtgtatgtcagctcagcatcttttaatcgtgtctgattttactctcgttacttctcgctgttggaagcatctctgggtttcttgtggcgtctggtgtggaatggccttcctctctaggtgcctgaggtgtccgctgacgggtggcctctcacccccctctagagaaacctgacatttacaatggattgtatttgtccggcaaaaaaggcggattcattcatagagcagaaagaacctgttggcgtaaggtcttccactagttagatggtttcttttggggaaatgtttatatttggtaacttctagaaagccagaaaatggactctgatttcatagcattttgataaaatgccacaaaataagggctatagagagatttttacaagtcagattttttgttccccaaatcttttaaatgaagccagtgactcccagttctcaacacatggccccagtcaagacagaacaccatggaaaaaaccctgtaagtattatggcactctccgaatcctcctgaaggcatttcctctacagacatagtgttacaggaagtgaaatgcaaatgtgcaattttttttaaaggagcttttaaacaaagtaataataattggtgttgagaacatcagttgccttattctaagatttcataaggctgagtttgcacgcttggacttcagttctgctagcatgtaaagagtggtggactttaaaaccgtaagaggtatcattacaagtcacctggaacagactcaaagaacaggttctttgggcaacagacaaagaagaatcaagttctgtgctgtcccgtgagtgtgtctgagtaccattcactggagttgctgcttaggtctgggacgtgtgtgtgactcttaacaattgctgtctgaaaatgagagagaagacttcggaagcacattgtgttcataatgtactccacaatggccagtccaattgctatctatttttttatccagaggcttaattaaatgatgtggtaaaatgatgtttgagcattaagacaatgtaattctttatttctgggtggaaagatataccggattaaatttatctgtttaaaaaaatgacaaaagttatcaccaaaaccccctttcccatcttgcactgtttgttttggattgggtttgggggaaagagatgtttttcttagttgtctactttgtttgaacacttttgttgtggttcaagtgctgttttgtgtgttgggaccaaacagttgtcaataaactttacaagcgagcatct

SEQ ID NO: 921 - DNA, 785 bp, Homo sapiens
  source 1..785: mol_type = genomic DNA
ggtggcgggtatgatctcaacctcttcgccagccctcctgacagcaacttcgtgtgctccgtctgccatggggttctcaagaggccagcaaggttgccatgcagccacatcttctgcaaaaagtgcatcctccggtggctagccagacaaaagacctgtccgtgctgtaggaaagaggtgaaaaggaaaaaggttgtccacatgaataaactccggaaaaccattggccgcctggaagtcaagtgcaagaacgccgacgctggctgcatagtgacatgccccctggcccatcgcaaggggcaccaggactcatgcccctttgagctaacggcctgccccaacgagggctgcacctcgcaggtgccgcgtgggaccctggcagagcaccggcagcattgccagcaagggtcccagcagcgctgccccctgggctgcggggccaccctggacccggccgagcgtgctcgccacaactgctaccgggagctgcacaacgcctggagcgtgcgccaggagcgccgtcggcccctgctgctgtccctcctgcggcgtgtgcgctggctggaccaagccaccagtgtcgttcgtagagagctggcggagctcagcaacttcctggaggaagacaccgctctgctggagggtgccccacaggaggaggccgaggctgccccagaaggcaacgttggggctgaggtggtgggggagcccagggccaacataccttgtaaataggtaaataaaagcagacccccggcctgcctgcctctgtgcctgcggccctc

SEQ ID NO: 922 - DNA, 882 bp, Homo sapiens
  source 1..882: mol_type = genomic DNA
gttgcctaaacctctgccacccacctgtgaacttcactttgccacagggaggcactgaactgaaaaactgccttgtaagaggtgtcgcccctctgtctactccctttcttatatcaagaggggaaaaacacgtaactacctctacccgatctggtcaccatacgcctattacctttactgttacaagtaccggatcactctccgggagaagatgctgcctcgttgttataaaagcatcacttataaggaagaggaggacttgacactccagccccgttcctgcctccagtgcgagtccctagtaggcctccaggagggcaaaagcaccgagcagggtaaccacgaccagcttaaagaactgtattcggctgggaacttgacggtgctggctactgaccccctgctccaccaggacccagtacagttagactttcacttccgccttacctcccagacctctgcccattggcacggccttctctgtgaccgtcgactcttcttggatatcccatatcaggccttggatcaaggcaaccgggaaagtttgactgcaaccctggagtacgtggaagagaagacaaatgtggactctgtgtttgtgaacttccagaatgatcggaacgacagaggtgccctgctgcgggccttcagctacatgggctttgaggtggtcagaccagatcaccctgccctccctcccttggacaatgtcatctttatggtgtatccccttgaaagggatgttggccacctgcccagtgagcctccttgaacatgcttattccaacgctttgaggggctggaagccttgacacatggaatcaggggcccgggatgtgattcaggacactttccatcctaggaataaagggtagtgcaatc

SEQ ID NO: 923 - DNA, 3250 bp, Homo sapiens
  source 1..3250: mol_type = genomic DNA
cgagtgttggcggggactgagcctcctgcttgaggtagttgtttttactcccagtccccaggctcacgagccccacgcgcgctcaatctgccctcccgcttctcctcgccactccgagttctgcgccctcgagatccagcgcatccgcggggtgggcgggtcctggcggctctttgccctcttccaacatggccgccgctgcctctgtgacaggcagggtcacgtgggcagcctcgcctatgaggtcgctggggctcggccggcgattgtcccttcccggaccccgtctcgatgcggtgactgccgctgtcaacccgagcctgagcgatcatggcaacgggctcgggcggggaacgcgtggcagcggctgcagcggcggcagtttggtggcggactggggcggcggagcggcggcggcggcggcggtggcactggcactggccccggccctgagcaccatgcggcggggcagctccgagagcgagctggcggcccggtgggaggcggaggcggtggctgcggccaaagcggcggccaaagctgaggccgaggccacagcggagacggtggcggaacaggtccgcgtggacgcgggcgcggccggggaaccggagtgcaaggcaggggaggagcagcccaaggtcctggccccggccccggcgcagcccagtgcggctgaggaggggaacacccaggtccttcagcggccgccgcccacgctgcccccgtccaagccgaagccggtgcagggcctctgcccgcacgggaagccccgggacaagggccgaagctgcaagcggagctcgggccacggttccggcgagaacggctcccagcggccggtcaccgtggacagctccaaggccaggacctccctggatgccctgaagatcagcatccgccagctcaagtggaaggagttcccatttggccggcgcttgccttgtgacatctactggcatggagtttcatttcacgacaatgacatattctccggtcaagtgaacaagtttccaggcatgacggagatggtgcgtaaaattactctgagcagagcagtgagaaccatgcagaatctctttcctgaggagtacaacttctaccctcgctcatggattctgcctgacgagttccagctctttgttgctcaggttcaaatggtgaaagacgatgacccctcctggaagcccacttttatcgtgaaacctgatggtggttgtcagggtgatggaatctacctcattaaagaccccagtgacatccgcctggcagggaccctccagagcaggccagcggtggtccaggagtacatctgcaaacctctccttatcgacaagctcaagtttgatattcgtctgtatgtcttactcaagtccttagaccccttagagatttatatagccaaagacggactctctaggttttgtaccgagccatatcaggagcccacccccaaaaacctgcaccgcatctttatgcacttaaccaactattcactgaacatccacagcggcaacttcatccactcggacagtgctagcactggcagcaaaaggactttttccagcatcctttgtagactgtcttccaaaggcgttgacatcaagaaggtctggtctgacatcatctccgtggtgattaagacggtcatcgcgctgactccagagctcaaagtcttctaccagtcagacatccccacggggaggccgggccccacgtgcttccagattttaggctttgacattcttctaatgaaaaatctgaagcctatactacttgaagtaaatgcaaatcccagtatgagaatcgaacatgagcacgaactttctccaggggtgtttgaaaatgtccccagcctcgttgatgaagaagtgaaagtggctgtgatcagagacactctgcgcctcatggacccacttaagaagaaaagagagaatcagtctcagcagcttgaaaaaccattcgctggaaaggaagatgctttggacggcgagctgaccagtgctccagactgcaacgccaaccccgaagcccacctgccttccatttgcctcaagcaggtgttccccaagtacgcaaaacagttcaactacctgcgcctggtggacaggatggcaaatttgtttatccggttcctgggcatcaaggggacaatgaagttggggccaacaggctttcgtaccttcataaggagctgcaaactcagcagcagcagcctgtccatggctgccgtggacatcctctacattgacatcacacggaggtggaactccatgaccctggaccagcgggactcagggatgtgtctgcaggccttcgtagaagctttctttttcctggctcagaggaagttcaagatgctgccacttcatgagcaggtggcctcactgattgacctttgcgagtaccacctgtccctgctggatgaaaaacgcctggtgtgtggccggggcgtcccgtcggggggccggcccccacaccgtggccctccccaggagccctccccctcggcccagccagcaggggacaaccccccaccccgcaccagctgtgccaataagctctcccatcccagacataccctgtcctgagggccactctgtcctcctggaaaacggaagacgagagcagctttcagggctggagcgccccaggcattctgcctgcagaggaatggcaggcaggctgccgaggggcccagctgaggtccccacgaactgtctctgtgtgcggctgagctgtgcttcaccaggctggctggttctcacctgccttcctcctcacacctcctggtgatacaccctgtttctgagtcatcagtcatcggacatatgacatctaaaacgtgacagatggcaccttctattctgggctcacaggaagcaccaactggggcaaatctgttgtatttggggcacaggacacaatcgatcccaaggcccggagctgtggagaggaagccgagtgttaggatctgctgccggggcctccacgcgcccaccgggaaaagcctgagaacatcgtgtttatttcctgccgcccgttccgagagaaggaagtggaaatatcaagtaggcatctgcgaatctcccatcccagtcatgtgctacatgggtgtagtgaacagattaacctcatttagttcattagcttgcctgttgctgcaatatttggtttgttattaattaagaaaaaattaattaagaagtaactaagactcctggagcctcagagctggcaggagcctcag

SEQ ID NO: 924 - DNA, 1081 bp, Homo sapiens
  source 1..1081: mol_type = genomic DNA
actacttctcccccggactccttggtagtctgttagtgggagatccttgttgccgtcccttcgcctccttcaccgccgcagaccccttcaagttctagtcatgcgtgagtgcatctccatccacgttggccaggctggtgtccagattggcaatgcctgctgggagctctactgcctggaacacggcatccagcccgatggccagatgccaagtgacaagaccattgggggaggagatgattccttcaacaccttcttcagtgaaacgggtgctggcaagcatgtgccccgggcagtgtttgtagacttggaacccacagtcattgatgaagttcgcactggcacttaccgccagctcttccaccctgagcaactcatcacaggcaaggaagatgctgccaataactatgcccgagggcactacaccattggcaaggagatcattgacctcgtgttggaccgaattcgcaagctgaaatcattctttgcaactaaaccccgcatccacttccctctggccacatatgcccctgtcatctctgctgagaaagcctaccacgaacagcttactgtagcagagatcaccaatgcttgctttgagccagccaaccagatggtgaaatgtgaccctcgccatggtaaatacatggcttgctgcctgttataccgtggtgacgtggttcccaaagatgtcaatgctgccattgccaccatcaaaaccaagcgtaccatccagtttgtggattggtgccccactggcttcaaggttggcattaattaccagcctcccactgtggtgcctggcggagacctggccaaggtacagagagctgtgtgcatgctgagcaataccacagctgttgccgaggcctgggctcgcctggaccacaagtttgacctgatgcccttgagaaggattatgaggaggttggagcagatagtgctgacggagaggatgagggtgaagagtattaacctgtgtgctgtacttttacactcctttgtcttggaactgtcttatttttgttctgtaaatgtctattgccgtaaattgttaataaaattgaagtttccattttaa

SEQ ID NO: 925 - DNA, 2103 bp, Homo sapiens
  source 1..2103: mol_type = genomic DNA
gcagcggaagccggaagcggcgagcggggtcgttctgggcctaggggaggcgggccgagggcgtctgagctgaggcccgcgtcgatcctgggttggaggaggtggcggccgctgaggctgcggcgtgaagacggcgggcatggtggggcgggagaaagagctctctatacactttgttcccgggagctgtcggctggtggaggaggaagttaacatccctaataggagggttctggttactggtgccactgggcttcttggcagagctgtacacaaagaatttcagcagaataattggcatgcagttggctgtggtttcagaagagcaagaccaaaatttgaacaggttaatctgttggattctaatgcagttcatcacatcattcatgattttcagccccatgttatagtacattgtgcagcagagagaagaccagatgttgtagaaaatcagccagatgctgcctctcaacttaatgtggatgcttctgggaatttagcaaaggaagcagctgctgttggagcatttctcatctacattagctcagattatgtatttgatggaacaaatccaccttacagagaggaagacataccagctcccctaaatttgtatggcaaaacaaaattagatggagaaaaggctgtcctggagaacaatctaggagctgctgttttgaggattcctattctgtatggggaagttgaaaagctcgaagaaagtgctgtgactgttatgtttgataaagtgcagttcagcaacaagtcagcaaacatggatcactggcagcagaggttccccacacatgtcaaagatgtggccactgtgtgccggcagctagcagagaagagaatgctggatccatcaattaagggaacctttcactggtctggcaatgaacagatgactaagtatgaaatggcatgtgcaattgcagatgccttcaacctccccagcagtcacttaagacctattactgacagccctgtcctaggagcacaacgtccgagaaatgctcagcttgactgctccaaattggagaccttgggcattggccaacgaacaccatttcgaattggaatcaaagaatcactttggcctttcctcattgacaagagatggagacaaacggtctttcattagtttatttgtgttgggttcttttttttttttaaatgaaaagtatagtatgtggcactttttaaagaacaaaggaaatagttttgtatgagtactttaattgtgactcttaggatctttcaggtaaatgatgctcttgcactagtgaaattgtctaaagaaactaaagggcagtcatgccctgtttgcagtaatttttctttttatcattttgtttgtcctggctaaacttggagtttgagtatagtaaattatgatccttaaatatttgagagtcaggatgaagcagatctgctgtagacttttcagatgaaattgttcattctcgtaacctccatattttcaggatttttgaagctgttgaccttttcatgttgattattttaaattgtgtgaaatagtataaaaatcattggtgttcattatttgctttgcctgagctcagatcaaaatgtttgaagaaaggaactttatttttgcaagttacgtacagtttttatgcttgagatatttcaacatgttatgtatattggaacttctacagcttgatgcctcctgcttttatagcagtttatggggagcacttgaaagagcgtgtgtacatgtattttttttctaggcaaacattgaatgcaaacgtgtatttttttaatataaatatataactgtccttttcatcccatgttgccgctaagtgatatttcatatgtgtggttatactcataataatgggccttgtaagtcttttcaccattcatgaataataataaatatgtactgctggcatgtaatgcttagttttcttgtatttacttctttttttaaatgtaaggaccaaacttctaaactaattgttcttttgttgctttaatttttaaaaattacattcttctgatgtaacatgtgatacatacaaaagaatatagtttaatatgtattgaaataaaacacaataaaattaa

SEQ ID NO: 926 - DNA, 752 bp, Homo sapiens
  source 1..752: mol_type = genomic DNA
gccaaccggctcccacatatctgcacacacttaaatacaaaggccgggaagggtcagaccaccatccgggtactctaagtcctccctcccccttctccttcacccccaagtgtctcccacgactgccctccccgacctctagctgaccatggcatcagaggcagaaaaaacattccatcggtttgctgcgtttggagaatcatcaagcagtggcactgaaatgaacaacaagaacttctccaagctgtgcaaagactgtggcatcatggatggcaagacagtcacctccacggacgtggacatcgtgttcagcaaagtcaaggccaagaacgcccgaaccatcacgtttcaacagttcaaagaggcagtgaaggaactgggccagaagcgcttcaaagggaagagtccagatgaagtcctggagaacatttatggactcatggagggcaaagacccagccaccactggcgctactaaagcaacaacagtgggtgcagtggaccgtttgacagacaccagcaagtacaccggcacccacaaggagcgctttgatgagagtggcaagggcaagggcattgcgggacgggaagagatgactgacaacacaggctatgtgagtggttacaagggttctggcacctacgataagaagaccaagtagagaggagcttcatctcagcctgctagccccctgaccctgcatgtttaacaccagggagcttggaaaacaataaacatctgtgtgtgcagca

SEQ ID NO: 927 - DNA, 4024 bp, Homo sapiens
  source 1..4024: mol_type = genomic DNA
caggagggatggactcctggactctccagctacctgcgtggtcctccccggtgtgaggacagaagaccggtcctgggccgggcccgcatccagccctaccgccggtgtctgaggtgagggctccgtcagcggaaaacgctcgacaacggaggggcaggcagggccgggggcgtggtcaacgcgggccccgccccccgggctctacccccgagcgtacgcgcgcgcctgaagcagccaaccaggaagcgcagagcaggttcaaacacagacggcgggtgaacatggcgtcctcgacttggtctgagacgtgataggcctgccttctggttgaagatgtggcgagtgaaaaaactgagcctcagcctgtcgccttcgccccagacgggaaaaccatctatgagaactcctctccgtgaacttaccctgcagcccggtgccctcaccaactctggaaaaagatcccccgcttgctcctcgctgaccccatcactgtgcaagctggggctgcaggaaggcagcaacaactcatctccagtggattttgtaaataacaagaggacagacttatcttcagaacatttcagtcattcctcaaagtggctagaaacttgtcagcatgaatcagatgagcagcctctagatccaattccccaaattagctctactcctaaaacgtctgaggaagcagtagacccactgggcaattatatggttaaaaccatcgtccttgtaccatctccactggggcagcaacaagacatgatatttgaggcccgtttagataccatggcagagacaaacagcatatctttaaatggacctttgagaacagacgatctggtgagagaggaggtggcaccctgcatgggagacaggttttcagaagttgctgctgtatctgagaaacctatctttcaggaatctccgtcccatctcttagaggagtctccaccaaatccctgttctgaacaactacattgctccaaggaaagcctgagcagtagaactgaggctgtgcgtgaggacttagtaccttctgaaagtaacgccttcttgccttcctctgttctctggctttccccttcaactgccttggcagcagatttccgtgtcaatcatgtggacccagaggaggaaattgtagagcatggagctatggaggaaagagaaatgaggtttcccacacatcctaaggagtctgaaacagaagatcaagcacttgtctcaagtgtggaagatattctgtccacatgcctgacaccaaatctagtagaaatggaatcccaagaagctccaggcccagcagtagaagatgttggtaggattcttggctctgatacagagtcttggatgtccccactggcctggctggaaaaaggtgtaaatacctccgtcatgctggaaaatctccgccaaagcttatcccttccctcgatgcttcgggatgctgcaattggcactacccctttctctacttgctcggtggggacttggtttactccttcagcaccacaggaaaagagtacaaacacatcccagacaggcctggttggcaccaagcacagtacttctgagacagagcagctcctgtgtggccggcctccagatctgactgccttgtctcgacatgacttggaagataacctgctgagctctcttgtcattctggaggttctctcccgccagcttcgggactggaagagccagctggctgtccctcacccagaaacccaggacagtagcacacagactgacacatctcacagtgggataactaataaacttcagcatcttaaggagagccatgagatgggacaggccctacagcaggccagaaatgtcatgcaatcatgggtgcttatctctaaagagctgatatccttgcttcacctatccctgttgcatttagaagaagataagactactgtgagtcaggagtctcggcgtgcagaaacattggtctgttgctgttttgatttgctgaagaaattgagggcaaagctccagagcctcaaagcagaaagggaggaggcaaggcacagagaggaaatggctctcagaggcaaggatgcggcagagatagtgttggaggctttctgtgcacacgccagccagcgcatcagccagctggaacaggacctagcatccatgcgggaattcagaggccttctgaaggatgcccagacccaactggtagggcttcatgccaagcaagaagagctggttcagcagacagtgagtcttacttctaccttgcaacaagactggaggtccatgcaactggattatacaacatggacagctttgctgagtcggtcccgacaactcacagagaaactcacagtcaagagccagcaagccctgcaggaacgtgatgtggcaattgaggaaaagcaggaggtttctagggtgctggaacaagtctctgcccagttagaggagtgcaaaggccaaacagaacaactggagttggaaaacagtcgtctagcaacagatctccgggctcagttgcagattctggccaacatggacagccagctaaaagagctacagagtcagcatacccattgtgcccaggacctggctatgaaggatgagttactctgccagcttacccagagcaatgaggagcaggctgctcaatggcaaaaggaagagatggcactaaaacacatgcaggcagaactgcagcagcaacaagctgtcctggccaaagaggtgcgggacctgaaagagaccttggagtttgcagaccaggagaatcaggttgctcacctggagctgggtcaggttgagtgtcaattgaaaaccacactggaagtgctccgggagcgcagcttgcagtgtgagaacctcaaggacactgtagagaacctaacggctaaactggccagcaccatagcagataaccaggagcaagatctggagaaaacacggcagtactctcaaaagctagggctgctgactgagcaactacagagcctgactctctttctacagacaaaactaaaggagaagactgaacaagagacccttctgctgagtacagcctgtcctcccacccaggaacaccctctgcctaatgacaggaccttcctgggaagcatcttgacagcagtggcagatgaagagccagaatcaactcctgtgcccttgcttggaagtgacaagagtgctttcacccgagtagcatcaatggtttcccttcagcccgcagagaccccaggcatggaggagagcctggcagaaatgagtattatgactactgagcttcagagtctttgttccctgctacaagagtctaaagaagaagccatcaggactctgcagcgaaaaatttgtgagctgcaagctaggctgcaggcccaggaagaacagcatcaggaagtccagaaggcaaaagaagcagacatagagaagctgaaccaggccttgtgcttgcgctacaagaatgaaaaggagctccaggaagtgatacagcagcagaatgagaagatcctagaacagatagacaagagtggcgagctcataagccttagagaggaggtgacccaccttacccgctcacttcggcgtgcggagacagagaccaaagtgctccaggaggccctggcaggccagctggactccaactgccagcctatggccaccaattggatccaggagaaagtgtggctctctcaggaggtggacaaactgagagtgatgttcctggagatgaaaaatgagaaggaaaaactcatgatcaagttccagagccatagaaatatcctagaggagaaccttcggcgctctgacaaggagttagaaaaactagatgacattgttcagcatatttataagaccctgctctctattccagaggtggtgaggggatgcaaagaactacagggattgctggaatttctgagctaagaaactgaaagccagaatctgcttcacctctttttacctgcaatacccccttaccccaataccaagaccaactggcatagagccaactgagataaatgctatttaaata

SEQ ID NO: 928 - DNA, 11292 bp, Homo sapiens
  source 1..11292: mol_type = genomic DNA
cgccccccctgcgcccgcccctcccccttcgctttccttctccccccgcctcggctccgacatgaggggccggcggggcaggccgcccaagcagcccgcggctcccgctgcggagcgctgcgccccggccccgccgccaccgccgccgccgcccacgtccggacccatcggggggctccgctcgcggcaccgcggcagcagccggggcaggtgggccgccgcccaggctgaggtggcgcccaagacgcggctgagctcgcccagggggggcagcagtagccggaggaagccgccgccgccgccgccggccccccccagcaccagcgccccgggccggggggggcgaggaggcgggggcggcaggacggggggcgggggcggcggcggccacctggcccggaccaccgcggcccggagggccgtcaacaaagtggtgtacgatgaccacgagagcgaggaggaggaggaagaggaggacatggtctccgaggaggaggaggaggaggacggcgacgccgaggagacccaggattctgaggacgacgaggaggatgagatggaagaggacgacgatgactccgattatccggaggagatggaagacgacgacgacgacgccagttactgcacggaaagcagcttcaggagccatagtacctacagcagcactccaggtaggcgaaaaccaagagtacatcggcctcgttctcctatattggaagaaaaagacatcccgccccttgaatttcccaagtcctctgaggatttaatggtgcctaatgagcatataatgaatgtcattgccatttacgaggtactgcggaactttggcactgttttgagattatctccttttcgctttgaggacttttgtgcagctctggtgagccaagagcagtgcacactcatggcagagatgcatgttgtgcttttgaaagcagttctgcgtgaagaagacacttccaatactacctttggacctgctgatctgaaagatagcgttaattccacactgtatttcatagatgggatgacgtggccagaggtgctgcgggtgtactgtgagagtgataaggagtaccatcacgttcttccttaccaagaggcagaggactacccatatggaccagtagagaacaagatcaaagttctacagtttctagtcgatcagtttcttacaacaaatattgctcgagaggaattgatgtctgaaggggtgatacagtatgatgaccattgtagggtttgtcacaaacttggggatttgctttgctgtgagacatgttcagcagtataccatttggaatgtgtgaagccacctcttgaggaggtgccagaggacgagtggcagtgtgaagtctgtgtagcacacaaggtgcctggtgtgactgactgtgttgctgaaatccaaaaaaataaaccatatattcgacatgaacctattggatatgatagaagtcggaggaaatactggttcttgaaccgaagactcataatagaagaagatacagaaaatgaaaatgaaaagaaaatttggtattacagcacaaaggtccaacttgcagaattaattgactgtctagacaaagattattgggaagcagaactctgcaaaattctagaagaaatgcgtgaagaaatccaccgacacatggacataactgaagacctgaccaataaggctcggggcagtaacaaatcctttctggcggcagctaatgaagaaattttggaatccataagagccaaaaagggagacattgataatgttaaaagcccagaagaaacagaaaaagacaagaatgagactgagaatgactctaaagatgctgagaaaaacagagaagaatttgaagaccagtcccttgaaaaagacagtgacgacaaaacaccagatgatgaccctgagcaaggaaaatctgaggagccaacagaagttggggataaaggtaactctgtgtcagcaaatcttggcgacaacacaacaaatgcaacttcagaagagactagtccctctgaagggaggagccctgtggggtgtctctcagaaacccccgatagcagcaacatggcagagaagaaggtggcatctgagctcccccaggatgtgccagaagaacctaacaagacatgtgagagcagtaacactagtgctaccactacctccatccagcctaatctggaaaacagtaacagcagcagtgaactaaattcttcccagagtgaatctgctaaggcagctgatgatcctgaaaatggagaaagagaatctcatacacctgtctctattcaggaagagatagtaggtgatttcaaatcggagaagtccaacggggagctaagtgaatctcctggagctggaaaaggagcatctggctcaactcgaatcatcaccagattgcggaatccagatagcaaacttagtcagctgaagagccagcaggtggcagccgctgcacatgaagcaaataaattatttaaggagggcaaagaggtactggtagttaactctcaaggagaaatttcacggttgagcaccaaaaaggaagtgatcatgaaaggaaatatcaacaattattttaaattgggtcaagaagggaagtatcgcgtctaccacaatcaatactccaccaattcatttgctttgaataagcaccagcacagagaagaccatgataagagaaggcatcttgcacataagttctgtctgactccagcaggagagttcaaatggaacggttctgtccatgggtccaaagttcttaccatatctactctgagactgactatcacccaattagaaaacaacatcccttcatcctttcttcatcccaactgggcatcacatagggcaaattggatcaaggcagttcagatgtgtagcaaacccagagaatttgcattggctttagccattttggagtgtgcagttaaaccagttgtgatgctaccaatatggcgagaatctttaggacataccaggttacaccggatgacatcaattgaaagagaagaaaaggagaaagtcaaaaaaaaagagaagaaacaggaagaagaagaaacgatgcagcaagcgacatgggtaaaatacacatttccagttaagcatcaggtttggaaacaaaaaggtgaagagtacagagtgacaggatatggtggttggagctggattagtaaaactcatgtttataggtttgttcctaaattgccaggcaatactaatgtgaattacagaaagtcgttagaaggaaccaaaaataatatggatgaaaatatggatgagtcagataaaagaaaatgttcacgaagtccaaaaaaaataaaaatagagcctgattctgaaaaagatgaggtaaaaggttcagatgctgcaaaaggagcagaccaaaatgaaatggatatctcaaagattactgagaagaaggaccaagatgtgaaggagctcttagattctgacagtgataaaccctgcaaggaagaaccaatggaagtagacgatgacatgaaaacagagtcacatgtaaattgtcaggagagttctcaagtagatgtggtcaatgttagtgagggttttcatctaaggactagttacaaaaagaaaacaaaatcatccaaactagatggacttcttgaaaggagaattaaacagtttacactggaagaaaaacagcgactcgaaaaaatcaagttggagggtggaattaagggtataggaaagacttctacaaattcttcaaaaaatctctctgaatcaccagtaataacgaaagcaaaagaagggtgtcagagtgactcgatgagacaagaacagagcccaaatgcaaataatgatcaacctgaggacttgattcagggatgttcagaaagtgattcctcagttcttagaatgagtgatcctagtcataccacaaacaaactttatccaaaagatcgagtgttagatgatgtctccattcggagcccagaaacaaaatgtccgaaacaaaattccattgaaaatgacatagaagaaaaagtctctgaccttgccagtagaggccaggaacccagtaagagtaaaacaaaaggaaatgattttttcatcgatgactctaaactagccagtgcagatgatattggtactttgatctgtaagaacaaaaaaccgctcatacaggaggaaagtgacaccattgtttcttcttccaagagtgctttacattcatcagtgcctaaaagtaccaatgacagagatgccacacctctgtcaagagcaatggactttgaaggaaaactgggatgtgactctgaatctaatagcactttggaaaatagttctgataccgtgtctattcaggatagcagtgaagaagatatgattgttcagaatagcaatgaaagcatttctgaacagttcagaactcgagaacaagatgttgaagtcttggagccgttaaagtgtgagttggtttctggtgagtccactggaaactgtgaggacaggctgccggtcaaggggactgaagcaaatggtaaaaaaccaagtcagcagaagaaattagaggagagaccagttaataaatgtagtgatcaaataaagctaaaaaataccactgacaaaaagaataatgaaaatcgagagtctgaaaagaaaggacagagaacaagtacatttcaaataaatggaaaagataataaacccaaaatatatttgaaaggtgaatgcttgaaagaaatttctgagagtagagtagtaagtggtaatgttgaaccaaaggttaataatataaataaaataatccctgagaatgatattaaatcattgactgttaaagaatctgctataaggccattcattaatggtgatgtcatcatggaagattttaatgaaagaaacagctccgaaacaaaatcgcatttgctgagttcttcagatgctgaaggtaactaccgagatagccttgagaccctgccatcaaccaaagagtctgacagtacacagacgaccacaccctcagcatcttgtccagaaagcaattcagttaatcaggtagaagatatggaaatagaaacctcagaagttaagaaagttacttcatcacctattacttctgaagaggaatctaatctcagtaatgactttattgatgaaaatggtctgcccatcaacaaaaatgaaaatgtcaatggagaatctaaaagaaaaaccgtcatcacagaagtcaccacgatgacctccacagtggccacagaatcaaaaactgtgatcaaggtagaaaaaggcgataagcaaactgtggtttcttccacagaaaattgtgcaaaatccactgtcacaaccaccactacaacagtgaccaagctttccacaccctccacaggcggcagtgtggacatcatctctgtaaaggagcagagcaaaaccgtggtcaccacgacagtgacagactccctgaccaccacgggaggcacactggttacatctatgactgtgagcaaagagtattccacacgagacaaagtgaaactgatgaaattttcaagaccaaagaagactcgttcaggtacagctctgccatcctatagaaaatttgttaccaagagcagcaagaagagcatttttgttttgcctaatgatgacttaaaaaagttggcccgaaaaggaggaatccgagaggtcccttattttaattacaatgcaaaacctgctttggatatatggccatatccttctcctagaccgacctttggcatcacttggaggtatagacttcagacagtaaagtccttagctggagtgagcctgatgttacggttactgtgggcaagtttgagatgggatgatatggcggccaaggctcctccaggaggagggactacacggacagaaacatccgaaactgaaatcacaacaacagaaataattaagaggagagatgttggtccttatggcattcgatctgaatattgtatcaggaaaatcatttgtcccattggagttccagaaacaccaaaagaaacgcctacacctcagaggaaaggccttcgatcaagtgcactgcggccaaagagaccagaaacgcccaagcaaactggccctgttattattgaaacctgggtagcagaagaagaactggaattgtgggagatcagggcatttgctgagagagtggagaaagaaaaggcacaagcagttgagcaacaggctaagaaacgactggagcagcagaagccgacagtgattgcaacttccactacttccccaacaagcagtacaaccagcaccatctctccagcacagaaggttatggtggcccccataagtggctcagttacaactggaaccaaaatggtactaactactaaagttggatctccagctacagtaacattccaacaaaacaagaactttcatcaaacctttgctacatgggttaagcaaggccagtcaaattcaggcgttgttcaagtacagcagaaagtcctgggtatcattccatcaagtacaggtaccagtcagcaaacctttacttcattccagcccaggacagcaacagtcacaattaggcccaatacctcaggctctggaggaaccacaagcaattcacaagtaatcacagggcctcagattcgccctggtatgaccgtgattagaacaccactccaacagtcaacactaggaaaggcaattattcgaacacctgtgatggtacagccaggtgctcctcagcaagtgatgactcaaatcatcagggggcagcctgtctccactgcagtctccgcccctaacacggtttcctcaacacctgggcagaaaagcttaacttcagcaacgtccacttcaaatatacagtcttcagcctcacaaccccctcgcccccaacaaggacaagtgaagctcaccatggctcaacttactcagttaacacagggccacggtggcaatcaaggtttgacagtagtaattcaaggacaaggtcaaactactggacagttgcagttgatacctcaaggggtgactgtactcccaggcccaggccagcagctaatgcaagctgcaatgccaaatggtactgttcagcgattcctctttaccccattggcaacaacagccaccacagccagcaccaccaccaccactgtttccacgacagcagcaggtacaggtgaacaaaggcagagtaaactgtcaccccagatgcaggtacatcaagacaaaaccctgccaccagctcagtcatcaagtgtgggtccagcagaagcccagccacagactgctcagccttcagctcagccccagccccaaacccagccccagtccccagctcagcctgaagttcagactcagcctgaagttcagacccaaacaactgtttcatcccatgtcccttctgaagcacaacccacccacgcacagtcatccaagccccaagttgcagcacagtctcagcctcaaagtaatgtccaaggacagtctcctgttcgtgtccaaagtccatcacagactcgaatacgtccatcaactccatcccaactgtctcctggacaacaatcccaggttcagactacaacctcacaaccgattccaattcaaccacatacatctcttcagataccttcccaaggccagccacagtcacaaccccaggtacagtcttcaactcaaactctttcatcaggacaaactttaaatcaagttactgtttcatccccatcccgtcctcagctacaaatacagcagccacagccccaagtcattgctgtgcctcagctgcaacaacaagtccaggttctctctcagatccagtcacaggttgtggctcagatacaggctcagcaaagtggtgtgccccagcaaatcaaactccagttacctatccaaattcagcaaagcagtgctgtgcagactcaccagattcagaatgtggttacagtgcaggcagccagtgtgcaagagcagttgcaaagggttcagcaactcagggatcagcagcaaaagaagaaacagcaacagatagaaattaagcgtgaacacaccctccaagcttctaatcaaagtgaaatcattcagaaacaggtggtgatgaagcataatgctgtaatagaacatttaaaacagaaaaagagcatgactccagctgaaagagaagagaatcaaagaatgattgtctgtaaccaggtgatgaagtatattttggataagatagataaagaagaaaaacaggcagcaaaaaaacggaagcgtgaagagagtgtggagcagaaacgtagcaagcagaatgccactaagctgtcagctctgctcttcaagcacaaagagcagctcagagccgagatcctgaagaagagagcactcctggacaaggatctgcaaattgaagtgcaggaagagctgaagagagacctgaaaattaagaaagaaaaagacctgatgcagttggctcaggccacagcagtagctgcaccctgccccccagtgacaccagctcctccagcccctccagcccctccaccttcacctccccctccacctgctgtgcaacacacaggccttctgtccacgcccaccttacctgctgcttcccagaagaggaagcgggaagaggaaaaagactccagctcaaagtccaagaaaaagaaaatgatctctactacctcaaaggaaactaagaaggacacaaagctttactgtatctgtaaaacgccttatgatgaatctaaattttatattggctgtgatcggtgtcagaattggtaccatgggcgctgcgttggcatcttgcaaagtgaggcagagctcattgatgagtatgtctgtccacagtgccagtcaacagaggatgccatgacagtgctcacgccactaacagagaaggattatgaggggttgaagagggtgctccgttccttacaggcccataagatggcctggcctttccttgaaccagtagaccctaatgatgcaccagattattatggtgttattaaggaacctatggaccttgccaccatggaagaaagagtacaaagacgatattatgaaaagctgacggaatttgtggcagatatgaccaaaatttttgataactgtcgttactacaatccaagtgactccccattttaccagtgtgcagaagttctcgaatcattctttgtacagaaattgaaaggcttcaaagctagcaggtctcataacaacaaactgcagtctacagcttcttaaagttcagcgtgttaacctaacataaaacacagcaagaatctggttgtctgaactattttaaattaaggagccagatgtttttagtcaggctatcctgacaagacttgacctaaacttcgtttttattggtcataacagtccaattatattcttggccaattttgtccaacggacaagaaaaaagcaaagtcaacgacaccattatcttgtcaagatcagatggttttactattgtggcagaagcgagaaaactttgtttattgaaaaaaaaagaaaaagaaagcaagaaaaaaagatactatggggtcaagtgtaactccatggaaatgccacgtctgctcttcagtgaagaagctggtttagagtctcacagaaaacttttgactgtatttatttattgttgcaaaaaagacgcttttttattgctgccctcatttgtcagctaattattttttcttataaaatccagccccggttacatataatcatctgtatcttatcatgattcctgtaggtaaaagtacaagacgacctctagatgtcttttctttctatgaaaggagctgctatgtacacatgtgcacacacacacaactgggaatcaacaatgagtttattgttcatggtagattaaaattaagcttgcataaaggttgggctaagtggtcctggactacagactctgttgccttgaatataacagtacaatttgtcaattactctgcaccaggctaaaatgagtaaaatctatttgaaggtatcttgtttgtaaacatttgtcagattctaatttttttcttttgtattaaaattcaactatggatgtatatgaaacaaaataaatggagataatttttctcccacagacagaggtgtctttgaatgtgcgctaatgattatctgtaagcctttgtggggagggaggcctgcaaggtcatgaaaggcagaagagtctaattgtgcctggatttctccaggacagcagtggcccctcgttttatcattcccagtccattgtcatcacgtcagagaaaaatcttcaggggtgctaatcctgttgcatcagttgatcatactaacgagaacggtaatgcgacaagatacacattgccttcatctgtacattctgtgataccaggcaaattaccaattacacacagctacttatattttatgaagggcattttttagatgacctcatcctctgtgttatttgttgattgggtttgttttctgtttgttggtttgtttgtttcttccacgtaaggaaaagtagtgtaaacagtagcgagaaaatggaaaccacagaggaagatgtattttgcatgtttttcctttcagtgttcttacacgttgtatcactgcattgtggtaatagcttctataaaatctgccatagttggattatgcagctttgcaaaaatttttactagattttgcactaactcatattagctttgtcctaccaacttctggaatttatctaattattgtttttcaaagtttctttccttttaatgtttccctgctatgcaaaacctttcccagacctcagtttcttaaaagaaagatgttgctacagttcccgattctttcttattacaggctcaggtgtacaggttattctgggttaattttatctaatgaagcccattcctttttgtacataaagatgtcacttaaacttatgcttacaaactaaagactaatcgctcaatatgaaaacatgaaaaaatttttgcttaaagtattaagatggaagtagttaaatatgggttattttgtccttttacttttttaaaaaatgttacatattgtatgcactgtgctgatgcaagaattctacattttaatgagttataaaattattctgcatctcatcacgtcacagtatttctgtactatttattcatatatataaatatatatgggcttaatcatttaaaatttgttgcagcaagaactttcctacctgtaggcaatagattgctatgtttttaacaaattgtggcaaattctaaacagcaattcttttgtacgtaataggacatttcatcctagaaaaataaagtaatgtttttgacattgga

SEQ ID NO: 929 - DNA, 2461 bp, Homo sapiens
  source 1..2461: mol_type = genomic DNA
gcgcgcagtttcccgcatgctcagtagctgaggtagggatgccatccttctcaaaagacttattgacagtgccaaagctcggtactggacacaacgagggacctgggtctacgataacgcgcttttgctcctcctgaagtgtctttggtccaacgttgttccagagtgtaccatggcttccagtaacactgtgttgatgcggttggtagcctccgcatattctattgctcaaaaggcaggaatgatagtcagacgtgttattgctgaaggagacctgggtattgtggagaagacctgtgcaacagacctgcagaccaaagctgaccgattggcacagatgagcatatgttcttcattggcccggaaattccccaaactcacaattataggggaagaggatctgccttctgaggaagtggatcaagagctgattgaagacagtcagtgggaagaaatactgaagcaaccatgcccatcgcagtacagtgctattaaagaagaagatctcgtggtctgggttgatcctctggatggaaccaaggaatataccgaaggtcttcttgacaatgtaacagttcttattggaattgcttatgaaggaaaagccatagcaggagttattaaccagccatattacaactatgaggcaggaccagatgctgtgttggggaggacaatctggggagttttaggtttaggcgcctttgggtttcagctgaaagaagtccctgctgggaaacacattatcacaactactcgatcccatagcaacaagttggttactgactgtgttgctgctatgaaccccgatgctgtgctgcgagtaggaggagcaggaaataagattattcagctgattgaaggcaaagcctctgcttatgtatttgcaagtcctggttgtaagaagtgggatacttgtgctccagaagttattttacatgctgtgggaggcaagttaaccgatatccatgggaatgttcttcagtaccacaaggatgtgaagcatatgaactctgcaggagtcctggccacactgaggaattatgactactatgcaagccgagttccagaatctattaaaaatgcacttgttccttaaaggaaagtttcatttggccgggcgcggtggctcatgcctgtaatcccagcactttgggaggccgaggcaggtggatcacttgagctcaggagtttgagaccagcctgggcaatatcgtgagaccccatctctacaaaaatacaaattaactgggcatcctgtcatgcgcctgtcatcccagctacttgagaggctgaagcagaagaatctcttgagcccggaaggcagaggttgcagtgagctgagatcgtgccactgcactccagcctgagtgacaggagttaagccctgtctcagaaaaaaaaaaaacaaaaacccaaaaagtacttaaagtttcatttacttagctaggagaaagacttggttctcaaaataatacattttaagattaattgggtagaattagagttccacctttattcattgttgagcagtgatttatatttagttattatatttaggaatagaaaatagaattaaataatttaacttgattaatcaaccagaccaattttgacgtctggagaacttataaactcaatatgttatatttgttttcctgtatttaggtggagaaatgagaaaaagctttagttccaattgacagttcaggtcaatgttcaatgaacattcctatcttctaaaccagatttctctttttttttcctgagacggagtctcgctctgtagcctaggctagaatgtagtggcgtgatctcggctcactgcaagctccgcctcccgggttcatgccattctcctgcctcagcctcccgagtagctgggactgcaggcaccgccaccacgcctggctaattttttgtatttttagtagagaaggtgtttcaccgtgttagccaggatggtcttgatctcctgacatcgtgatctgtctgcctcggactcccaaagtgctgggattacaggtgtgagccaccgcacctggcctaaaccagatttctttagggcacaattttttctggaatctcactcttgtttttcacagtaattttaaaaacgtttctactccaattaagaatatatatgatgttattatatatgcttatgaaacagatttatgagaaaagttttttttaaataaattatttaatcctagctctttgttattcaccagctttttaaaaaagtgtttgaaaattatacattctcgactttggggattagtttattcttgtggcatcattataaggcttaattgtggaaagctaagtacttgcttctattccttccaatgagagattataacataaactattaaaattattctgctaatatacctagatttttatttttaggtctctgtccattgcttttaattaaaattatctgttttcaaatcaa

SEQ ID NO: 930 - DNA, 1964 bp, Homo sapiens
  source 1..1964: mol_type = genomic DNA
cctctggagtccctgtggcagaactcaaatggaaggaggagcagctgcacccaggggagcagggtgtcacctccgttggatagagccggccaggttgcagcgcggacacactcgcaggtcgctgtggccccagcctcgcctgacagaatgagcggctcggacgggggactggaggaggagccagagctcagcatcaccctcacgctgcggatgctgatgcacgggaaggaagtgggcagcatcatcgggaagaagggcgagactgtaaagcgaatccgggagcagagcagtgcccggatcaccatctccgagggctcctgccctgaacgcatcaccaccatcaccgggtctacagcagctgtcttccatgcagtctccatgattgctttcaaactggatgaggacctttgtgctgctcctgcaaatggtggaaatgtctccaggcctccagtgaccctgcgccttgtcatccctgccagtcagtgtggctcactgattgggaaggctggcaccaagatcaaggagatccgagagactacgggtgcccaggtacaggtggcaggggacctgctccccaactccacagagcgagctgttacggtatctggggtgcctgatgccatcatcctgtgtgtgcgccagatctgcgctgttatcctggagtccccacccaaaggagccactatcccctaccatccgagcctctccctaggtactgttcttctctctgccaaccagggcttctctgtccagggtcagtatggggctgtgaccccagctgaggtcaccaagctccagcagctctcaagccatgcggtcccctttgccacacccagcgtggtgccaggactggatcccggcacacagaccagctcacaggagttcttggttcccaacgatttgattggctgtgtgatcgggcgccagggcagcaagatcagcgagatccggcagatgtcaggggcacatatcaagatcgggaaccaagcagagggcgctggggagcggcatgtcaccatcactggctctccggtctccatcgccctggcccagtacctcatcactgcctgtctagagacggccaagtctacctctggggggacgcccagctcggcccccgcagacctgcctgcccccttctcgccacccctgacggccctgcccacagctccccctggcctgctgggcacaccctatgccatctccctctccaacttcatcggcctcaagcccatgcccttcttggctttaccacctgcttccccagggccgccgccgggcttggcggcctacactgccaagatggcagcagctaatgggagcaagaaggctgagcggcagaaattctccccctactgaggccagctgaggtacaggcaggggcaggcaggaccaccagcagggggctgcctctgcaccctacccgcccaaggagactccaccctggggtcccaaacgccgctaacgcccagacgcatggatgcaccccctaccctgcctccatctatgggagttctttctctcagagtgggggcagtttctggcccaggggtctgagctgcggcagccccagggcagggggccctacctcctcagctctgtgcttggatacagggagcagccaggagactccctagtgcccccaccatggcgggtgtcactcacgcactccccatcccttagggcttcctggcctactgcatccttgtgggagtcagggaggagggcccgttgggtagctggggccaggcttctctccccaccacctgcagatttcttgctgcttccactgatacccttttgactggaatgaactggctgggcttgtcagggggcaccccaaagagggggcactgccaggtagctgggggagtggcatggggcaggggcccagttctcagcagcagacactctgtacagttttttcaatccctgtttttgaataaatattctcagcgaccagg

SEQ ID NO: 931 - DNA, 716 bp, Homo sapiens
  source 1..716: mol_type = genomic DNA
tttccggttagcgcggcgtgagaagccatgagcagcaaagtctctcgcgacaccctgtacgaggcggtgcgggaagtcctgcacgggaaccagcgcaagcgccgcaagttcctggagacggtggagttgcagatcagcttgaagaactatgatccccagaaggacaagcgcttctcgggcaccgtcaggcttaagtccactccccgccctaagttctctgtgtgtgtcctgggggaccagcagcactgtgacgaggctaaggccgtggatatcccccacatggacatcgaggcgctgaaaaaactcaacaagaataaaaaactggtcaagaagctggccaagaagtatgatgcgtttttggcctcagagtctctgatcaagcagattccacgaatcctcggcccaggtttaaataaggcaggaaagttcccttccctgctcacacacaacgaaaacatggtggccaaagtggatgaggtgaagtccacaatcaagttccaaatgaagaaggtgttatgtctggctgtagctgttggtcacgtgaagatgacagacgatgagcttgtgtataacattcacctggctgtcaacttcttggtgtcattgctcaagaaaaactggcagaatgtccgggccttatatatcaagagcaccatgggcaagccccagcgcctatattaaggcacatttgaataaattctattaccagttccctc

SEQ ID NO: 932 - DNA, 6455 bp, Homo sapiens
  source 1..6455: mol_type = genomic DNA
ccccccacggtcccgccccttcctaccttccagtagccggcggcggtgtctcaggcggcaatggaaggatccgagcctgtggccgcccatcagggggaagaggcgtcctgttcttcctgggggactggcagcacaaataaaaatttgcccattatgtcaacagcatctgtggaaatcgatgatgcattgtatagtcgacagaggtacgttcttggagacacagcaatgcagaagatggccaagtcccatgttttcttaagtgggatgggtggtcttggtttggaaattgcaaagaatcttgttcttgcagggattaaggcagttacaattcatgatacagaaaaatgccaagcatgggatctaggaaccaacttctttctcagtgaagatgatgttgttaataagagaaacagggctgaagctgtacttaaacatattgcagaactaaatccatacgttcatgtcacatcatcttctgttcctttcaatgagaccacagatctctcctttttagataaataccagtgtgtagtattgactgagatgaaacttccattgcagaagaagatcaatgacttttgccgttctcagtgccctccaattaagtttatcagtgcagatgtacatggaatttggtcaaggttattttgtgatttcggtgatgaatttgaagttttagatacaacaggagaagaaccaaaagaaattttcatttcaaacataacgcaagcaaatcctggcattgttacttgccttgaaaatcatcctcacaaactggagacaggacaattcctaacatttcgagaaattaatggaatgacaggtttaaatggatctatacaacaaataacggtgatatcgccattttcttttagtattggtgacaccacagaactggaaccatatttacatggaggcatagctgtccaagttaagactcctaaaacagttttttttgaatcactggagaggcagttaaaacatccaaagtgccttattgtggattttagcaaccctgaggcacctttagagattcacacagctatgcttgccttggaccagtttcaggagaaatacagtcgcaagccaaatgttggatgccaacaagattcagaagaactgttgaaactagcaacatctataagtgaaaccttggaagagaagcctgatgtaaatgctgacattgtgcattggctctcttggactgcccaaggctttttatctccacttgctgcagcagtaggaggtgttgccagccaagaagtattgaaagctgtaacaggaaaattttctcctttgtgccagtggttatatcttgaagcagcagatattgttgaatcactaggcaaacctgaatgtgaagaatttctcccacgaggagatagatatgatgccttaagagcttgcattggagacactttgtgtcagaaactgcaaaatttaaacatcttcttagtagggtgtggagccataggctgtgaaatgttgaaaaattttgctttacttggtgttggcacaagcaaagagaaaggaatgattacagttacagatcctgacttgatagagaaatccaacttaaatagacagttcctatttcgtcctcatcacatacagaaacctaaaagctacactgctgctgatgctactctgaaaataaattctcaaataaagatagatgcacacctgaacaaagtatgtccaaccactgagaccatttacaatgatgagttctatactaaacaagatgtaattattacagcattagataatgtggaagccaggagatacgtagacagtcgttgcttagcaaatctaaggcctcttttagattctggaacaatgggcactaagggacacactgaagttattgtaccgcatttgactgagtcttacaatagtcatcgggatcccccagaagaggaaataccattttgtactctaaaatcctttccagctgctattgaacataccatacagtgggcaagagataagtttgaaagttccttttcccacaaaccttcattgtttaacaaattttggcaaacctattcatctgcagaagaagtcttacagaagatacagagtggacacagtttagaaggctgttttcaagttataaagttacttagcagaagacctagaaattggtcccagtgtgtagaattagcaagattaaagtttgaaaaatattttaaccataaggctcttcagcttcttcactgtttccctctggacatacgattaaaagatggcagtttattttggcagtcaccaaagaggccaccctctccaataaaatttgatttaaatgagcctttgcacctcagtttccttcagaatgctgcaaaactatatgctacagtatattgtattccatttgcagaagaggacttatcagcagatgccctcttgaatattctttcagaagtaaagattcaggaattcaagccttccaataaggttgttcaaacagatgaaactgcaaggaaaccagaccatgttcctattagcagtgaagatgagaggaatgcaattttccaactagaaaaggctattttatctaatgaagccaccaaaagtgaccttcagatggcagtgctttcatttgaaaaagatgatgatcataatggacacatagatttcatcacagctgcatcaaatcttcgtgccaaaatgtacagcattgaaccagctgaccgtttcaaaacaaagcgcatagctggtaaaattatacctgctatagcaacaaccactgctacagtttctggcttggttgccttggagatgatcaaagtaactggtggctatccatttgaagcttacaaaaattgttttcttaacttagccattccaattgtagtatttacagagacaactgaagtaaggaaaactaaaatcagaaatggaatatcatttacaatttgggatcgatggaccgtacatggaaaagaagatttcaccctcttggatttcataaatgcagtcaaagagaagtatggaattgagccaacaatggtggtacagggagtcaaaatgctttatgttcctgtaatgcctggtcatgcaaaaagattgaagttaacaatgcataaacttgtaaaacctactactgaaaagaaatatgtggatcttactgtgtcatttgctccagacattgatggagatgaagatttgccgggacctccagtaagatactacttcagtcatgacactgattaatacaagttgtcttaacgttactccaggaccacttgattttggaaagagtgcacttaattcagaagctaaagaaaatcagttcataatactatggatttctctttcattaagccttaattttaagggaaacatcagtaagaaactgcactgaagaattataaaacattttggggcatagcatacacttgtctaacggttcacacgtggctatgatcacaagcaactttgaactggaatgctatttacaaaagttttgtgtattaatctgtgtattaatctctctggataaaaagaaggaaaaaatatgtatgaccagaacagatatggatgaagaaattgaaagcaacgaatgcaactattcaaaaagtttaattttatgaatttcttttttgtttagtcttgaagactgattttctatgcaaatagtgtttggcatcctgcacctctgatatgatttggctttgagaatttaataccactgggaagaagtatggtagtggtggatgaagggtggatattttaaattgtgcagttacagtttactgtcctattacctctgctcgtttaaccagtttgttatatcactgtgtccccaaaatcaggatttttgttgatagcatcagtgttgtaggagcaataggtcagatgagacatattaacttagactaaacgtgaacagtattatatggactctcacaacgctcttagagaatccgtgaatgtgaacagacaaatgtggctaaccatttgattcttcagtatgccttctaatgtggctattttatttatgtgagactctaaacctgattgtcctaatatataaaactaaaagattttgtaaagggagtgtctttagaaatagatgaaatgtagaatgttaaaaattattgctagggtagtcttttttttttccagaaacctaattagggtattaaattttgtgttttttttgttttttttttttaaacagaagcatgttatttcattcccattcccagaaagggagttaatgaagataaaaatttattttttaaggtctttattgagagaaactttgttttctgatatgaactattgcagatgtttttataaatactttcattaaaatgatgtaaacagtagtacccaacactgtaaactcagtgaaaatagtaaatgattcttttattactaagactgtcatgcattctgaagcagttggcttttttttaaccataggaagtaatttccctctagctcctttccttctactctcctgctcagaccattagtaggtactttgttaaataaaaaactagattaacatcaatattactccaatttggtatcttttacactatgtattatacctactttctttttatttcatttacaaatagtttaaattactttatcaaccagctgtattgtttccctcttgtaaaagtaccatcaagtggggaaaatgtatgtggaagtggagagtgaatttgtatgactaaaggataatctgtacatggggaagtgggcaaaagtggataggatgaatttaaagaaaatgactacctttggaaaaaagaaattaaattttgttcacatatcctaccctttcccattgtgcatatcccaagtgtcatatttaaaactaaggttacttaaaacagaatccaggaatatcaaggctctgtggcttggaattttagaggataggactaataaaaggacttttgcaaagaaggcttttttccacgttcactttgttttgtgttctttgaaagtaactgatacttttcgggtagttaattcagcagtccataaatatgatccagtaacttgcttatattttattgaagtctcgacagctcttcagaagtaaatttagaacgatgctgtcagttcatatttatagatattagtgttttagcagataaaacaaaatcaacaaaaattaagttcattttgtgattaaacctgcaaccatttttccattactttttttctatagttaatggttattgccatgatttcttctgtttggttctactaagctagaaagccagggtgaagttaatgataattcccattattttatttctgtaccatgagattgctgttgatgactgaaataccaggtgcaaaaattaatgatttgatttttgtacagtttcaatgagtattttttacttattaaaaataaattaagaaatgtaagaatatctttgtaaatcatgtttcataagttgactccagagattctgattttgctgtttattttgtgagtaatgttgctttggtgtttcctgattttcaagtttgcaatcatggagatacagcagttattaggtgtggaaggacattacctcaaatgtcctcagatggctccaggaaattcttttaaaacagttggagagaaatagtcgtgaccatgtaaaacctagaggatctggtaaatcccatactactggttagggatttgtaaagtccatttctttttagagttcaaagcagttctgttacttgtccataagttcctcataaattgtcccaaaggtaggacatggaaataaatgtatatctttattttttaatctactatgtcacactctggtgatattcatggaacattaaaaaagcaactatgtttattttataattagtaaaatgaagatagaaaattgttcttttgaaatttttagggaaaaaaaaaatctcgtgacctaaatctttccactataatgaatattcattgtgattgcaaatatctaattttatataatcactgtgtatggatttagcgattttacttttcatagattcaaaaacatataatctgaatgctttctctgaaaaaaaaaaaatcagagttgagctcttgaggatcagagttaagtatccattgataatatgtgttcattttgctctatgtcataactttgtttttttattgagaaatatatatttttcaaaaacacatatatattcaaaaatacataaaatataaatatgcagttcaaggaataattttaaagcaactatataactagcactcagcttagtagaatatattgacagcagttcagaaattacacatgtagttccttcccagtcacaaccagctccctgccacgtaccctttggtaattaccactatcctaccttgtatgataattgtctctttgtttttatagtgttaccacctatgtgtgtaaacttaaacaatacagtttgcttgtttttgagttttatttaaaatcata

SEQ ID NO: 933 - DNA, 7732 bp, Homo sapiens
  source 1..7732: mol_type = genomic DNA
ttcaaaccaaaacaaaaagattaaaggagcagcggccggggcggcagcggtccccaggccgggacacccggggtggtgcgcccgggttcgcgggggctgcgccggcgccggggaggcggggggagcgggagcgggcgacgcggggaaggggggagccagggggagggcgccggccggaggaggggcggacccgcccgccctagccgagcagagcacagccgagccgagcggcccgggcgggggccgaccccggccagcgtcggcgcagagagcgggcggaggcgcaggccatgctgcggctggtgcccaccggggcccgggccatcgtggacatgtcgtacgcccgccacttcctggacttccagggctccgccattccccaagccatgcagaagctggtggtgacccggctgagccccaacttccgcgaggccgtcaccctgagccgggactgcccggtgccgctccccggggacggagacctcctcgtccggaaccgatttgttggtgttaacgcatctgacatcaactattcagcaggccgctatgacccctcagttaagcctccctttgacataggtttcgaaggcattggggaggtggtggccctaggcctctctgctagtgccagatacacagttggccaagctgtggcttacatggcacctggttcttttgctgagtacacagttgtgcctgccagcattgcaactccagtgccctcagtgaaacccgagtatcttaccctgctggtaagtggcaccaccgcatacatcagcctgaaagagctcggaggactgtcggaagggaaaaaagttttggtgacagcagcagctgggggaacgggccagtttgccatgcagctttcaaagaaggcaaagtgccatgtaattggaacctgctcttctgatgaaaagtctgcttttctgaaatctcttggctgtgatcgtcctatcaactataaaactgaacccgtaggtaccgtccttaagcaggagtaccctgaaggtgtcgatgtggtctatgaatctgttgggggagccatgtttgacttggctgtagacgccctggctacgaaagggcgcttgatagtaatagggtttatctctggctaccaaactcctactggcctttcgcctgtgaaagcaggaacattgccagccaaactgctcaagaaatctgccagcgtacagggcttcttcctgaaccattacctttctaagtatcaagcagccatgagccacttgctcgagatgtgtgtgagcggagacctggtttgtgaggtggaccttggagatctgtctccagagggcaggtttactggcctggagtccatattccgtgctgtcaattatatgtacatgggaaaaaacactggaaaaattgtagttgaattacctcactctgtcaacagtaagctgtaaaaacagaacaatgacataaatcaagggagaaagaaaatgggcactttatgtctcagaattactcaaatcaatttatttttagttggtaatggatataatatttcttaaaacaaaagtaaggtgttaatgaataggtctctccttctcctcctcctcctcctcttcccttgggggaaaaaaaaaaatgtgctaataaaacttccctccatggctaagagggaaaacgcttacattcaattctttagtcatggatggtctcgttccagatgttattgttccagggaactaaattcattcctgatgccagatctgatcgagtcagtatgtcttcagcttgatcagattttaaaatcagttttgaaagtggttcccgacttctttgctttgggagaatttggtcttatgctcataagcagttcatgagtgacaagtgtagcaaaagccagccatatattttcagaatctatatcctcaggaaatggtcctttttttttctataaatcaccaaccaactatctaaatggacatttgggggaattccctcccaaatttgattttgttattagaaaaatgattccgtgaacacagatgtgttttgaagaagtagcacgtaatggcttttatctaccatcaacctgataaggcacatgtgaaatggaaatgttctctttcctctgaagcagcaaattaatgttgaaaacttacatagacagaaagtaggttttggaaagggaaaccacagagattagggggacttaaaattaatataggcacaggaaagagaaaagtgtgcgctccattctcagtgggggttcaccacaaaacacgggccccaggagggaagcgctgtctaggcacacggcaaggccttagtaacagcatgctacactgctcgaggtacggtatgtcccatcgccctgtgcaccgtagagacctcagtcatctcaaggaagaatacatttgcttctccttagaggcgttcgaactagaagctatgcgttacctctgattctggaaacagaatagcagccactcattctgcattcccatttttctctccacgtgttctggtggaatgagatgctccttggcactatagcctgatgtcccacattgacccactgaccacacaggaaaagcagcgaaacctgcaccctctcttctgagtcacgcctgtggctcatcggcttccctcttaacctttagtgccctgaagactgctgccgctgtcaccgttgcgctgaaaccccatgggcccgttctgattgaaggtgaagcccaccagattatttttcaaagtcttaggtttcggtgtatctaacctgctcagtaaatatggacgcaattaaagatgctctaggaaatttggggactgtatttaatttttctttccttccatctgaggagcaaggaaatcctactgctgaatagctgttagtatctattttacaagatttactcattttcaggtacctaatgtagctgctagcatgcatgcacaacaatacaatttatatggtaaatggaaccaaataatggcttcactgaatgttatggctgcactgaagggaaatgtcacggtaaatagctgccaaattatggatcatgccgaagtgtcacaactgcactaaagacaaatagcactagaggctattgccactgtgacgcttttgagttatgaagaagggtagcggcctgatgcgaggctctttgtgtcctcattatagcaaagggttactggtgcaggggactaggaaaaacccgtccagtgtggtgcttagttattcatccatccctttcagacctaacagccacagccacacggaaagagactttgcctcacttttacattcacaaacaaacaaaggaggggggagcaggttttatgaatgtaactgtgcacaggaaatgactggtaatggaaaaaatgttgtaataaaataatctaatcaaagaatattattaaatttaacatagtctatgtccaaaaggcttagttgcttcttatgcagatagatgtgtgaaatctaagcagtaatgtactttctccctttgtaaagacttggggagtaaggacattaccaactaaattgcttcttcgaaactgaagtgagtcccggtttgtttcattttaatgggagggtaataaagatgaaagaccaacattttaactgatggatcccttaagctacagaatagaaatttattgtgttttgagggaatatactaaatgcagctatgtaaaaataaaattcaaacgcccaggattaaaataaaatataatctgaaaacctcatgttctctctttccccaaactaagaaagtgcactgcatgctgttttcacttattcttagaaaacaagcatgaaagattccgcccattcagataatgccaaaaatatgtttaaacttttttttattcttttgaaaaatgatttgtaaattgagggtcatagttcagcatcagtttcatcttctgggattattgttcaagaccagcctctaatgggaggtgaaacggtacgatggtctcaacacctttcttctgaactgtaatacatatcacaaaaagtacatccataattcagggcaattgtcagtctttttagagaaggggccagggtggaacaatcccagtgagtaaattatttctcagcgtggacttctctgcatgtcgggcttaaggtcaccagccgggcagggtggaaggagcttgcctctttgagaaaccaaggagtcccagtgatctgttaccatttggttatgacttctaaagagccaaatgctattccttcaagcctgttttgcaggcagaaaataccagcagtgtcatttaggggttcctttgatgatgactactgctgttaactgacctcagcattaaaaaaaaaaaaattcagggaatagtttgcaaagaaatgaaggaagttttgcatgatatattctataacttgtcattatatgatttcatctggatgaagttcctcaggagtaggatagagcctctgtaaatggtcattagtattacattctgtgtttatctaatgaaagtgcagtgacaagtagctgcttcttattaaaatgaaaatcctgcattatgtacttgaggaacattccagctaatgaggatgtaatgtcctcagtacaacgcagaccttctttttgtgttcaccaccacaagatgctggaagcttgacaaatgatatcatttaagacacatgcctgccttagggacctggtttttggcttcctgtttctggcttttatttgggtaacgtttataatggccacccgacttgtacctgggtaatgttttaaccccttccccagagttctcaattagcatgaatttactacagtcagagtttcctttaaattggggtgggggtgctaagcactgaaaatatctttcttgattactttaccatgtggacatatgggataaatactgtatttcagatttacataaaagtagattagtaatgcacagctttcagaataaaaactgataaaaaagaccaagcactatcaactttggacagtaatttcctaggtgttaaacaagttttctgaatacaatctggatgcaaaacggcctgatttgatgaattcataattttcttctgtatactttcattttattaaatattttattacttggttaaacacaagaattatctatgtaaacttcatgggcttttttgttgaaagttagatgttcagtaactaatttcccagttatggcccagaattaaacatttatgatcatatttcagaagtcaaaatacaaaactggattatcaaaacggttggtgtggtcactttaaactggactatcagtatggttgccgtggtcactttaagcgggattatcagtacggttggtgtggtcactttggtttatcatcaatacagttggtgtggtcactttaaactggattaccaatatggttggtgtggtcgctttaaagtttgttttcattttttttctatttttaattcttacgggtatatagaaggtgtatatatttatggggtacatgagatgtcttgaaacaggcatgcaatgtgaaataaataagcacatcatggagaatggggtgtctacctcctcaagcatttatccattgagttgcaaacaatccagctacactcagttatttaaaaatgtacagttattattgcttatagtcaccctgtttgctatcaaatagtaggtcttactctatttttttcattttaaactttgaattttatttttcctaggcttatagcatcatgctatcccccttgtaaaaggaggaatgcttggcatgagaaccttactgctgttaccatgaacaaactatggaatgttggcaaaagaaaaaaaaaagttacacaaaacacacaaataacattttaataatatgtatcagatcaagtgattcttagtagtagttgatattcacaggaagtcaaaaaaggacctatttcaattatgtctgcttgaatcctgtttaattgtttccctggctgagtagctagtgtgacacagcagcaagactaaaggggctctgtggtccacattgtcctcgagtctattcttgcccattatagacctgcccattggtgctcactcactgcatcccaggaggcttgactgtcctcaggaagcatgttggggtgcccttaagggtaagtatcccggggagcacagtttggagaaaaccaatacgtcttcatgtatgttgagaagcgctgggccaaagtacagactttttttttttttttttttttttttgggacaagacctcggctctgtcacccaggctggagtgcagtggtgcaatcatggttgattgcaacctcaacctccctggttcaagccatcctcccacctcagtctcctgagtagctgggactacaggtgcacatcaccatgcccggctaatttttttgtatttttttactagagatgaggttctactatgtagcccaggctgctctggaactcctgggctcaagcaatcctcccacctcggcctcccaaagtgctgggattgcaggcatgagccaccatactggcctaagtgcagaaatttgaacatgtgcctccaccccaagccaaaatttcccttgaggagcactatctatctgatgatgtctttgaaacggtatgaaattaaaataattaaaacatcctgcacataggtggtagcatctaatatgaaagatggatttatgcttagagctcagaaaaatcctcataaaattattgtgtcttatcctcggcacctaaagaactgaacagggtcttagaatgatcaaatggatggtttgtttggttggtgggagatgttgaaacgtgggtaaggaatggtgtccttagaagagaggttgccctagatgccgaaaccctggaggtccatggttgccagcagaaacttacagctgggaggagcctgcacccatctctggctcttgtgaatgagaagactcaatttgtgtttttgtttttttgagaaagggtcttgctctgtcacccagactgaagtacagtagcgtgatctcagttcactgcagccttgacctcctgggcccaagcgatcctcccacctcagcctcctgagtagttaagacttcaggtatgcattaccatgcctggctaatgtttttttattttttgtagagacaaggtctccctcgttgcccaggctggtctcaaactcttgggctcaagtgactttcctgcctcggccatccaaagtgctgggattacaggcataagccaccgcaacatgccccagttgcttttaaactgttaaatgtgggatttaaagaataatctagttctacccattttatgaatgaagaaaagaaactgggacccagagagaaaaggtgcccggtccaaggttacagagcccgttggactcagaagtgaagctggaacactggccaatgccctcccatccgccaggtgacttctctgcagtcccctttaccatctgcccgggtcctttgggatacggctgactaggggtttgaagaacagcaattggcctttgttatgaatctttttgtggagataaacccagtagaagtatcacggttctgaccatgaaagtgtgttcaactctaatccagcacaattaggattccagatcatttgattctgtgtcgtctaaatatcacagaaagttaaaaacaaattagcctcaatggaattaatggcttaatatccataatttagttttaatgctaggaggaagggctcctgtgaatgtgttcttacaaatcaaataaagaaaatcaaatagagaaaa

SEQ ID NO: 934 - DNA, 3528 bp, Homo sapiens
  source 1..3528: mol_type = genomic DNA
agcgtgcgccgctggccaggtgcgcaatagtggggtatgcgtcacggtctgcgccgcccgcggggccaggacggggcggagcttccgcctgggctggggttggcgagttcacccgcggcggagggtaactttgctgtgctgttttttgagcagttgtctggtccctggaagtgtagcatcgagagagttttctaattacgtttacaaaatatcttccctttggccatacaagtggtgactgccatgtcgaactcgcggcccaggtcccgccgagacgccgggggtggcgctggggcagccggccgggacgagctggtgtcgcggtccttgcagagcgcagagcactgtctgggcgtccaggacttcggcactgcctatgcccactacctcctcgtgctcagcctggcgccggagctgaaacacgacgtgaaggaaacttttcagtacacacttttcagatgggctgaagagcttgatgctctcagtcggatacaagacttacttggttgctatgagcaggccttggaactgtttcctgatgatgaagtgatttgcaatagtatgggggagcatctcttcagaatgggctttagggatgaagcagctgggtattttcataaagcagtgaagctaaaccctgatttcagtgatgcaaaggagaatttttatcgtgttgcaaactggttggtggaacgctggcactttatcatgcttaatgacaccaagaggaatacaatttataatgcagcaatccaaaaggcagtttgtttggggtccaaaagtgttttggacattggagcaggaactggaatactaagcatgtttgctaaaaaagctggagcacattccgtgtatgcctgtgagttatccaagaccatgtatgaacttgcctgtgatgtcgtggcagcaaacaagatggaagcagggatcaaactcttacatacgaagtcacttgacatagagattccaaaacatattcccgaaagagtgtccctagttgtaacagaaactgtcgatgcaggtttatttggagaaggaattgtggagagtttgattcatgcatgggagcatttacttttacagccaaagaccaaaggtgaaagtgctaattgtgaaaagtatgggaaagttataccagcaagtgctgttatatttgggatggcagtagaatgtgcagagataagaagacatcatagagtgggtattaaggacattgctggtatccatttgccaacaaatgtgaaatttcagagtccggcttattcttctgtagatactgaagaaacaattgaaccttatacaactgaaaagatgagtcgagttcctggaggatatttggctttgacagagtgctttgaaattatgacagtagatttcaacaaccttcaggaattaaaaagtcttgcaactaaaaagcctgataagattggtattcctgttattaaagaaggcatactagatgctattatggtttggtttgtgctccagcttgatgatgaacatagtttatccacaagtcctagtgaggaaacatgttgggaacaggctgtctaccccgtacaggaccttgcagactactggataaagcctggagaccatgtgatgatggaagtatcttgtcaagactgttacttaagaatccagagtattagtgtcttgggtttggaatgtgaaatggatgttgcaaaaagttttacccagaataaagacttgttatcgttaggaaatgaggctgaactttgtagtgccctcgctaaccttcagaccagtaaaccagatgctgtagagcagacatgtatattggaatctacagaaattgctttgcttaacaacatcccatatcatgaaggctttaaaatggcaatgagcaaagttttgtcttcactgactccagagaaactgtatcagaccatggatactcactgtcagaatgagatgagctctggaactggacagagtaatactgtacagaacatccttgaacctttctacgtgttagatgtgtccgaaggcttctctgttctgcctgttattgctggcacacttgggcaggttaaaccatacagttctgtggagaaagaccagcatcgtattgctctggacctcatatctgaagccaatcactttcctaaagaaacacttgagttttggctgagacatgtggaggatgaatctgctatgttacaaaggccaaaatcagacaagttatggagcataattatattggatgtcattgagccatctgggctcattcagcaggaaataatggaaaaagctgcaatatccaggtgtttactacaatctggaggcaagatctttcctcagtatgtgctgatgtttgggttgcttgtggaatcacagacactcctagaggagaatgctgttcaaggaacagaacgtactcttggattaaatatagcaccttttattaaccagtttcaggtacctatacgtgtatttttggacctatcctcattgccctgtatacctttaagcaagccagtggaactcttaagactagatttaatgactccgtatttgaacacctctaacagagaagtaaaggtatacgtttgtaaatctggaagactgactgctattccattttggtatcatatgtaccttgatgaagagattaggttggatacttcaagtgaagcctcccactggaaacaagctgcagttgttttagataatcccatccaggttgaaatgggagaggaacttgtactcagcattcagcatcacaaaagcaatgtcagcatcacagtaaagcaatgaagagcagttttccaatgaaaactgtgtaaatagagcatcaacaagtacaaaattcttgtcttaattagtgggggtatataaaaattccttgtaatggtcaaatattttttaaaattgacattaataaagcatattttaaaagattctaaataaaagggtagcattattatagaaatactgctgcagatttgctttctggaaaaggatacatcactagttttttaaattaggaaacttcttttgctcgattttacagaatagggattttaaaagtcttatcgttattgacatgtgtaagtaaagcaaaactttacttttgtaggcatcttggccttttttcttaaatccaaacttgtaattgggaaacactgaaaggcttccactgaagactgagggttatggttacctgtaaattccaatcttgcttcctttaaatactcagtgtacatctgaaacatctcaggttttgttttgagaatgcaagcttgaaaaagaatttaagctataagctaaatgtaattaaaacagtaaaggagttagggaatacatcttcaggaggcagcatttttcttggtctactttggcaaaagaacatttaaaagctggtaacaaaacaaagttaaattgaaggaagacttaatcctatactatttttcaaagttttgatttggatgtacaataagtacattaattgatccaatttttacaaacttttgaaataaaggaagatcattattatgcctccta

SEQ ID NO: 935 - DNA, 2142 bp, Homo sapiens
  source 1..2142: mol_type = genomic DNA
gctttccttttagcttttgtaagttacacgtcaaaatggccgatctgacatcggtgctcacttctgttatgttttctccctctagtaaaatgtttatcggtggactgagctggcagacctcaccagatagccttagagactattttagcaaatttggagaaattagagaatgtatggtcatgagagatcccactacgaaacgctccagaggcttcggtttcgtcacgttcgcagacccagcaagtgtagataaagtattaggtcagccccaccatgagttagattccaagacgattgaccccaaagttgcatttcctcgtcgagcgcaacccaagatggtcacaagaacaaagaaaatatttgtaggcgggttatctgcgaacacagtagtggaagatgtaaagcaatatttcgagcagtttggcaaggtggaagatgcaatgctgatgtttgataaaactaccaacaggcacagagggtttggctttgtcacttttgagaatgaagatgttgtggagaaagtctgtgagattcatttccatgaaatcaataataaaatggtagaatgtaagaaagctcagccgaaagaagtcatgttcccacctgggacaagaggccgggcccggggactgccttacaccatggacgcgttcatgcttggcatggggatgctgggatatcccaacttcgtggcgacctatggccgtggctaccccggatttgctccaagctatggctatcagttcccagactatttgccggtttcacaagacataatttttatcaactagctcttaagagaggcatagcaaagtgggggttgctaccatttctagagagagaggacacagtcccggcctgggctgcccccgctccagtcaatgctcactgaaagtctgtcttagctgcctgtttgaatgactgttctttttctcatttttaattcttggactcatgtcctcattgcttcactcaattaaaaaaaaattattctccagtcccctcccactttgcttcttgtatgcattgtgaccgaccccacttcctcagaatgtaacggggccagagggaaacttctcacaaacttcgtagagcctcctcaggggaagctaggaagaagacatcaaatgtttttaagtcatgaccaaacaggcttgttggggacatatcatggggtgagctttgaagtgctggtggtccagaggggttgcagatacgtgacttggagcacccgtgtcttacgatggacagtgataaaggtgaacacacagagacagactattctctaagaatgtgagaaacctgatctggaagaggagctatataaacactatctgactatctttgtcttttggggccagtggctgttggcataatcacaagcctgtctgtcttcgagaagggacagtggagtcatccaggtgctgccacatgacaggcacggtgggcaccgatccacagtgggccccgccttccccagctcgcctccctgcctgtgctggcctggccttgcctgctggcaccattggagtaggagggggtggaacacagggggcccatcctgatcaggccccatctcaaggttggcactcctgcccatcacccttagaaggatcttttcccatggcttgacttccttcatttccctaactgaaatacacccactctcttggaataatgacgtaccactcagttggaccctcaagagtcactgctttgtctgtgctggtagtttgtgagaagtgacccgcacgcttccatttgatgcatttgatgtgagtgaatccatacatttgaatgtcattgtccttgagaccctacatgtgcagtttggctcatctcattaaagatgcttgatgtaataattggttagtttccttttattttcctgcaggcttttccatgagtattatttttttcaaagaacaaatctgtatggcttttccccatctccatattttgttttgctatgaattgctttgctttggtgaacttgtcctagtatgcttgcctcacaaacgttttagccattgtgaattttcttcatctctgtaaatagttcatctgtgcttctccctgatgacgttttattttttttcccctgtaagcaaccgaggtagaaaaataaattgtttaccatgg

SEQ ID NO: 936 - DNA, 668 bp, Homo sapiens
  source 1..668: mol_type = genomic DNA
tgccccatgctgactccttgcttctttccagccggagccgctgccttgccccccggagactgaagacatggcacccaagagggccaagagaaggacagtagagggcggaagctccagcgtcttctccatgttcgaccagactcagatccaggagttcaaagaggccttcactgtgatcgaccagaaccgtgatggtattatagacaaggaggaccttcgggacaccttcgcagccatgggccgcctcaatgtgaagaatgaggagttggatgccatgatgaaggaagccagcggtcccatcaacttcaccgtcttcctgaccatgttcggggagaagctcaagggtgccgaccctgaggatgtgatcaccggagccttcaaggtcttggaccctgagggaaagggcaccatcaagaagaagttcctggaggagctgctgaccacgcagtgtgaccgcttctcccaggaggagatcaagaacatgtgggcggccttcccccccgacgtgggcggcaacgtcgactacaaaaacatctgctacgtcatcacgcacggcgacgccaaggaccaggagtaggggcacccgcgggcctccgctgcccgacgcttctgttcggcccgacctccaccccggctcccaataaaatttaactgatctttgtttctta

SEQ ID NO: 937 - DNA, 2121 bp, Homo sapiens
  source 1..2121: mol_type = genomic DNA
cttacggcggccggccttctttgtaggcctggcaccgtagaggtagaggagctacattggccgcgtcccctgtccctctgccctcttgcccatctgcccaaacttttgtatttgatctctgttttgatgtcgaaccccaaagcactgtaattggggggggcgggggggggggtggaacctgcggacctgagagcagcgcgcgtgcgcacgacacgcgctgtgcgccggaagagcacgcccagtccgggctgcgcggaggaagcgctggggtcccggagggcgggggtggcggcgccggaggtcgccatggctaccgagcccgaagccgcggagccggtggtgccttcgctcgtggatcgatacttcactcgctggtacaaaccggatgtcaaaggaaaattttgtgaggaccactgtatactacagcactctaaccgaatatgtgtcatcacattggcagaatctcatccagttcttcaaagtggaaaaacaattaaaagcatttcctatcagatcagtaccaactgtagcagacttcagaacaaggtctctgggaaatttaagcggggggcacagtttctaacagagcttgcacctctctgtaagatttactgctcagatggtgaagaatatactgtgtctagttgtgttagaggacgtttgatggaagtgaatgaaaacatcctccataagccatctattcttcaagaaaagccatctactgaaggctacattgcagttgtgttacccaaatttgaagaaagtaaaagcataacagaagggttactgacacaaaaacaatatgaagaagtcatggtgaaacgcattaatgccacaacagctacgtcatgaggattgacatggaacaaaaagcaaagtgggattcttgttacctggcctaaaccatcagggtactaaaggagaagaaccagtatatgtaaagcatacctaacagccagccatatgcaggggaggcctagtgcttcacttagttttccctctctgtcttcataatgagccttggttcccatttgtctacagcctgccagatctggcctgcccatgtactcacactgttctcttgcatctctctaacaactggcatgcaaggcatgtttttctgattaaaaacaaacaaagctctttgaagaagatttagaaaatacagaagagttttaagtagccaagtaaaaataatttacccatcatcccataatccagaagtaaatacatttgacccttgagcaacataggtttgaactgcaagggtccacttatgcatggactattttcaactataaacgagtcaaaaatatatcattaaccaaacacgaaacccacttatagagcaggttcatatactcaggttccaaagggccaactgcaggacttgagttctcacgtatggatttgggtatatgtggaagttcctggaaccaatcccctatgtaaaccaagggataactactacattttaacctacttctgtttgaacatatggtatggttattgcttttgcctcgttttcctaacagtttgaagtttaaaaaaacctaacccacctttcttacccagtcttctataatgtgcctaccaaaaagcctagtcctagcccatctgcctcaactcctctcccttttaggttgtagggaagaggccggagtgtagagtatattatatcttctgtcccccttatgccaacaagatggccttcccctctgaaacaaagtaaaactgcaacactgtgacttcttaaatgagggatatgtgaaaaggctatgaaaaatacaaaggctttcctaggaaatgtgttataatgcagcgggaagctaattcttgaaatatgcacattatagttactcagtctcacatactctagttactggcaaagaagttactgagaatatgtcattcaaaggcataggggcctttgaatggaacaaatgctttcacatcatttaaagtaaaaaaaaacctccaacaactgtgaatttatagtttaagagtgatttacactgaatttcaaataaaaggactataaaacgtgttatttttctgtaagggctataacatacatgtcaatatcactgtttttaaataaaatatacttttatacagaag

SEQ ID NO: 938 - DNA, 2382 bp, Homo sapiens
  source 1..2382: mol_type = genomic DNA
cccggcaccgcggcgctcgggtgtttttgggggcccgggtggagggcccgggtgccggggcccaaggtgcggcctcgctagcgggagagggagcgggatcaccggcccggagagagctctcagggccagagcggggcaggaggatgctttcccagccccaccatggagctgcgctgtgggggattgctgttcagttctcgctttgattcagggaatctagcccacgtggagaaggtggaatctttgtccagtgatggggaaggggtaggaggtggggcgtcagccctgaccagtggcattgcctcttcccctgactatgaattcaacgtgtggacccgaccagactgtgctgaaacggaatttgagaatgggaacaggtcatggttctacttcagcgtccggggaggaatgccaggaaaactcatcaagatcaacattatgaacatgaacaagcagagcaagctgtattcccagggcatggccccctttgtgcgcacactgcccacccggccacgctgggaacgcattcgagaccggcccacctttgagatgacagagacgcagtttgtgttatcctttgttcatcgtttcgtggagggccgtggggccaccaccttcttcgccttctgctaccccttctcctacagtgactgccaggaactgctaaaccagctagaccagcgctttccggagaaccaccctacccatagcagccccctggataccatctattaccatcgggagctcctttgctattctctggatggacttcgtgtagatctgctgacgatcacttcctgccatgggcttcgagaagatcgagagccccgtctagagcagctatttcctgataccagcacccctcgaccattccgtttcgcaggcaagaggatattcttcttaagcagtagagtacacccaggggagactccatctagctttgtcttcaatggctttctggacttcatcctccgacctgatgatccccgggcccaaaccctccgtcgcctcttcgtctttaagctgattcccatgttgaaccccgatggtgtggtccggggacactaccgcacagactcacgtggagtgaatctgaaccgtcagtacctgaagcctgatgccgtcctgcacccggccatctatggggccaaagctgtgcttctctaccaccatgtgcactctcgtctgaactcccagagttcctctgagcaccagcccagttcctgtctccctcctgatgctcctgtttctgacctggagaaagccaacaatctccaaaatgaagctcagtgtgggcactcagctgacaggcataacgctgaagcctggaaacaaacagagccagcagaacagaagctcaacagtgtgtggattatgccacaacagtctgcggggcttgaagagtcagcccctgataccatcccccccaaagagagtggcgttgcttactatgtggacctgcatggacatgcttccaaaaggggctgcttcatgtacggaaacagctttagtgatgagagcacccaggtggaaaacatgctatatccaaagctcatctccttgaattcagcccacttcgacttccagggctgcaatttctcagagaagaatatgtatgcccgagaccgtagagatggccagtctaaagagggaagcggccgtgttgcaatctacaaagcctcagggataatccacagctacacacttgaatgcaactacaacactggacgctcagtaaacagcatccctgctgcctgccatgacaatgggcgtgccagcccccctcccccgccggctttcccctccagatacactgtggaactatttgagcaggtgggacgagctatggccattgcagccctggacatggcggaatgtaatccgtggccccgaattgtactgtcagagcacagcagccttactaatctacgggcctggatgctgaaacatgtacgcaacagccgaggcctaagcagcactctgaatgtgggtgtcaacaagaagaggggccttcgaactccacccaaaagtcacaatgggttgcctgtctcctgctccgaaaacaccttgagtcgggcacgaagttttagcaccggcacaagtgccggtggtagcagcagcagccaacaaaattctccacagatgaagaattcccccagctttccttttcatggcagtcggcctgcagggctgccaggcctgggctctagtacccaaaaggtcacccaccgggtgctgggccccgtcagaggtaagccagtctgggagcccctgcaacatgtgttcggttgtctggggcattgctgggggaagtaagagcttgaagatatactgttggcccaggaccaaggggtgaatcaataaaattagtttgtagcagaa

SEQ ID NO: 939 - DNA, 3986 bp, Homo sapiens
  source 1..3986: mol_type = genomic DNA
aaagaggctcgtggcgcccgccttccggtgcctcagtccctgccagtagccacccgacgccgtccggctgttcctcgttcgccctctccctccgcctagcccgcttctacccggacggctcccggcgcaggctgcagctgttccgtcagctgccgctcctcctcccagacgcagagcgccgctctgccccgccccccgcgcaggctgccgtccctacatccgggtaccgactccagccgcctagacgctggcactatggtcatggcggaggggacggcagtgctgaggcggaacaggccgggcaccaaggcgcaggatttctataattggcctgatgaatcctttgatgaaatggacagtacactagctgttcaacagtatattcaacagaacataagagcagattgctccaatattgacaaaattcttgaaccacctgaaggccaagatgaaggtgtgtggaagtatgaacatttaaggcagttctgccttgagctaaatggacttgctgtcaaacttcagagtgaatgccatccagatacttgcactcaaatgacagcaactgaacaatggatttttctttgtgcagctcataaaactccaaaagagtgtcctgctatagactatactagacacacacttgatggtgctgcatgtcttctgaatagcaataaatattttcccagcagggttagcataaaggaatcatctgtagcgaaactaggatcagtatgccgtaggatttacagaatattttcacatgcttattttcatcatcggcagatatttgatgaatatgaaaatgaaacatttttgtgtcatcggtttactaagtttgtgatgaaatacaatttgatgtccaaggataacctgattgtaccaattttagaagaggaagtacagaattcagtttctggggaaagtgaagcatgaagggaatcataggaaaaatgtactgatcatataattaacattatgtactgtatatatcattttagacacatcaatcatgtatccatattatagcttctttgtttagtataggtttttgtatgctgggtttgccttttaaaatgggaaatactttttaagttattcataagctgtatattcaccagtgtggcactcatggtttttaaataagattagtattatctgtttataatgcctgttaataaaagaatttacagtttggtaaaattgctgctaaacaatcattggatcacaatcctcatcagacaaacccatctgtaaaaaaaatgagggagagcttgaggtttcacacaagccatttactaaagaggtagaaatgttttctattggttttaccttgagtttagatatcctaaaaaattctgtagtacgtagttttgtcttacctgttaactttccccaattgagataaaagtgttttaaaattctgtttatagtttttgatatgcatatataattatgtgtatatctaaatacaaatgcaaatgaagcattagtaatacttaaataattttactgtgctacataaagtataacatacttggaaaggatttaccgttctgcaacaacggactggtacatacaggatgatcacaatggtaaggcacataaattattttcccactggaaacctgccctgtccaccccttctcatttcccttaaccttatcttcaaactactttagctgagaagcttttcaccagactgagttagtggtggcttatacctatttatatttgtattaattgcttacagattatacctcatattagcaattacattacactacaagaaaatgtatttgcataggctcttgcttatctttgttttgcaaaattgttctacttagaaaacagtccttaaaatagtttgactcttcctgttagtaatatattaatctttcatttaaccagctaggcagcattaaatagaattgaagaaataccatagtatttattttacaccccctctcccacgaagtttatgtttggattacatgcacgtgtgagattatttgcaataattcataggttccaagggtgttgatgaatagtcatacatttttttggactttgttataattcattgtggtaagaatgattgaaatgcagatttaacaatcttataatctattgaatgccatttttgataaagcactggaggtcttattgccaaactgattgtaatgaggcagtaagggtgaaaacattgtacatgttgtgaagaaagtatttaaatccaacttttgaacagatttaacaaacatgaggaacttttttatttagaaggataattttgaagatgaaaatgtattcatcttaattgttttttcaaatttaagggaataatttataccatcttttcagacaagaatgtacagcaaaaataaggggaacagtagtatactgagagtgtgtgtatgtatagtgtatgcctttccaagcttgccagtctttttggctttgaacactgcccatcagctacagtcattactgttccccaacccacaactatcttttaagaagtcttagttcacagtgaaaggaatgatgactttgaaattatggatttatattaatggcactataaaccaatggtaatggtaatttttaaacttgctaaatattgagaaactaaactactaagttaataaattatatatagcagtgtagctgttctctctagatggtgtctcacaatggatttctgttgcttgactattttcttagtgaatatttatactaaggtagtgactgagatttggtgatctggctgagtattttgaaacacattttgaataatatggcttagtgttaacggggacttaaatatgatttttttttcttactcatttcaccttccctgtactgtatgtttggaattgatcataaaacatctccaaaagaaaataatcagtttgtagtcttgcttttgtattcatgttgataatcttactaattgtgaagttgattcactactatactaggtaagacctaagtgaaacagttcctgtttttccttaatactgttttcagaattttgaaaatgtacttatatatacataaatactactaaaaaattaatgagcctggcaaaccattgatttataaaagtaagtgttctaagaggggaacaagacagttctgtgtgataaggaagttaggctccactttttgtttgaattaccctatgtatatccgaaggtaaacttaggcttttctttccaaaagatcgtatagtcaattcattctttttctcctatcacatctgggaaagtagctaacttttaactatttatgttcccataagtaacccttcttttgtgtgtatacatttccttttctctgacttgagatgtcaaatttggatttctagaacagtttctcagttaaattcttgatgacttaacaacttttactatcagaatacaattagaaatccttggtcaggcacaggggctcacgcctgtaatcccagcactttgggaagccaaggcagacagatcacctgaggtcaggagttcgagaccagcctgaccaacatggagaaaccctgtctctactaaaaatacaaaaattagccgggcgtggtgctactcgtgaggctgaggcaggagaatcgcttgaacccgggaggtggaggttgcggtgagctgagatcgtgccattgcactccagcctgggtaacgagcaaaactccgtctcaaaaactccgtctcaaaaaaaaaaaatccttgattacattgttagtaaggactgtgttacgattataaacacatttattggttgatgtcaaattcactgtaatagtagaactaagttttttatgtgagtactttgccctactgtctatatgatgacatcttttttgagcagctaaattttaaattgtatatactttattttgtgaatccttgttgaatgtgctaaaggtttctttgtgtagttcttccatgctatgcgaatattttagtaaaagtagttgattttta

SEQ ID NO: 940 - DNA, 2410 bp, Homo sapiens
  source 1..2410: mol_type = genomic DNA
gagacaggaaggtggcaaaggaaggagcccatttgcatgacaataattgagccaagaatagaaagccacagggatgcaagggtgaggctggcggctgagctgggctaaacctcacaaatcagactacccagctctgctccgcaggggaagggagactgagccctgggccaggcttggcagagagggaagcgggaggacacgaccccagggcattgtgggaacactggccaggctggactttgccttcctcctcgtcctttagccgggagcctgtctttgcttgcctttgcctttgaggctctgtggctgtggggctgagtggcatcatggcggctcagaaagatctctgggacgccattgtgattggggcggggatccagggctgcttcactgcataccacctggccaaacacaggaagaggatcctcctgctggagcagttctttctaccacactcccgaggaagctcccatggacaaagccggataatccgaaaggcgtacctggaagacttttacacccggatgatgcatgagtgctatcagatatgggcccagctggagcacgaggctggaacccaattgcacaggcagactggattactgctgctgggaatgaaagagaatcaagaattaaagacaatccaggccaatctgtcgaggcagagggtagaacaccagtgtctttcatctgaggaactgaagcaacgtttcccaaatattcggttgcccaggggagaagtggggctcttggacaattccggaggagttatctatgcatataaggccctcagagccctgcaggatgcaattcgacagctaggaggcatagtgcgtgacggagagaaggtggtggagataaacccagggctactggtcacggtgaaaaccacctccaggagctaccaagctaagagcttggtcatcacagcaggtccttggaccaaccagctcctccgtcccctgggcattgagatgcctctccagaccctgcggatcaacgtgtgttactggcgagagatggttcctgggagctatggtgtgtcccaggcctttccgtgcttcctgtggctgggcttgtgtccccaccacatctacggactgcccacaggagagtacccagggctgatgaaggtcagctatcaccacggcaaccacgcagaccctgaggagcgggactgccccacagcacgcacagacatcggagacgtccagatcctgagcagctttgtcagagatcacttacctgatctgaagcccgagcctgctgtcattgagagctgcatgtacacgaatacccctgatgagcagttcattctcgatcgccacccaaagtatgacaacattgtcattggtgctggattctctgggcacgggttcaagctggcccctgtggtggggaagatcctgtatgaattaagcatgaaattaacaccatcttatgacttggcaccttttcgaatcagccgtttcccaagcctgggcaaagcccacctttgacctctggccagaagcctcccttctgtgcacaggagccagtttcacagatggagaagatgtctcagatgaagggagtgtccctgagatatcatccttttcttctgcctcgcctgaatcccccataaacaccagatgattgagtctaccttctttccttggcccgctccctttttcttctgcctcacttgaatcccccgtaaacaccagacgattgagtctaccttcttttcttggccacctccccattcacaactactttctcgctcccagaaggttgatcagatattctacaatcacagagtagcaaggacgtttgagatgggtatatcagtaagaagagggcacaagaactggctctggagaccaaagcagttgttaaaaattctctttgctgggggccgggtgtggtggctcacacctgtaatctcggcactttggggggctgagacaggcggatcacctgaggccaggaattcaagaccagcctggccaacatggtgaaaccctatctccactaaaaatacaaaattagctgggtgtggtggcgcatgcctgtaatcccagctacttgggagactgaggcaagagaatcacttgaacccgggaggtggaggtggcagtgagccgagattgcgccattgcactccagcctgggcaaaaagagtgagactctgtctcaaaaaaaaaacaaaacaaaaaaaacctctttgctggtatatttgaagagcttgggatggatttgactaaatctgccccgaggagggtgaacaaggtgatctcagagatcactactgctcttggagttccttctcctaaagctaaggccagcctccatcacaaatgcccataaaatctggctcgtctttgatgaacaataaatatttgttgaacaaataaataactgccctgca

SEQ ID NO: 941 - DNA, 618 bp, Homo sapiens
  source 1..618: mol_type = genomic DNA
ggacaactcggtggtggccactgcgcagaccagacttcgctcgttctcgcatgcctcgctccgcttttcctccgcaaccatgtctgacaaacccgatatggctgagattgagaaattcgataagtcgaaactgaagaagacagagatgcaagagaaaaatccactgccttccaaagaaacgattgaacaggagaagcaagcaagcgaatcgtaatgaggcgtgcaccgccaatatgcattgtacattccacaagtattgccttcttattttacttcttttagctgtttaactttgtaagatgcaaagaggttggatcaagtttaaatgactatgctgcccctttcacatcaaagaactactgacaacgaaggctgcgcctgcctctcccatctgtctatctggctggcagggaaggaaagaacttgcttgttggtgaaggaagaagtggggtgggacgacagtgaaatctagagtaaaaccaggctggcccaaggtgtcctgcaggctgtaatgcagtttaatcagagtgccatttttttttttgttcaaatgattttaattattggaatgcacagtttttttaatatgcaaataaaaagtttaaaaacttaaaaaaa

SEQ ID NO: 942 - DNA, 7474 bp, Homo sapiens
  source 1..7474: mol_type = genomic DNA
ggggacggtgggagcagatccatttccgggttggcaaaaggggcggtggcggcggcggcggcggcggcggcggcggcgacggcgagaaagagcttgccggggggcgagcaggacaggacgaagccggagtgtaggcggcagaggattcgctcccagagcagctgcggccaggtatatgaatgacctaaaggtacaaataaagacggagagagaacagtgccaactgggagcagggcaagaatgccaattcctcctcccccgccacccccacctggtcctcctccacctcccacatttcatcaggcaaacacagagcagcccaagctgagtagagatgagcagcggggtcgaggcgccctcttacaggacatttgcaaagggaccaagctgaagaaggtgaccaacattaatgatcggagtgctcccatcctcgagaagccgaaaggaagcagtggtggctatggctctggaggagctgccctgcagcccaagggaggtctcttccaaggaggagtgctgaagcttcgacctgtgggagccaaggatggttcagagaacctagctggtaagccagccctgcaaatccccagttctcgagctgctgccccaaggcctccagtatctgccgccagcgggcgtcctcaggatgatacagacagcagccgggcctcactcccagaactgccccggatgcagagaccctctttaccggacctctctcggcctaataccaccagcagtacgggcatgaagcacagctcctctgcccctcccccaccacccccagggcggcgtgccaacgcaccccccacacctctgcctatgcacagcagcaaagcccccgcctacaacagagagaaacccttgccaccgacgcctggacaaaggcttcaccctggtcgagagggacctcctgctccacccccagtcaaaccacctccttcccctgtgaatatcagaacaggaccaagtggccagtctctggctcctcctcctccgccttaccgccagcctcctggggtccccaatggaccctctagccccactaatgagtcagcccctgagctgccacagagacacaattctttgcataggaagacaccagggcctgtcagaggcctagcacctcctccacccacctcggcctccccatctttactgagtaataggccacctcccccagcccgagaccctcccagtcggggagcagctcctccacccccaccacctgtgatccgaaatggtgccagggatgctccccctcccccaccaccataccgaatgcatgggtcagaacccccgagccgaggaaagcccccacctccaccctcaaggacgccagctgggccaccccctcctcctccaccgcccctgaggaatggccacagagattctatcaccactgtccggtctttcttggatgattttgagtcaaagtattccttccatccagtagaagactttcctgctccagaagaatataaacactttcagaggatatatcccagcaaaacaaaccgagctgcccgtggagccccacctctgccacccattctcaggtgaagcctggcttggtcccgttcctcaggaaaaggatggaccttctcttcttctcagatggtcccttccattcccctgaaacctgcatgagagctcctaacatgtttctccaatgcaatcaagccctagactccaaatgtcctcccagctcacctccatctatgcatctcatctctggatttggtgatcagactctatattgacagtaggatctcaaaccctgcatccatccttcctccagcaagccctgctagccacatgaggaacaagtttccgtgtcttctgccttcctcttggggaaaggtgccttgttgtgatgaattaactcactgttagggcagggtggagaatggtactccttccttctcctgtccactgtgggggaagcttggcaggtatattatatttcatcatttaggaggctggcatgaccaggacttatgggtgggaggggagcatttttagtgaagcaagaaaggagtttgccaagaagtgatctgttttaaaggtcatatttggagaaagggcaaggaattgggtctgctttatttttgggggtattttgtttttgttctcacctgctgcccccccaccccaccaccccagggataaattggatataaacactaaatactaatcagttgaacttaacatttaataaaaagaaagggtgaaataaactgaagaccattttagaactagtcagttctctgcagcaaagggaacaggagccatttgaaccctctgggacccctcaccccactgcttcagggtgctaggctgagggatgtttttcctcccccttaccgcccatgcccttgaaagaaaagtcactttttgtggagggcatcattcattcctgattcacaaaccccaaaaacctctggtgggagataggaagatagggcgtgggcctgggccttaacctcaatcttgtgtctgcctcagtcttttctgactggccctgaagttgtcagtggctctttctgtccttcagcccctggaaggtgctccaggataacaaagaagggcaggttgaagcccctcatggaaggagctggctttgtggggctgcaaaggacttttaagtcctgcctgtactgaagttcacagcccacctgactgagcagactcttcctgttcctttctctaccacccttgccttcccaggactgcacggtttaacacagcagagtacagaagggtgaagaagtgagcagaggcttatgaagatattcagatactcttctatgccaggaagcacaaagactttgttgagatttgcctcagttcagtagatcttccttggcagccagccataggttgtttctttgtcttccgggtcctaaagagcacagagaaaatggaggtccccagtctaggtaggaagctgattggatgaggacttctttttttccgacagcaggatggggctcttgggctccacacaccagatgctttggttttctacaactgttgctatgtgtagagggtgctcagagcgtggcatgagagcaaggagaccatggctactctttgaaatggatggggaaaattagcttaaaaatttaatcacgagattgcgccactgcactccagcctgggcgacagagccagactccgtctcaaaaaaaaaaaaaaaaaaaaaatttaatcacacacatcacaggcttaaactgtcttagagacctttccagttgattggatcacaggctagggatctgtgcatggtgccaggtgaaacccaagtctccccagtgctaggtgagggagggctcaacgggggtaatgtgtatggggtctgctgtcctttgccatcccctggaccatattaactctgggacagaccatgattaggtctgtcaccaaacttttcctaatcattttttatgtatcattcttctttctaatctgttagcagttatctcccagaagtatccctagcatcctgaagcaaacagaactgccgggcgctgtggcttatgcctgtaatctcagcaatttgggaggccgaggcgggcggatcacctgaggtcagaagttcgagaccagcctgtccaacatggtgaaaccccgtctccactaaaaacacaaaaattatctgggcgtggtggcatgtgcctgtagtcccagctactggggaggctgaggcaggagaatcgcttgaatccaggaggtggaggttgcagtgagtggagatggcgccactgcgctccagcccgggtgacagagtgaaactccatctcagaaaacaaacaaaccaaacaactgagagagggcatgctagtggagggaaaaggagagagtacaagagttgatactgcatcagagttccagggcagatactgacaagtgactgaactttgactgtgaagtcttcccatttatttttgaaatgggagtcgatgccttttgtacgttatcaaagtgtttttttttttttcctcctttactcagacatagagcatcaaaatatcacgagtaaagccaaaccccagcttttcactggggctgatatcttcctccccatggcccactgccccctcatattccccagcacttggactgtgtcacatgggtattgattgtatacttgttgtcttggcctcatgcaaaaaggcctgggtctagatctagtcagatgagttttttttagagcatgttgatgatacaacacctgtttaaatgtctgccttatatgttatttggtcccactgttaataatagatttattactatgtatatttactattgaagatgggaatgtgatctgcatagttatcagtctattttgtatgttgtaaaaagcttctaatttaggtttaaggtgggctggctacaagagcactaaaactcctcaccttttaaactgctctttttatctgcttgtgggaatgtcgtctctttcgtggaagattgggtggtctcatgttgaggctgttgcccagtcccattaactcccttgtccccccacagaaggaagagacattgcccagctaagcatcaggaagctgtgttaaaagcccttctatgggtttggttttgtgatgtttttccctaatgggaaaaacgttatagttgtttcttactgccctgtctgggaagcagggcaaacctccaggtttttaaatgagctagatgcccctcttcctcttctctggtcactgaacctggaccaaagcactttgatattccaggtgtgattttctctgtcatggggatttgctccactgcagagccccatcattttcacagcgtaggccaacagagtgagaacctagggctaccctagctgatggatgtgaggctgctgtctacaggagctcatcccagccctgttaactggcagtggcaaggatactcgtcatcggccattgcactggggaactccctcaccccatggcttcccaacttgaaacccagatttacctccagggagaggtgagaaaaaaattgtaaatagacttgctaaagagcaactcagggttggggtgtgttttaattctcctgatcacttgaaataatctgtaggctgagtgcttatgggggtgggggagaagggtgactccagggtccttccattttgtgaagctctgggggtggagtgtgggcatctgaggccctatgatggcactacattgagctgtctgcccttccggaaacccaacctgcaatcaactgcaaatcaaattcttcacattccagctacagtctttctttccccattgaatctcagtccctggccatgtggtcaaggtggctttctgttaagctaccctaatttcgggaatgggaggggagagaggagggccattacaactctgccttcaagactcatctcttaaaaacaaaacgaaacaaaactacaaccaccatcaaaaccacacgcaaaaaaaaaaaaaaaaaaaaaaaggataactttaaccgaaggaagggtttggttccattcaactccacattcattgtgcctttacttgcattagatttctgtgctttcttcctttccctctttgaagcaattaaaatcttccttgataactgctgtttctttctactcttgtttctggcaatttagtgggttccttctctagtggtcttaaatctcattccactggtggcaagatggggcctagccttcttttcacatgtctaatcttttcctttctcatggtgccctccatggaagtcacagtcaacactgaataaatgactagaatgacacgtgtgcgtgcgcacgcgtgtgcgtgtgtgtgttcatctgtctgcatgtggatcaatttcttttagaaaataatttattgtatgatttattttggagttatattctgattacagtgctccctctcccaaatagcattgattttttcccccctctaaaatgtataatctggtctcaggttggattctttggtacatttctctcttctggatgccatgcagcttaattaaaaccttgcttaaaaacaaaaagtgaaaattgtgtactcttgtctggaataccgcctcaggtggtggcacagagaggggagaaaacctttgcctcataatttgggtaagtgtagtggtttgattccaggtcccttgaaaaagtagatctactgaattgggcagactcatctatagctttctgagggtcttctctcctcctctccagctgtattttgaaaattacagttctagttggctgggcgcgatggctcatgtctgtaatcccagcactttgggaggccaaggcgggtggatcatttgaggtcaggagttcaagaccagcttggccaacatggtgaaaccccgtctctactgaaaatacaaaaattaaccggtgtcatggcgcatgcctgtagtcccagctactcgggaggccgaggcaggaaaatcacttgaacccaggaggcggaggttgcactgagctgagatcatgccactgcactaaaaaaaaaaaaaaaaaaaaaaaaaaaaaaaaaaaaaaattctagagttctagttacccttcctgggagattctgatggtccttattttattattattattatttttttttgagacaggatgttgctgtcatccaggctggagtgcagtggtgtgatcatagctcaccgcagcctccaactctcaagctcaagtgatcctcccacctcagcctcccgtgtagctgggaccacaggtgtgtaccactatgcctggctaattttgaaaatttttttgtaaagacagggtctccctatgttgcccagactggtctcaaattcctgggcttaagtgattgtcccacctcagcttctcaaagtgctgggattacaggcatgagccaccgcacccagccagtccttattttatatttccacctaactcccctttgcccacgatttcagggaacctaggaggcttcctggccttgtgaccttttccttgaatctcttataattctttctacctgtgttgcatggcagattctcagattgaggctaaagaaaagaagggtggggacaaagcatacagaatgtgtgtatctgtttttatgtgggtgttggctgtttttcgtcactgctttttaagctgaatcttagctggttttcttgaactttgactttaggtgtaaaaattcaaccagacattctctccttactgtggtcagctgacatcataaccactaaggcttaatgagcttaacttgcactttcatcactagcaaaggtcttgaagttatttctcttactgattcataatgggtgtgtgtatgaatcactctcacataatttagatataaaaacctatgaggatgagggagggaggggaagaaaaaaaaggactcctttcattttcatccgtacttcccagatgggctgaatctccgattatttgacccatcattgttattaatatggttaataaactacctatttattgattgaa

SEQ ID NO: 943 - DNA, 5503 bp, Homo sapiens
  source 1..5503: mol_type = genomic DNA
atgaattacccgggccgcgggtccccacggagccccgagcataacggccgaggcggcggcggcggcgcctgggagctgggctcagacgcgaggccagcgttcggcggcggcgtctgctgcttcgagcacctgcccggcggggacccggacgacggcgacgtgcccctggccctgctgcgcggggaacccgggctgcatttggcgccgggcaccgacgaccacaaccaccacctcgcgctggacccctgcctcagtgacgagaactatgacttcagctccgccgagtcgggctcctcgctgcgctactacagcgagggtgagagcggcggcggcggcagctccttgtcgctgcacccgccgcagcagcctccgctggtcccgacgaactcggggggcggcggcgcgacaggagggtcccccggggaaaggaaacgtacccggcttggcggcccggcggcccggcaccgctatgaggtagtgacggagctgggcccggaggaggtacgctggttctacaaggaggacaagaagacctggaagcccttcatcggctacgactcgctccgcatcgagctcgccttccggaccctgctgcagaccacgggtgcccggccccagggcggggaccgggacggcgaccatgtgtgctcccccacgggcccagcctccagttccggagaagatgacgatgaggaccgcgcctgcggcttctgccagagtacgacggggcacgagccggagatggtggagcttgtgaacatcgagcctgtgtgcgtgcggggcggcctctacgaggtggatgtgacccaaggagagtgctacccggtgtactggaaccaggctgataaaataccagtaatgcgtggacagtggtttattgacggcacttggcagcctctagaagaggaagaaagtaatttaattgagcaagaacatctcaattgttttaggggccagcagatgcaggaaaatttcgatattgaagtgtcaaaatccatagatggaaaagatgctgttcatagtttcaagttgagtcgaaaccatgtggactggcacagtgtggatgaagtatatctttatagtgatgcaacaacatctaaaattgcaagaacagttacccaaaaactgggattttctaaagcatcaagtagtggtaccagacttcatagaggttatgtagaagaagccacattagaagacaagccatcacagactacccatattgtatttgttgtgcatggcattgggcagaaaatggaccaaggaagaattatcaaaaatacagctatgatgagagaagctgcaagaaaaatagaagaaaggcatttttccaaccatgcaacacatgttgaatttctgcctgttgagtggcggtcaaaacttactcttgatggagacactgttgattccattactcctgacaaagtacgaggtttaagggatatgctgaacagcagtgcaatggacataatgtattatactagtccactttatagagatgaactagttaaaggccttcagcaagagctgaatcgattgtattcccttttctgttctcggaatccagactttgaagaaaaagggggtaaagtctcaatagtatcacattccttgggatgtgtaattacttatgacataatgactggctggaatccagttcggctgtatgaacagttgctgcaaaaggaagaagagttgcctgatgaacgatggatgagctatgaagaacgacatcttcttgatgaactctatataactaaacgacggctgaaggaaatagaagaacggcttcacggattgaaagcatcatctatgacacaaacacctgccttaaaatttaaggttgagaatttcttctgtatgggatccccattagcagttttcttggcgttgcgtggcatccgcccaggaaatactggaagtcaagaccatattttgcctagagagatttgtaaccggttactaaatatttttcatcctacagatccagtggcttatagattagaaccattaatactgaaacactacagcaacatttcacctgtccagatccactggtacaatacttcaaatcctttaccttatgaacatatgaagccaagctttctcaacccagctaaagaacctacctcagtttcagagaatgaaggcatttcaaccataccaagccctgtgacctcaccagttttgtcccgccgacactatggagaatctataacaaatataggcaaagcaagcatattaggggctgctagcattggaaagggacttggaggaatgttgttctcaagatttggacgttcatctacaacacagtcatctgaaacatcaaaagactcaatggaagatgagaagaagccagttgcctcaccttctgctaccaccgtagggacacagacccttccacatagcagttctggcttcctcgattctgcatatttcagacttcaagaatcgttctttaatctcccacaacttctttttccggaaaatgtaatgcagaataaagataatgccctcgtggagttggatcacaggattgattttgaactcagagaaggccttgtggagagccgctattggtcagctgtcacgtcgcatactgcctattggtcatccttggatgttgccctttttcttttaaccttcatgtataaacatgagcacgatgatgatgcaaaacccaatttagatccaatctgaactctcttgaaggacatgaatggcctaaaactgattttttttttttccgttaaaatgtgtgtgtcaagatacggagatttcagggttaaagtatatttcagttttctttagggcaacatatatttgaatttaaaagcactttatttaaaaaaaaaagaagttttcagttctgaagaagtcatttacagtttgcatcattttaattatgagtctgacaaaaccttctccagagaatcaagcaagacctggatgtgaagaaggtttgggtaaactgcatgtaaaggctacaaatcacaatctgattcctcccaaatataaaggcatatggaacataatgtattaaccaaagtatgttataaatcaaaaatggtcaaggttcagcatattctatatgaagatcacaaggtggtatcgttttagatttctatgaaggctttcatttgtacatccctttgaaaaaatataacagatttaaaatgttttgaatttaacttgtttagaaaaactaatgcttaaaacaatatttgaactactgtatttataatttattacctctaattgctttatttcagtgtatgagacattactgttttaatgtttgctttgaacataatttaagaaccagatttattttctatagtgataaacccttttttctcagaactccatctttgtactcttcagatgaatatatagacactgtggcatacattttttttcattaaaaacttatggcttcatacaacactagttcaattttttaaataaactttttattatgttacatgtacttcagagaaagctaaagtttctctaaacttgacacggagtactccataatgggtacatttcattagctttattagaaaactagtaaatgcttttgaataggtagtatgacagctattttaaatgtataaacatttgtgtgccaaacaacatatatgaagggatgtgatgccactaactagtgcacattgtttctcaatgtgccattgagacacaaggcacagtaagtcaggattctgaggcattggaagggttttcttcagctgtaattgtttccacagtgcttttcatctgaggggctcaaagtttaagagtgcattcaataacccatgtactagcttcttgaggtaagtaaataaatcttgttctcatgttacatgttaatacaccaaggcaccaaaacatttaaagtgccatgaattagattacatcagaaatcagaaaagcttggattgagctagtcaccgtggttcacgcctgtaatcccaacacttcgggaggccaagatgggaggatctcttgagcccaggatttcaagaccagcttgggcaacatagtgagaccctcttctctgcaaaaactgacaaaaattagccacttgtagtggtgtacacctgtagtcccagctactcaagaggctgaggtgggaggatcacccgagcccagaagttcaaagctgcagtgagctctgatcacaccaatgcactccagcctgggtgacagagccagaccctgtctctaaaaaacaaaaaagaaaagcttgggttgaagccaggccatattcttttatatgctgttcaatgacttgattcacatgtgaccttttagtagtttgcaaacaataataacagaagttgcaattcataattcagagaaatgaccatgaagccggtgtttccctgcttgatttctatgttcttggattctcacacaaaagaggagttacctagaggggatcagtagccatccctgttgcacacaaccctcacttctgagtggtttccactaggttccacttaaggtgctgtcttttcttaacttgcaaggaattgcttagcttcccaataatcattgtcaaactgggagcaaagttggtcagctgtatctctcacctcctcctttcttcataagatagtagaatctgtggcttacttgtaggttttacttagtgcttcagtactgttggctgttttggccttttgctgaatttgcacaacaacataaagcacttctttttaatgtttaaaaaaaattccaaggctccatgaccaagtatgtgactcactaagaaacccttgctataaaaggcttttgatgaaatcttagcaaagctaaattatctctaacttagagattcctatgaactcaggtcattttcatagcctgtttattttgtaggtctaatttagttctcaggaaaattaaactcatgctatatgactgtatcgttaaaggtacttgagcgtatgttgctgtaggtggtatgacactcaaatgcataagaacttgaagggatttattcttaaccactagaatatgaagagccctttttacctgagaagagtgaaattatgtcagaccttttaatttgatatcactgagtaaaaggtatgttcctatagccataggaatatgtctgcttcctttttttcatgttgagaaaacagtcaaatttaaccatttggagtttatttgaattcttggaaagagcaatattcaaaaccttttcaaaaataagatattctggactactggatggatgttttgttttcagttcatttttcatcagtagagatggtgatttcggttttgtagtatccttgtttctatgtctgtgcatgttaacattggatgtatttgtatatacttaattaatatacagactgtgtgtcattctggcttgattagaagctaagtcagttactgagtaacattttgcaactttattccagcaagtactaaatcggccaaaaaaagttttgtttttgataccattaaaattttattctct

SEQ ID NO: 944 - DNA, 1510 bp, Homo sapiens
  source 1..1510: mol_type = genomic DNA
gaggaagtagacaaacctaaatatgtgtctgaactccaaggaatatgaacaagatgcctgctggtgaacaagaatgtgaatataacaaagaagggaagtactactctaaaggagttaaactggtgagaaaaaagaaaaaaattcctggttaccgttggggggacattaagataaacatcataggtgaaaaggatgatttaccaattcatttctgtgacaaatgtgatttgcctattaaaatctatgggcgaataattccgtgcaagcatgctttttgctatcactgtgctaatttatatgacaaagtcggatataaagtatgtccgcgctgtcgttatcctgtgctgagaattgaggcgcataaacgaggttctgtcttcatgtgtagtattgttcagcagtgcaagagaacatacttgtctcagaaaagcttacaggctcatatcaaacgccgccataagagagctcgaaaacaagttaccagcgcttcgcttgaaaaagttcgtcctcatattgctccgccacaaactgaaatctctgacatccctaaaagactgcaagacagggaccatctaagctatattccaccagaacagcacaccatggtgtcactaccgtctgtgcaacatatgctacaagagcaacataatcagccacataaggatatccaggctcctcccccagaactatctctaagtctgccttttcccatccagtgggaaaccgttagtatttttacgagaaaacatggcaatttaacagttgatcatattcagaataactcagattctggtgctaagaagccaacacctcccgactattatcctgagtgtcaaagtcaaccagcggtatcgtcccctcatcatattatacctcagaaacagcattatgcgccacctccatctccatcatcaccagtaaaccatcaaatgccatatcctcctcaggatgtagttactcctaactcggttcgtagccaagtgccagctctaaccacgacctacgatccatcatctggatatattattgtaaaggtgccacctgatatgaattctcctccactacgtgctccccagtctcaaaatggtaatccatctgcaagtgaatttgcttctcaccattataaccttaacattttacctcagttcaccgaaaatcaagaaaccttgagccctcagtttacacaaacagatgcaatggatcatagaaggtggcctgcatggaaacgactgtcaccttgtccaccaacgcggagtccacctccttcaaccctacatggtcgatcacatcattcacaccagagaagacatagacggtattaaggatgataacagtatttggaactgaagacctgatgggaaaaaaaccttcaagttctatactgtactgtggataagcggctcagttcagcagagctggagttgaacaactttgttcctctggtgtggtaaattgacctaaaggtgacctctgacgatttcctgaaataaatatgcaatgttacattttc

SEQ ID NO: 945 - DNA, 3568 bp, Homo sapiens
  source 1..3568: mol_type = genomic DNA
atagttttcaggttaagaaagccagaatctttgttcagccacactgactgaacagacttttagtggggttacctggctaacagcagcagcggcaacggcagcagcagcagcagcagcagcagcagcagcagcagggctcctgggataactcaggcatagttcaacactatgggtcctcctctgaagctcttcaaaaaccagaaataccaggaactgaagcaggaatgcatcaaagacagcagacttttctgtgatccaacatttctgcctgagaatgattctcttttctacaaccgactgcttcctggaaaggtggtgtggaaacgtccccaggacatctgtgatgacccccatctgattgtgggcaacattagcaaccaccagctgacccaagggagactggggcacaagccaatggtttctgcattttcctgtttggctgttcaggagtctcattggacaaagacaattcccaaccataaggaacaggaatgggaccctcaaaaaacagaaaaatacgctgggatatttcactttcgtttctggcattttggagaatggactgaagtggtgattgatgacttgttgcccaccattaacggagatctggtcttctctttctccacttccatgaatgagttttggaatgctctgctggaaaaagcttatgcaaagctgctaggctgttatgaggccctggatggtttgaccatcactgatattattgtggacttcacgggcacattggctgaaactgttgacatgcagaaaggaagatacactgagcttgttgaggagaagtacaagctattcggagaactgtacaaaacatttaccaaaggtggtctgatctgctgttccattgagtctcccaatcaggaggagcaagaagttgaaactgattggggtctgctgaagggccatacctataccatgactgatattcgcaaaattcgtcttggagagagacttgtggaagtcttcagtgctgagaaggtgtatatggttcgcctgagaaaccccttgggaagacaggaatggagtggcccctggagtgaaatttctgaagagtggcagcaactgactgcatcagatcgcaagaacctggggcttgttatgtctgatgatggagagttttggatgagcttggaggacttttgccgcaactttcacaaactgaatgtctgccgcaatgtgaacaaccctatttttggccgaaaggagctggaatcggtgttgggatgctggactgtggatgatgatcccctgatgaaccgctcaggaggctgctataacaaccgtgataccttcctgcagaatccccagtacatcttcactgtgcctgaggatgggcacaaggtcattatgtcactgcagcagaaggacctgcgcacttaccgccgaatgggaagacctgacaattacatcattggctttgagctcttcaaggtggagatgaaccgcaaattccgcctccaccacctctacatccaggagcgtgctgggacttccacctatattgacacccgcacagtgtttctgagcaagtacctgaagaagggcaactatgtgcttgtcccaaccatgttccagcatggtcgcaccagcgagtttctcctgagaatcttctctgaagtgcctgtccagctcagggaactgactctggacatgcccaaaatgtcctgctggaacctggctcgtggctacccgaaagtagttactcagatcactgttcacagtgctgaggacctggagaagaagtatgccaatgaaactgtaaacccatatttggtcatcaaatgtggaaaggaggaagtccgttctcctgtccagaagaatacagttcatgccatttttgacacccaggccattttctacagaaggaccactgacattcctattatagtacaggtctggaacagccgaaaattctgtgatcagttcttggggcaggttactctggatgctgaccccagcgactgccgtgatctgaagtctctgtacctgcgtaagaagggtggtccaactgccaaagtcaagcaaggccacatcagcttcaaggttatttccagcgatgatctcactgagctctaaatctgcaatcccagagaatcctgacaaagcgtgccacccttttattttccgtcaggtgccaggtcttagttaagattcacaatctttagaaagaatgagattcacaataattaactcttcctctcttctgataaattccccatacctcccaatccaagtagcatctgtagctacataacctatatacctccagcagctggacatggggaggcgacagtcctatctagacatcatacacatttgccaagaaaggatctctggggcttccgggggtgagattcaagtaggacaataacaagaggctggacaccctacagatgtctttgatgttttcagttgtttgatatatctcccctgtagggcatgttgaggaaggaggagggctgatcaaggccaagctggtctagcctgacatcctagctcctgactgaacactatagacttcccagcagcatttcacccagcagccagagccggctttaagtccccaacccttacagacaccactgccaccaccaccaaccacgaccaccaccaccaccaccactcaccaccatcatcacctccggaaagtgtagtcctgccctaacccaagtcacccccgacagtaaattttaccttcatgttgagaaagcttcctggtgcttaatcaagagctggagttcaatgagtcctagacagtgagaggggcctgagcttcagctcaatggaagcctgctgtgtgccacaagacggaaaagtggaagaagctgcagtgggagacaaagcctcggtcccccacccatccacacacacctacactcacacacgcgcacatgggcgcgcacgaactaccattcaggcagtcagtgggcaagaggaaagataagtaagtaccatacacacctaaaagatgagagaattcatccagacatattacagccagtttggggcccctgactgcaatgtgaaacctctcgctgctgctaggtttacaaacaagcccattgtcctgtgcctcctaatatcatttgtactgaagaccccatctggggacttgagactttggtcccagcccagactcctcagacttttctctcagttgggatgcttcactcgctgggggtgtttgtttgccctctcatttttcagtacttctacagaattttctctagagtcagtcattatgaaatgtacttccctccatcttaacctatcaactttctgcccctccttcaaggcccagtataaatgccacctcctccatgaagccttccctaattccaccccaaacccccaccttcaacaatatttcaacgcttctgcaatgatgaaaaagaaacatagttgtagtacttagcctacctagaccagcaagcattcatttttagctcgctcattttttaccatgttttccagtctgtttaacttctgcagtgccttcactacactgccttacataaaccaaatcacaataaagttcatattcagtaca

SEQ ID NO: 946 - DNA, 3286 bp, Homo sapiens
  source 1..3286: mol_type = genomic DNA
gaacgccggggcggcccgaagatggcggcggtggctggatctggggctgccgcggctccgagctcactgctcctcgtggtgggcagcgagttcgggagcccggggctcctcacctacgtcctggaggagctcgaaagaggcatccggtcttgggatgtcgatcctggcgtctgcaaccttgatgaacagctcaaggtctttgtgtcccgacactctgccaccttctccagcattgtgaaaggccagcggagcctgcaccaccgtggagacaacctggagaccctggtcctcctgaacccatcagacaagtccctgtatgatgagctccggaaccttctgttggaccctgcctctcacaagctactggtgttggctgggccctgcctggaggagacgggggagctgctgctacagacagggggcttctcgcctcaccacttcctccaggtcctgaaggacagagagatccgggacatcctggccaccacgcccccacctgtgcagccgcccatactcaccatcacctgccccaccttcggtgactgggctcagctggcacccgctgtgcctggccttcagggggcgctccggctccagctgcggctgaaccccccggcgcagctgcccaactctgagggcctgtgcgaattcctggagtacgtggctgagtctctggagccaccgtcccccttcgagctgctggagcccccgacctccgggggcttcctcaggctgggccggccctgctgctacatcttccctggaggcctcggggatgccgccttcttcgccgtcaatggcttcactgtgctggtcaacggtggctcaaaccccaagtccagtttctggaagctggtgcggcacctggaccgcgtggatgccgtgctggtgacccaccctggcgccgacagcctccccggcctcaacagcctgctgcggcgcaaactggcggagcgctccgaggtggctgctggtgggggctcctgggacgacaggctgcgcaggctcatctcccccaacctgggggtcgtgttcttcaacgcctgcgaggccgcgtcgcggctggcgcgcggcgaggatgaggcggagctggcgctgagcctcctggcgcagctgggcatcacgcctctgccactcagccgcggccccgtgccagccaaacccaccgtgctcttcgagaagatgggcgtgggccggctggacatgtatgtgctgcacccgccctccgccggcgccgagcgcacgctggcctctgtgtgcgccctgctggtgtggcaccccgccggccccggcgagaaggtggtgcgcgtgctgttccccggttgcaccccgcccgcctgcctcctggacggcctggtccgcctgcagcacttgaggttcctgcgagagcccgtggtgacgccccaggacctggaggggccggggcgagccgagagcaaagagagcgtgggctcccgggacagctcgaagagagagggcctcctggccacccaccctagacctggccaggagcgccctggggtggcccgcaaggagccagcacgggctgaggccccacgcaagactgagaaagaagccaagaccccccgggagttgaagaaagaccccaaaccgagtgtctcccggacccagccgcgggaggtgcgccgggcagcctcttctgtgcccaacctcaagaagacgaatgcccaggcggcacccaagccccgcaaagcgcccagcacgtcccactctggcttcccgccggtggcaaatggaccccgcagcccgcccagcctccgatgtggagaagccagcccccccagtgcagcctgcggctctccggcctcccagctggtggccacgcccagcctggagctggggccgatcccagccggggaggagaaggcactggagctgcctttggccgccagctcaatcccaaggccacgcacaccctcccctgagtcccaccggagccccgcagagggcagcgagcggctgtcgctgagcccactgcggggcggggaggccgggccagacgcctcacccacagtgaccacacccacggtgaccacgccctcactacccgcagaggtgggctccccgcactcgaccgaggtggacgagtccctgtcggtgtcctttgagcaggtgctgccgccatccgcccccaccagtgaggctgggctgagcctcccgctgcgtggcccccgggcgcggcgctcggcttccccacacgatgtggacctgtgcctggtgtcaccctgtgaatttgagcatcgcaaggcggtgccaatggcaccggcacctgcgtcccccggcagctcgaatgacagcagtgcccggtcacaggaacgggcaggtgggctgggggccgaggagacgccacccacatcggtcagcgagtccctgcccaccctgtctgactcggatcccgtgcccctggcccccggtgcggcagactcagacgaagacacagagggctttggagtccctcgccacgaccctttgcctgaccccctcaaggtccccccaccactgcctgacccatccagcatctgcatggtggaccccgagatgctgccccccaagacagcacggcaaacggagaacgtcagccgcacccggaagcccctggcccgccccaactcacgcgctgccgcccccaaagccactccagtggctgctgccaaaaccaaggggcttgctggtggggaccgtgccagccgaccactcagtgcccggagtgagcccagtgagaagggaggccgggcacccctgtccagaaagtcctcaacccccaagactgccactcgaggcccgtcggggtcagccagcagccggcccggggtgtcagccaccccacccaagtccccggtctacctggacctggcctacctgcccagcgggagcagcgcccacctggtggatgaggagttcttccagcgcgtgcgcgcgctctgctacgtcatcagtggccaggaccagcgcaaggaggaaggcatgcgggccgtcctggacgcgctactggccagcaagcagcattgggaccgtgacctgcaggtgaccctgatccccactttcgactcggtggccatgcatacgtggtacgcagagacgcacgcccggcaccaggcgctgggcatcacggtgttgggcagcaacagcatggtgtccatgcaggatgacgccttcccggcctgcaaggtggagttctagccccatcgccgacacgccccccactcagcccagcccgcctgtccctagattcagccacatcagaaataaactgtgactacacttg

SEQ ID NO: 947 - DNA, 6400 bp, Homo sapiens
  source 1..6400: mol_type = genomic DNA
aggggcggaggtgacagcgggctggggactggcggctgcaactgcctgccgcgccgagggaccgccgggcggcggaaagcaggttataaaacatggaggctggctcagtggttcgagccatttttgacttctgccctagcgtatcagaagaactgccgctctttgtgggagatattattgaggtgctggcagtggtggatgaattttggcttctaggaaagaaggaggatgttacaggacaattccccagcagttttgtggaaattgtgaccattcccagtctaaaagagggagagaggctgtttgtgtgcatttgtgaattcacatcccaagagttggataatcttcccctccatcgaggtgacctggtgattctcgatggcattcccactgcaggctggctgcagggccgaagctgctggggcgcacggggcttcttcccatcttcatgtgtccgcgagctctgcctctcctcacagagccggcagtggcactcccagagcgccctgtttcagattccggaatattccatgggacaagcccgggccctaatggggctttctgctcagctggatgaagagctggacttcagggaaggggatgtgatcaccattattggagttcctgaaccaggctggtttgaaggggagttagagggccgaagaggcatttttccagaaggttttgtagagctgttggggcccctgaggactgtggatgagtcagtaagttctggaaatcaagatgactgcattgttaatggtgaagtagatacccctgtaggagaagaagagatagggccggatgaggatgaggaggagccagggacctatggggtcgccctgtacagattccaagccctggagccaaatgagctggatttcgaggtcggggataaaatccgaattctggcgaccttggaagatggctggctggaaggatccctgaagggcaggacaggcatctttccttaccggtttgtgaaattatgtcctgacacacgggtggaggaaaccatggctctgccccaggaaggcagccttgccaggatcccggaaacttctttggattgtttggagaacaccttaggagtagaggaacaaagacatgaaaccagtgaccatgaggccgaggagcctgactgcattatttctgaagcacccacttctcccctcggtcatctgacttcagagtatgacacagacagaaactcttatcaggacgaggacaccgcaggagggcccccgagaagcccaggcgtggagtgggaaatgcctcttgccacagactctcccacatctgaccctacagaagtagtcaatggtatttcctcccaacctcaggtcccttttcatcccaacttgcagaaaagccagtattattctacagtgggagggagccacccgcactcagaacagtaccccgaccttcttcccctagaagcaaggactagagactatgccagcctacctcccaaaagaatgtattcccagctaaaaactcttcagaagccagtgctccctctttacaggggctcttctgtttcagcttcaagggtagtcaaacccagacaatcaagtcctcagctccacaacctagcaagttatactaaaaagcaccacacgtccagtgtttactccatctcagagagattggagatgaagcctggtccgcaagcccaagggcttgttatggaagcagcaacacattcacagggagacggcagcactgacctggactcgaagctgacacaacagctgatcgagtttgagaagagcttggcagggcccggcacagagccagataaaattttacgccacttttcaatcatggactttaactctgagaaggatattgtccgaggttcctcaaagttaatcaccgagcaggagctgccggaaaggagaaaggccctaaggccaccgccacctcgtccctgtactccggtatccacttctccccatttgctggttgaccagaacctaaaacctgcaccacccttggtggtgcgaccctctcgcccagctcccctgcctccctcagcacagcagagaacgaatgcggtatcccccaagctcctatctcgacaccgtcctacctgtgagaccttagaaaaggagggccctggtcatatgggaaggagtctggaccagacctccccatgccccttagtgctggtgaggattgaggaaatggagcgggacttggatatgtacagtagagctcaagaagagctaaacctcatgctggaggagaagcaggatgaatcatcaagagcagagaccctcgaggatctcaagttctgtgaaagtaacattgaaagtttgaatatggaactccagcaactaagagaaatgacgctcctctcctcccagtcttcatcactggtggccccttctgggtctgtgtctgccgaaaatccagagcagaggatgctggagaagagagccaaggtcatagaagaacttcttcagacagaaagagactacattcgggatctggaaatgtgtattgagcggatcatggtacccatgcagcaggcacaggtaccaaacattgattttgagggactttttggaaatatgcagatggtgattaaggtctcgaagcaattattggctgctctggaaatcagcgatgctgtaggacctgtgtttcttggtcaccgggatgagcttgagggaacatacaagatttactgccagaatcatgatgaggccattgcgctgcttgaaatctacgagaaggatgagaagatccagaagcatcttcaggactccttggcagatctgaagagcctatacaacgaatggggatgcacaaattatattaacctgggctccttcctcatcaaaccagtacagagagtaatgcgttacccgctgttgctaatggagttgctgaattccaccccagaatcccacccagataaagtgcctttaaccaatgcagtccttgcggtcaaggaaatcaacgttaacattaatgaatataaacggcgaaaggacctggtcctcaagtaccgtaagggtgatgaagatagccttatggagaaaatttccaaactgaacatccactccatcatcaagaaatccaaccgagttagcagtcacctgaagcatctcactggctttgctcctcagataaaagatgaagtatttgaagaaacagaaaaaaacttccgaatgcaagaaagattgattaagtcttttatccgagacctgtctctctacctccagcacatccgggagtccgcatgtgtgaaagtggtggctgctgtgagcatgtgggatgtgtgcatggagagaggacaccgggacctggagcagtttgagagggtgcatcgctacatcagtgaccagctcttcacaaactttaaggagaggacagagcggcttgtcatctcccccttaaatcagttactgagcatgtttacagggccccataagctggtacagaaacgctttgacaagctcctggacttctataactgtacagaacgggcagaaaagctaaaggacaagaagaccctggaggagctgcagtcggcccggaacaactatgaggccctgaatgcacagctgctggatgagctgcccaagttccaccagtacgcccagggcctcttcaccaactgtgtccacggctatgctgaagcccactgtgactttgtgcaccaggctctggagcaattaaagccactgctttcgttactcaaagtggctggcagagagggaaaccttattgccatcttccacgaagagcacagcagagttctgcagcaactccaggtttttaccttcttcccggagtctcttccagctaccaagaagccatttgagaggaaaaccattgaccgccagtctgctcgaaagccactcctgggcctgccaagttacatgctacagtcagaagaactccgggcctccctcctggccaggtatccccctgaaaaactcttccaggcagaacggaacttcaatgctgctcaagacttggatgtctcacttttggaaggtgacctggtgggtgtgattaagaaaaaagaccccatgggcagccagaaccgctggctgattgacaatggagtcaccaaaggcttcgtgtacagctctttcctaaagccctacaatcctcgccgcagccactccgatgcctccgtgggtagccactcctccacagagtctgagcacggcagctcctcccccaggttcccacgccagaacagcggcagcaccctgaccttcaaccccagcagcatggctgtatcctttacctcggggtcttgccagaagcagcctcaagatgcatctcctccgccaaaagaatgtgaccaaggaactctcagtgcatccctaaatccgagtaattcagagagtagtccttccagatgcccttcagacccagactccacctcccagccaaggtcaggggactctgcagatgtagctagagatgtaaagcaacccactgccacgccgaggagctaccggaacttcaggcatccagaaatagttggctactccgtaccaggacgaaatgggcaaagtcaagacctcgtcaaaggatgtgcaagaacagcccaggctccggaagacagaagtacagagccagatggcagtgaggcagaaggcaaccaggtctattttgctgtctacaccttcaaggcacgaaacccaaatgagctgagcgtgtcagccaatcagaaactcaagatcctcgagtttaaagatgttacaggaaatacagagtggtggttagctgaggttaacgggaagaagggctacgttccctccaattatatccgcaaaaccgagtacacctgagcccacgttgcctgccacccagccttgctgcctttgctttcagtccgccgagggttctggcggcccaccgagagggcgcctgctcctgagacacaggccctgtctgcgttgcttaaccatggcatggtggagcacaccacagatcttgttctcctcgattgggttgtaaaccttgatgctcactagaatctctagaatttgaaatggaccctggggctttgcaaatgacttagtgactatgagaagagagacaagtcttagagctggcttttggaaaggagaaacttgcagtcagaagcccagtgtcctatgtatgcaggaagctgtgctctagcaatagacagtgttggtaatggttgtgctgtacggcgtttggggtggccccatgttccatgctcagctgaccggatgccaactcagatgaaaagaattcatggctctgggcaccccgtgaggcagtgcttgcacatggctgggagtttgtcgggattgaaccaaacctagtgcttcaaagctcctgggacacctccagtgtccagcacacattctcatacatactgcccctaatttctaaagtccctaaagcactacattctgtaaccttgtttcttttactccattcccagattagttatgcaaaattcaactgcgttctacttttagaagtgtttagggtctttattttctgttgacccttcatctgaaagattctcttcccttgttaggtacaatcactgcccccccgcttttttttttgagatggggtcttgctatgttgcccaggctggtcttaaacgcctgggctcaagcaaccctcccgcctccctgctgagattacaggtgtaagccaccataccgcaacctcaatgacacctttctgatggtctttacacagtctgtgatgtctggtggcccccctgccctggactcaataattgatagattttcctagagtaacagtatgagagctccagccattccattaaaagtattagttctgctttgagctgaaaccagttgagcctaatggaagactggatgtctttcttcttcatccaagcaccctaatgactgtttagttacatccatagatgcagacaacataacacctgtgacttacttgaattgggataagccattccagaagtagcttatcctagacttggaaataagatttttttcaccactaacttccatgcttcagagatgacattcaaagccagattcccaagtgcctgatcatacctcccagtctcaggaagatatttgcttaccccttagaccaagaatcttaagatcttccccagctatgaagcctatcttggaatgggaaaccatgaaatttgtcttttaaaagaaagggaagaaatagccttacagcccctgttcctccaagtgcacatttagccttaaaatcctgggagtcgggagacaccgtggagtcctaacatccacagtgtctgctggtcgtggtcagaaggcagtaatgcaagagtccttttgtgaagagtgtttctatgtagagatgtttatatttaagtagttcttttataaataaaagcatttctaatggc

SEQ ID NO: 948 - DNA, 3801 bp, Homo sapiens
  source 1..3801: mol_type = genomic DNA
ttcagcaaaaggtctttcctcccttgctctctcctccaaccactggctcagcctctccgcccgctgcctgtgaatgatgcaatggaaggtgtgctggggtcgccctgtgtcccgtgcataggagcatctcagcctccaggtcctctcctttggggctcacggcacccccatgctacgaaccgcaggcagggacggcctctgtcgcctgtccacctacttggaagaactcgaggctgtggaactgaagaagttcaagttatacctggggaccgcgacagagctgggagaaggcaagatcccctggggaagcatggagaaggccggtcccctggaaatggcccagctgctcatcacccacttcgggccagaggaggcctggaggttggctctcagcacctttgagcggataaacaggaaggacctgtgggagagaggacagagagaggacctggtgagggataccccacctggtggcccgtcctcacttgggaaccagtcaacatgccttctggaagtctctcttgtcactccaagaaaagatccccaggaaacctacagggactatgtccgcaggaaattccggctcatggaagaccgcaatgcgcgcctaggggaatgtgtcaacctcagccaccggtacacccggctcctgctggtgaaggagcactcaaaccccatgcaggtccagcagcagcttctggacacaggccggggacacgcgaggaccgtgggacaccaggctagccccatcaagatagagaccctctttgagccagacgaggagcgccccgagccaccgcgcaccgtggtcatgcaaggcgcggcagggataggcaagtccatgctggcacacaaggtgatgctggactgggcggacgggaagctcttccaaggcagatttgattatctcttctacatcaactgcagggagatgaaccagagtgccacggaatgcagcatgcaagacctcatcttcagctgctggcctgagcccagcgcgcctctccaggagctcatccgagttcccgagcgcctccttttcatcatcgacggcttcgatgagctcaagccttctttccacgatcctcagggaccctggtgcctctgctgggaggagaaacggcccacggagctgcttcttaacagcttaattcggaagaagctgctccctgagctatctttgctcatcaccacacggcccacggctttggagaagctccaccgtctgctggagcaccccaggcatgtggagatcctgggcttctctgaggcagaaaggaaggaatacttctacaagtatttccacaatgcagagcaggcgggccaagtcttcaattacgtgagggacaacgagcctctcttcaccatgtgcttcgtccccctggtgtgctgggtggtgtgtacctgcctccagcagcagctggagggtggggggctgttgagacagacgtccaggaccaccactgcagtgtacatgctctacctgctgagtctgatgcaacccaagccgggggccccgcgcctccagcccccacccaaccagagagggttgtgctccttggcggcagatgggctctggaatcagaaaatcctatttgaggagcaggacctccggaagcacggcctagacggggaagacgtctctgccttcctcaacatgaacatcttccagaaggacatcaactgtgagaggtactacagcttcatccacttgagtttccaggaattctttgcagctatgtactatatcctggacgagggggagggcggggcaggcccagaccaggacgtgaccaggctgttgaccgagtacgcgttttctgaaaggagcttcctggcactcaccagccgcttcctgtttggactcctgaacgaggagaccaggagccacctggagaagagtctctgctggaaggtctcgccgcacatcaagatggacctgttgcagtggatccaaagcaaagctcagagcgacggctccaccctgcagcagggctccttggagttcttcagctgcttgtacgagatccaggaggaggagtttatccagcaggccctgagccacttccaggtgatcgtggtcagcaacattgcctccaagatggagcacatggtctcctcgttctgtctgaagcgctgcaggagcgcccaggtgctgcacttgtatggcgccacctacagcgcggacggggaagaccgcgcgaggtgctccgcaggagcgcacacgctgttggtgcagctaccagagaggaccgttctgctggacgcctacagtgaacatctggcagcggccctgtgcaccaatccaaacctgatagagctgtctctgtaccgaaatgccctgggcagccggggggtgaagctgctctgtcaaggactcagacaccccaactgcaaacttcagaacctgaggctgaagaggtgccgcatctccagctcagcctgcgaggacctctctgcagctctcatagccaataagaatttgacaaggatggatctcagtggcaacggcgttggattcccaggcatgatgctgctttgcgagggcctgcggcatccccagtgcaggctgcagatgattcagttgaggaagtgtcagctggagtccggggcttgtcaggagatggcttctgtgctcggcaccaacccacatctggttgagttggacctgacaggaaatgcactggaggatttgggcctgaggttactatgccagggactgaggcacccagtctgcagactacggactttgtggctgaagatctgccgcctcactgctgctgcctgtgacgagctggcctcaactctcagtgtgaaccagagcctgagagagctggacctgagcctgaatgagctgggggacctcggggtgctgctgctgtgtgagggcctcaggcatcccacgtgcaagctccagaccctgcggttgggcatctgccggctgggctctgccgcctgtgagggtctttctgtggtgctccaggccaaccacaacctccgggagctggacttgagtttcaacgacctgggagactggggcctgtggttgctggctgaggggctgcaacatcccgcctgcagactccagaaactgtggctggatagctgtggcctcacagccaaggcttgtgagaatctttacttcaccctggggatcaaccagaccttgaccgacctttacctgaccaacaacgccctaggggacacaggtgtccgactgctttgcaagcggctgagccatcctggctgcaaactccgagtcctctggttatttgggatggacctgaataaaatgacccacagtaggttggcagcgcttcgagtaacaaaaccttatttggacattggctgctgaatggtcctatctgctggctctcccctgagatctggacagaggaagatgggagggtgctcatcacccccccagcataatgatcagcctccttcctagagacagactcatgcagattgagatcaaaagtccctctgcttgggatcaaattaatgtttgacagagctggccaggcgtggtggctcatgtatgtaatcctagcacttcgagaggccgaggcaggtggatcacgaggtcaggagtttgagattagcctggccaagatggtgaaaccctgtctctactaaaaataaaaaaaaattagccaggcatggtggcgggcacctgtagtcccagctactcaggaggctgaggcaggagaatcgcttgaacccgggaggtggaggttgcagtgagccgagatcgcgccactgcactccagcctgggcgacagagtgggactccatctc

SEQ ID NO: 949 - DNA, 4116 bp, Homo sapiens
  source 1..4116: mol_type = genomic DNA
ctggtctgcggctgagatacacagagcgacagagacatttattgttatttgttttttggtggcaaaaagggaaaatggcgaacgactcccctgcaaaaagtctggtggacatcgacctctcctccctgcgggatcctgctgggatttttgagctggtggaagtggttggaaatggcacctatggacaagtctataagggtcgacatgttaaaacgggtcagttggcagccatcaaagttatggatgtcactgaggatgaagaggaagaaatcaaactggagataaatatgctaaagaaatactctcatcacagaaacattgcaacatattatggtgctttcatcaaaaagagccctccaggacatgatgaccaactctggcttgttatggagttctgtggggctgggtccattacagaccttgtgaagaacaccaaagggaacacactcaaagaagactggatcgcttacatctccagagaaatcctgaggggactggcacatcttcacattcatcatgtgattcaccgggatatcaagggccagaatgtgttgctgactgagaatgcagaggtgaaacttgttgactttggtgtgagtgctcagctggacaggactgtggggcggagaaatacgttcataggcactccctactggatggctcctgaggtcatcgcctgtgatgagaacccagatgccacctatgattacagaagtgatctttggtcttgtggcattacagccattgagatggcagaaggtgctccccctctctgtgacatgcatccaatgagagcactgtttctcattcccagaaaccctcctccccggctgaagtcaaaaaaatggtcgaagaagttttttagttttatagaagggtgcctggtgaagaattacatgcagcggccctctacagagcagcttttgaaacatccttttataagggatcagccaaatgaaaggcaagttagaatccagcttaaggatcatatagatcgtaccaggaagaagagaggcgagaaagatgaaactgagtatgagtacagtgggagtgaggaagaagaggaggaagtgcctgaacaggaaggagagccaagttccattgtgaacgtgcctggtgagtctactcttcgccgagatttcctgagactgcagcaggagaacaaggaacgttccgaggctcttcggagacaacagttactacaggagcaacagctccgggagcaggaagaatataaaaggcaactgctggcagagagacagaagcggattgagcagcagaaagaacagaggcgacggctagaagagcaacaaaggagagagcgggaagctagaaggcagcaggaacgtgaacagcgaaggagagaacaagaagaaaagaggcgtctagaggagttggagagaaggcgcaaagaagaagaggagaggagacgggcagaagaagaaaagaggagagttgaaagagaacaggagtatatcaggcgacagctagaagaggagcagcggcacttggaagtccttcagcagcagctgctccaggagcaggccatgttactggagtgccgatggcgggagatggaggagcaccggcaggcagagaggctccagaggcagttgcaacaagaacaagcatatctcctgtctctacagcatgaccataggaggccgcacccgcagcactcgcagcagccgccaccaccgcagcaggaaaggagcaagccaagcttccatgctcccgagcccaaagcccactacgagcctgctgaccgagcgcgagaggtggaagatagatttaggaaaactaaccacagctcccctgaagcccagtctaagcagacaggcagagtattggagccaccagtgccttcccgatcagagtctttttccaatggcaactccgagtctgtgcatcccgccctgcagagaccagcggagccacaggtacagtggtcccacctggcatctctcaagaacaatgtttcccctgtctcgcgatcccattccttcagtgacccttctcccaaatttgcacaccaccatcttcgttctcaggacccatgtccaccttcccgcagtgaggtgctcagtcagagctctgactctaagtcagaggcgcctgaccctacccaaaaggcttggtctagatcagacagtgacgaggtgcctccaagggttcctgtgagaacaacatctcgctcccctgttctgtcccgtcgagattccccactgcagggcagtgggcagcagaatagccaggcaggacagagaaactccaccagcagtattgagcccaggcttctgtgggagagagtggagaagctggtgcccagacctggcagtggcagctcctcagggtccagcaactcaggatcccagcccgggtctcaccctgggtctcagagtggctccggggaacgcttcagagtgagatcatcatccaagtctgaaggctctccatctcagcgcctggaaaatgcagtgaaaaaacctgaagataaaaaggaagttttcagacccctcaagcctgctgtaaggattgatctgaccgcactggccaaagagcttcgagcagtggaagatgtacggccacctcacaaagtaacggactactcctcatccagtgaggagtcggggacgacggatgaggaggacgacgatgtggagcaggaaggggctgacgagtccacctcaggaccagaggacaccagagcagcgtcatctctgaatttgagcaatggtgaaacggaatctgtgaaaaccatgattgtccatgatgatgtagaaagtgagccggccatgaccccatccaaggagggcactctaatcgtccgccagactcagtccgctagtagcacactccagaaacacaaatcttcctcctcctttacaccttttatagaccccagattactacagatttctccatctagcggaacaacagtgacatctgtggtgggattttcctgtgatgggatgagaccagaagccataaggcaagatcctacccggaaaggctcagtggtcaatgtgaatcctaccaacactaggccacagagtgacaccccggagattcgtaaatacaagaagaggtttaactctgagattctgtgtgctgccttatggggagtgaatttgctagtgggtacagagagtggcctgatgctgctggacagaagtggccaagggaaggtctatcctcttatcaaccgaagacgatttcaacaaatggacgtacttgagggcttgaatgtcttggtgacaatatctggcaaaaaggataagttacgtgtctactatttgtcctggttaagaaataaaatacttcacaatgatccagaagttgagaagaagcagggatggacaaccgtaggggatttggaaggatgtgtacattataaagttgtaaaatatgaaagaatcaaatttctggtgattgctttgaagagttctgtggaagtctatgcgtgggcaccaaagccatatcacaaatttatggcctttaagtcatttggagaattggtacataagccattactggtggatctcactgttgaggaaggccagaggttgaaagtgatctatggatcctgtgctggattccatgctgttgatgtggattcaggatcagtctatgacatttatctaccaacacatatccagtgtagcatcaaaccccatgcaatcatcatcctccccaatacagatggaatggagcttctggtgtgctatgaagatgagggggtttatgtaaacacatatggaaggatcaccaaggatgtagttctacagtggggagagatgcctacatcagtagcatatattcgatccaatcagacaatgggctggggagagaaggccatagagatccgatctgtggaaactggtcacttggatggtgtgttcatgcacaaaagggctcaaagactaaaattcttgtgtgaacgcaatgacaaggtgttctttgcctctgttcggtctggtggcagcagtcaggtttatttcatgaccttaggcaggacttctcttctgagctggtagaagcagtgtgatccagggattactggcctccagagtcttcaagatcctgagaacttggaattccttgtaactggagctc

SEQ ID NO: 950 - DNA, 1622 bp, Homo sapiens
  source 1..1622: mol_type = genomic DNA
gaggcccgaggggcggcccaggactcgaggatgtacacgctgctgtcgggcttgtacaagtacatgtttcagaaggacgagtactgcatcctgatcctgggcctggacaatgctgggaagacgaccttcctggagcagtcgaaaacccgatttaacaagaactacaaggggatgagtctatccaaaatcaccaccaccgtgggcctaaacatcggcactgtggatgtgggaaaggctcggctcatgttctgggacttaggagggcaggaagagctgcagtctttgtgggacaagtattatgcggagtgtcacggcgtcatctacgtcattgactccaccgacgaggagaggctggctgagtccaagcaggcgtttgagaaggtggtgaccagcgaggcgctgtgcggtgtccccgtcttggtgctggccaacaagcaggatgtggagacgtgcctctcaatccctgacatcaagacggccttcagcgactgcaccagcaagatcggcaggcgagattgcctgacccaggcctgctcggccctcacaggcaaaggggtgcgcgagggcatcgagtggatggtgaagtgtgtcgtgcggaatgtgcaccggccgccgcggcagagggacatcacgtaggcgcagccgcgctgccgtcgggacggctggtcccctggtgctggaggagtggcctcctgttggctcccatgctgctgatctggggggtgggtttgctttgctttggggttcttctatttactttgttttctcgaagacaaactttcctctatgtctggaaaagcgtaggcatccggaggctttggaggggagtctggcagcccggctggcccaggccctgcagcggcagcctttccacagggcgcagcggcggcctttcgaggccctttctggggggtctgagggagacctggttgggaattggggctccagtgctcaggctggcttgggctgcatgaggacagccctgtgggaccctcgggagaccccgtggctgtctccgccccatcgaggaggaggcccgtcagccatggctgccatctggcttctgccctgtgaccccgtgaccccgtgaccccgaagtggtctggggctgatcttgccttgaggaagacccaggccatgttcccaaaggccagcgggggccctggattgtgatgcagcctcgggacagggctgaggcctgcgggggaagacctataccccacgcctgggcctggcttcacctcaccctaatcccccgggagggagctgactgatgcaaaaagctgagggggcctgctgggagtggctgtttttatgccccagccccgcaagttggggagtgtttgtgggggtccagagccctcccccagccaggagagaacctcccggaggggttctctgtggggccctgtgtcccctgctcgggagtaaggctggtcctggggtcctccctgcacggaccccactgggcctgccgagtgctgtgttcttcctcagtctggctgtgggcaggagcggcctgcccagtgtcacccagggtgagtgcaaaataaagacggcgagtgtggctctgtccatcccttccctcctggagggtggaggctcctggctgttggacacgg

SEQ ID NO: 951 - DNA, 2917 bp, Homo sapiens
  source 1..2917: mol_type = genomic DNA
ggcggcggggctgggcggtgcttccgcctgcgcgaggccgcgccgggccgcttggaggcgcccggtgcagtcgggaacccgcgctaggtttcgccggccgcgcggccagatgaggggggcgatggagctggagcctgagctgctgttgcaggaggcccgcgagaacgtggaggcagcgcagagctaccggcgggagctgggtcaccggcttgaggggctgcgtgaggcgcggaggcagatcaaagaaagtgcatcacagacaagggatgttctcaaacagcattttaatgatttaaagggaacccttggaaagctcctggatgagcgattggtgacccttttgcaagaggtggacaccattgaacaggagaccattaaaccactagatgactgccagaagctcatagaacacggagtcaacactgcagaggacttagtccgagaaggtgaaatcgccatgcttggtggtgtgggagaagagaatgagaaactgtggagctttaccaaaaaggcctcgcacattcagttggacagcttaccagaagtacctttactggttgatgtgccttgtttatctgctcagttggatgactcaattcttaacatagtgaaagaccacatttttaagcatggaacagtagcatctcgcccaccagtacagatagaagaactaatagagaaacctggaggcatcattgtacgatggtgtaaggtggatgatgactttacagcccaagattacaggctccagtttcgtaaatgtacttcaaatcattttgaggatgtatatgtaggttctgaaactgaattcatagtattgcacatagaccccaacgttgattaccagttcagagtctgcgcccgaggagatggccgacaggagtggagtccttggagtgtcccccagataggtcattccacattggtgcctcatgagtggacagctggttttgaggggtacagtctgagcagtcgaagaaatatagcacttcggaacgattctgaatcatcgggtgttctctactccagagctccgacttatttctgtgggcagacattaacattcagagttgaaactgtgggacagccagacagaagagatagcataggagtgtgtgcagaaaaacaggatggatatgactctctgcagcgggatcaagctgtgtgcattagtacaaatggtgcagtttttgtcaatggaaaagaaatgacaaatcagttacccgcagttacttctgggtccactgtcacgtttgacattgaagccgtgactctaggaaccaccagtaataatgaaggtggacacttcaagcttcgagtaactataagttcaaataatagagaagtggtttttgactggttacttgatcagtcttgtggttctctttactttggatgctcatttttctatcctggatggaaagtgttagtgttttagatgtttgggtgcttggctttggttttcagggtctaacgtagctgtcctcagcccagcgtagttgtaattgctttaaaaaaaaagttgaattcatctctaacttaggccattggaaagtgtttactggattcattttgtaatattttagcaaaaagagacttcaatgttgtggacaaaatcatacaattcagtcaattttatttttagcatactgttaaatatcacatcacaataaaaatcaaattggcattaaaagtatagaagatataggaagttctatacccttccactgtacttctcaaagttggttattagaccaggaaaacttaatgtaatattatttttaaaatcatcttaaaggatccaagtccatgtaactctttagaacaagaggaataggtcagatagaagaagctgtgtaatgtattaatacatccgttcatgtgctgtccacatgaatgtgttgactgtgctctccatgttcaggtatttgtaagcagtgttgacttttatcccctcttcagtaatctttaagtccccaaaacattataactttttctttttttgttgagacggagtctcactcttgtcactcaggctggagtgcagtggtgtgatctcagttcactgcaacctctgcctcccacgttcaagcgatcctcctgcctcaggctcctgagtagctgggattacaggcgtcggccaccacacctggctaatttttgtatttttagtagagacagggtttcaccatgttggccaggctggtcttgaactcctgacctcaggtgttccacccacctcagccttccaaagtgctaggattacaggtgtgagccactgcagtggaccaatttttgtatttttttaaatgcttgaccaagtgtctaaaataggcaagtagtaccttttgttctttcattgcaatttgatacagtataggctacagtatttttacagggtaaaactagttatggcagtagtatgcacagcagtgttagccatttcatatgtatgtaatatgcacgtgtgtatccaatctgcctgtgacatgcattttactctttgcagagaatgagctgcagtccagtttaatgtcagtttaataagtggtctctttttagcagagcaaaaaaatatagcgtaaatacttattttttttaaaaacttacttaaatttgtgtgtaaaatatttatttgaaggactttaatatgtaaaaataattgtcttctatgccaccctacagattttattttaatgtgaattatttttttcatttcatttttaccagtatagtaaaaaagtagaaaagcaagtatgatatttttgtaagataatttatttggggattcatgttccctgttagacaatcatgaccttttctacttgtctttttatatataagtagtagatttccacttgtttagggattaagaagatgttctagaatgtagataccttgtccagccataggaatc

SEQ ID NO: 952 - DNA, 2804 bp, Homo sapiens
  source 1..2804: mol_type = genomic DNA
gaaatggggcggggagagagtgacaccacccctctgcctgtggctggattggtgggcgtggcgggggcgtggcgatgcctgccctccggacaaggcggggttggtggccagggcgaccgcggggcgggccagcgccgggggtcgtggccgggacacgtggtacggaaccggcgccgcgcttgctgctggtaacagggccttgcctagtgggccttccttcccaggtcgcccctcagtctccactagagacaggactgaccagttgctcttccttccaagaaccttcgagatctgcggtctggggtctggttgaaagatggcggccctcactaccctgtttaagtacatagatgaaaatcaggatcgctacattaagaaactcgcaaaatgggtggctatccagagtgtgtctgcgtggccggagaagagaggcgaaatcaggaggatgatggaagttgctgctgcagatgttaagcagttggggggctctgtggaactggtggatatcggaaaacaaaagctccctgatggctcggagatcccgctccctcctattctgctcggcaggctgggctccgacccacagaagaagaccgtgtgcatttacgggcacctggatgtgcagcctgcagccctggaggacggctgggacagcgagcccttcaccctggtggagcgagacggcaagctgtatgggagaggttcgactgatgataagggcccggtggccggctggataaacgccctggaagcgtatcagaaaacaggccaggagattcctgtcaacgtccgattctgcctcgaaggcatggaggagtcaggctctgagggcctagacgagctgatttttgcccggaaagacacattctttaaggatgtggactatgtctgcatttctgacaattactggctgggaaagaagaagccctgcatcacctacggcctcaggggcatttgctactttttcatcgaggtggagtgcagcaacaaagacctccattctggggtgtacgggggctcggtgcatgaggccatgactgatctcattttgctgatgggctctttggtggacaagagggggaacatcctgatccccggcattaacgaggccgtggccgccgtcacggaagaggagcacaagctgtacgacgacatcgactttgacatagaggagtttgccaaggatgtgggggcgcagatcctcctgcacagccacaagaaagacatcctcatgcaccgatggcggtacccgtctctgtccctccatggcatcgaaggcgccttctctgggtctggggccaagaccgtgattcccaggaaggtggttggcaagttctccatcaggctcgtgccgaacatgactcctgaagtcgtcggcgagcaggtcacaagctacctaactaagaagtttgctgaactacgcagccccaatgagttcaaggtgtacatgggccacggtgggaagccctgggtctccgacttcagtcaccctcattacctggctgggagaagagccatgaagacagtttttggtgttgagccagacttgaccagggaaggcggcagtattcccgtgaccttgacctttcaggaggccacgggcaagaacgtcatgctgctgcctgtggggtcagcggatgacggagcccactcccagaatgaaaagctcaacaggtataactacatagagggaaccaagatgctggccgcgtacctgtatgaggtctcccagctgaaggactaggccaagccctctgtgtgccatctccaatgagaaggaatcctgccctcacctcacccttttccaacttgcccagggaagtggaggttccctctttcctttccctcttgtcaggtcatccatgactttagagaacagacacaagtgtatccagctgtccacgggtggagctacccgttgggcttatgagtgacctggagtgacagctgagtcaccctgggtaagttctcagagtggtcaggatggcttgacctgcagaagatacccaaggtccaaaagcacaaggtctgcggaaagttctggttgtcggccgggcaccacggctcacacctataatcgagcactttgggaggccaagacaggaggatcacttgaggccaggagtctgagacaagcctaggcaacaaaacaagactctgtctctacaaaaagtttaagaaatgagccagacatggtggtgtatgcctgtagtcccagccactcagaaggctgaggcaggaggatcgcttgagaccaagagtttgagcctgcggtgagctgtgaatgcaccacggcactcaagcctgggcaatgtagcaagatcctgtctctacaagaaattttttaaaaatgagccaagtgtggtggtgcatgcctgtagttccagctactcaggacactgacgtaggagggttgcttgagactgagagttggaggctgcgatgagccatgaatgccccactgcactccagcctgggcgacagaacgagaccccatctcaaaaaaaataagttctggttgtcattgaattgggataaacagagagcttgatgctttctgccttctgtctcaggtgatgcattgcacatttgggatatttggaaaggaaatgaggaaagaaattagggcctcctctgatctctcgctatctgcgggtcctgtccttttctcaagaccttcaccattactggcattttcctgtcttctctttagtatgatccctcaaaacctcactaactggaaggatgattttgtctcagtttgtactcctaaataaaaagtaaacatgacacctctaaaagaa

SEQ ID NO: 953 - DNA, 6330 bp, Homo sapiens
  source 1..6330: mol_type = genomic DNA
atggctgaggtcaccgtcccaagggtgtatgtcgtgtttggcatccattgcatcatggcgaaggcatcttcagatgtgcaggtttcaggctttcatcggaaaatccagcacgttaaaaatgaactttgccacatgttgagcttggaggaggtggccccagtgctgcagcagacattacttcaggacaacctcttgggcagggtacattttgaccaatttaaagaagcattaatactcatcttgtccagaactctgtcaaatgaagaacactttcaagaaccagactgctcactagaagctcagcccaaatatgttagaggtgggaagcgttacggacgaaggtccttgcccgagttccaagagtccgtggaggagtttcctgaagtgacggtgattgagccactggatgaagaagcgcggccttcacacatcccagccggtgactgcagtgagcactggaagacgcaacgcagtgaggagtatgaagcggaaggccagttaaggttttggaacccagatgacttgaatgcttcacagagtggatcttcccctccccaagactggatagaagagaaactgcaagaagtttgtgaagatttggggatcacccgtgatggtcacctgaaccggaagaagctggtctccatctgtgagcagtatggtttacagaatgtggatggagagatgctcgaggaagtattccataatcttgatcctgacggtacaatgagtgtagaagattttttctatggtttgtttaaaaatggaaaatctcttacaccatcagcatctactccatatagacaactaaaaaggcacctttccatgcagtctttcgatgagagtggacgacgtaccacaacctcatcagcaatgacaagtaccattggctttcgggtcttctcctgcctggatgatgggatgggccatgcatctgtggagagaatactggacacctggcaggaagagggcattgagaacagccaggagatcctgaaggccttggatttcagcctcgatggaaacatcaatttgacagaattaacactggcccttgaaaatgaacttttggttaccaagaacagcattcaccaggcggctctggccagctttaaggctgaaatccggcatttgttggaacgagttgatcaggtggtcagagaaaaagagaagctacggtcagatctggacaaggccgagaagctcaagtctttaatggcctcggaggtggatgatcaccatgcggccatagagcggcggaatgagtacaacctcaggaaactggatgaagagtacaaggagcgaatagcagccttaaaaaatgaactccgaaaagagagagagcagatcctgcagcaggcaggcaagcagcgtttagaacttgaacaggaaattgaaaaggcaaaaacagaagagaactatatccgggaccgccttgccctctctttaaaggaaaacagtcgtctggaaaatgagcttctagaaaatgcagagaagttggcagaatatgagaatctgacaaacaaacttcagagaaatttggaaaatgtgttagcagaaaagtttggtgacctcgatcctagcagtgctgagttcttcctgcaagaagagagactgacacagatgagaaatgaatatgagcggcagtgcagggtactacaagaccaagtagatgaactccagtctgagctggaagaatatcgtgcacaaggcagagtgctcaggcttccgttgaagaactcaccgtcagaagaagttgaggctaacagcggtggcattgagcccgaacacgggctcggttctgaagaatgcaatccattgaatatgagcattgaggcagagctggtcattgaacagatgaaagaacaacatcacagggacatatgttgcctcagactggagctcgaagataaagtgcgccattatgaaaagcagctggacgaaaccgtggtcagctgcaagaaggcacaggagaacatgaagcaaaggcatgagaacgaaacgcacaccttagaaaaacaaataagtgaccttaaaaatgaaattgctgaacttcaggggcaagcagcagtgctcaaggaggcacatcatgaggccacttgcaggcatgaggaggagaaaaaacaactgcaagtgaagcttgaggaggaaaagactcacctgcaggagaagctgaggctgcaacatgagatggagctcaaggctagactgacacaggctcaagcaagctttgagcgggagagggaaggccttcagagtagcgcctggacagaagagaaggtgagaggcttgactcaggaactagagcagtttcaccaggagcagctgacaagcctggtggagaaacacactcttgagaaagaggagttaagaaaagagctcttggaaaagcaccaaagggagcttcaggagggaagggaaaaaatggaaacagagtgtaatagaagaacctctcaaatagaagcccagtttcagtctgattgtcagaaagtcactgagaggtgtgaaagcgctctgcaaagcctggaggggcgctaccgccaagagctgaaggacctccaggaacagcagcgtgaggagaaatcccagtgggaatttgagaaggacgagctcacccaggagtgtgcggaagcccaggagctgctgaaagagactcttaagagagagaaaacaacttctctggtcctgacccaggagagagagatgctggagaaaacatacaaagaacatttgaacagcatggtcgtcgagagacagcagctactccaagacctggaagacctaagaaatgtatctgaaacccagcaaagcctgctgtctgaccagatacttgagctgaagagcagtcacaaaagggaactgagggagcgtgaggaggtcctgtgccaggcaggggcttcggagcagctggccagccagcggctggaaagactagaaatggaacatgaccaggaaaggcaggaaatgatgtccaagcttctagccatggagaacattcacaaagcgacctgtgagacagcagatcgagaaagagccgagatgagcacagaaatctccagacttcagagtaaaataaaggaaatgcagcaggcaacatctcctctctcaatgcttcagagtggttgccaggtgataggagaggaggaggtggaaggagatggagccctgtccctgcttcagcaaggggagcagctgttggaagaaaatggggacgtcctcttaagcctgcagagagctcatgaacaggcagtgaaggaaaatgtgaaaatggctactgaaatttctagattgcaacagaggctacaaaagttagagccagggttagtaatgtcttcttgtttggatgagccagctactgagttttttggaaatactgcggaacaaacagagcagtttttacagcaaaaccgaacgaagcaagtagaaggtgtgaccaggcggcatgtcctaagtgacctggaagatgatgaggtccgggacctgggaagtacagggacgagctctgttcagagacaggaagtcaaaatagaggagtctgaagcttcagtagagggtttttctgagcttgaaaacagtgaagagaccaggactgaatcctgggagctgaagaatcagattagtcagcttcaggaacagctaatgatgttatgtgcggactgtgatcgagcttctgaaaagaaacaggacctactttttgatgtttctgtgctaaaaaagaaactgaagatgcttgagagaatccctgaggcttctcccaaatataagctgttgtatgaagatgtgagccgagaaaatgactgccttcaggaagagctgagaatgatggagacacgctacgatgaggcactagaaaataacaaagaactcactgcagaggttttcaggttgcaggatgagctgaagaaaatggaggaagtcactgaaacattcctcagcctggaaaagagttacgatgaggtcaaaatagaaaatgaggggctgaatgttctggttttgagacttcaaggcaagattgagaagcttcaggaaagcgtggtccagcggtgtgactgctgcttatgggaagccagtttagagaacctggaaatcgaacctgatggaaatatactccagctcaatcagacactggaagagtgtgtgcccagggttaggagtgtacatcatgtcatagaggaatgtaagcaagaaaaccagtaccttgaggggaacacacagctcttggaaaaagtaaaagcacatgaaattgcctggttacatggaacaattcagacacatcaagaaaggccaagagtacagaatcaagttatactggaggaaaacactactctcctaggctttcaagacaaacattttcagcatcaggccaccatagcagagttagaactggagaaaacaaagttacaggagctgactaggaagttgaaggagagagtcactattttagttaagcaaaaagatgtactttctcacggagaaaaggaggaagagctgaaggcaatgatgcatgacttgcagatcacgtgcagtgagatgcagcaaaaagttgaacttctgagatatgaatctgaaaagcttcaacaggaaaattctattttgagaaatgaaattactactttaaatgaagaagatagcatttctaacctgaaattagggacattaaatggatctcaggaagaaatgtggcaaaaaacggaaactgtaaaacaagaaaatgctgcagttcagaagatggttgaaaatttaaagaaacagatttcagaattaaaaatcaaaaaccaacaattggatttggaaaatacagaacttagccaaaagaactctcaaaaccaggaaaaactgcaagaacttaatcaacgtctaacagaaatgctatgccagaaggaaaaagagccaggaaacagtgcattggaggaacgggaacaagagaagtttaatctgaaagaagaactggaacgttgtaaagtgcagtcctccactttagtgtcttctctggaggcggagctctctgaagttaaaatacagacccatattgtgcaacaggaaaaccaccttctcaaagatgaactggagaaaatgaaacagctgcacagatgtcccgatctctctgacttccagcaaaaaatctctagtgttctaagctacaacgaaaaactgctgaaagaaaaggaagctctgagtgaggaattaaatagctgtgtcgataagttggcaaaatcaagtcttttagagcatagaattgcgacgatgaagcaggaacagaaatcctgggaacatcagagtgcgagcttaaagtcacagctggtggcttctcaggaaaaggttcagaatttagaagacaccgtgcagaatgtaaacctgcaaatgtcccggatgaaatctgacctacgagtgactcagcaggaaaaggaggctttaaaacaagaagtgatgtctttacataagcaacttcagaatgctggtggcaagagctgggccccagagatagctactcatccatcagggctccataaccagcagaaaaggctgtcctgggacaagttggatcatctgatgaatgaggaacagcagctgctttggcaagagaatgagaggctccagaccatggtacagaacaccaaagccgaactcacgcactcccgggagaaggtccgtcagttggaatccaatcttcttcccaagcaccaaaaacatctaaacccatcaggtaccatgaatcccacagagcaagaaaaattgagcttaaagagagagtgtgatcagtttcagaaagaacaatctcctgctaacaggaaggtcagtcagatgaattcccttgaacaagaattagaaacaattcatttggaaaatgaaggcctgaaaaagaaacaagtaaaactggatgagcagctcatggagatgcagcacctgaggtccactgcgacgcctagcccgtcccctcatgcttgggatttgcagctgctccagcagcaagcctgtccgatggtgcccagggagcagtttctgcagcttcaacgccagctgctgcaggcagaaaggataaaccagcacctgcaggaggaacttgaaaacaggacctccgaaaccaacacaccacagggaaaccaggaacaactggtaactgtcatggaggaacgaatgatagaagttgaacagaaactgaaactagtgaaaaggcttcttcaagagaaagtgaatcagctcaaagaacaagtgagcctacccggtcatctctgttcacccacctcacattccagctttaactccagttttacatccctttattgccattaactcgttaacttatgttgtctaataaaggcaaattctatt

SEQ ID NO: 954 - DNA, 4946 bp, Homo sapiens
  source 1..4946: mol_type = genomic DNA
gtaaaaatttttattaaagtaccagtaaaactaaaagtgcctacttttagttttcactgtattttcttcaactcaggccctccctctgttgttacctgccatctgacacggaattttgtgtaattttccttccaagtaaagaagggaagtttagccccagcctctaactggttcccaaagtttttgtctctgaagccgcagtcacttcctggagcgtctctggctgggtgttgcagtgctggctgggagggtggggcaacaatttacaattctgaacacgtgctttctgggcaggtcgcccctcagtctccactagagacaggactgaccagttgctcttccttccaagaaccttcgagatctgcggtctggggtctggttgaaagatggcggccctcactaccctgtttaagtacatagatgaaaatcaggatcgctacattaagaaactcgcaaaatgggtggctatccagagtgtgtctgcgtggccggagaagagaggcgaaatcaggaggatgatggaagttgctgctgcagatgttaagcagttggggggctctgtggaactggtggatatcggaaaacaaaaggagattcctgtcaacgtccgattctgcctcgaaggcatggaggagtcaggctctgagggcctagacgagctgatttttgcccggaaagacacattctttaaggatgtggactatgtctgcatttctgacaattactggctgggaaagaagaagccctgcatcacctacggcctcaggggcatttgctactttttcatcgaggtggagtgcagcaacaaagacctccattctggggtgtacgggggctcggtgcatgaggccatgactgatctcattttgctgatgggctctttggtggacaagagggggaacatcctgatccccggcattaacgaggccgtggccgccgtcacggaagaggagcacaagctgtacgacgacatcgactttgacatagaggagtttgccaaggatgtgggggcgcagatcctcctgcacagccacaagaaagacatcctcatgcaccgatggcggtacccgtctctgtccctccatggcatcgaaggcgccttctctgggtctggggccaagaccgtgattcccaggaaggtggttggcaagttctccatcaggctcgtgccgaacatgactcctgaagtcgtcggcgagcaggtcacaagctacctaactaagaagtttgctgaactacgcagccccaatgagttcaaggtgtacatgggccacggtgggaagccctgggtctccgacttcagtcaccctcattacctggctgggagaagagccatgaagacagtttttggtgttgagccagacttgaccagggaaggcggcagtattcccgtgaccttgacctttcaggaggccacgggcaagaacgtcatgctgctgcctgtggggtcagcggatgacggagcccactcccagaatgaaaagctcaacaggtataactacatagagggaaccaagatgctggccgcgtacctgtatgaggtctcccagctgaaggactaggccaagccctctgtgtgccatctccaatgagaaggaatcctgccctcacctcacccttttccaacttgcccagggaagtggaggttccctctttcctttccctcttgtcaggtcatccatgactttagagaacagacacaagtgtatccagctgtccacgggtggagctacccgttgggcttatgagtgacctggagtgacagctgagtcaccctgggtaagttctcagagtggtcaggatggcttgacctgcagaagatacccaaggtccaaaagcacaaggtctgcggaaagttctggttgtcggccgggcaccacggctcacacctataatcgagcactttgggaggccaagacaggaggatcacttgaggccaggagtctgagacaagcctaggcaacaaaacaagactctgtctctacaaaaagtttaagaaatgagccagacatggtggtgtatgcctgtagtcccagccactcagaaggctgaggcaggaggatcgcttgagaccaagagtttgagcctgcggtgagctgtgaatgcaccacggcactcaagcctgggcaatgtagcaagatcctgtctctacaagaaattttttaaaaatgagccaagtgtggtggtgcatgcctgtagttccagctactcaggacactgacgtaggagggttgcttgagactgagagttggaggctgcgatgagccatgaatgccccactgcactccagcctgggcgacagaacgagaccccatctcaaaaaaaataagttctggttgtcattgaattgggataaacagagagcttgatgctttctgccttctgtctcaggtgatgcattgcacatttgggatatttggaaaggaaatgaggaaagaaattagggcctcctctgatctctcgctatctgcgggtcctgtccttttctcaagaccttcaccattactggcattttcctgtcttctctttagtatgatccctcaaaacctcactaactggaaggatgattttgtctcagtttgtactcctaaataaaaagtaaacatgacacctctaaaagaatcgctccatctcagttgctcgtcgcgtgcacaccatgcttattgagtggtgtctggttggtggtgtcagctcagggcaggggacagcaggcaggacccggaaaacagaacccaggtcttcccaggcgagcactccctccctcgtccacacaagtggaggctcactcgtggccccctgcatgttccgagaagtgtccctgtctctgctccttaacggctgtggggccacaggaagtccagctggcttaaacaaagaattgattggcccacttgacataaaagaacagagtaaactcaatgaaaggaaaaggctccttgaagtggttggttccagggctgggcagggaagatgcaagatgagtctggaccctctcacatcggaacgtaaggatgcgctcctgagggcgtggggctgcgtccaaggacacaggagccagcctggaagagtttgcaggggcccaggggagcaattggagtgagaaaatagcagtagtgttggatttttaccatggaataaacaacaatccatgagtccatactaatataaataaagtgacaaagtgggtgagaaggaccagtgcccctggatgaagaatctctgctcatgtgggaggaaggtgggagatcaaagctggagcacttgctgctgcaggtgagacccctgacacactctcaaattggtaggcaaaggtttaaagaacgggatatttgcttagcttaaaagcacctcccaaggggaaaacagtaacttcacagtggagagacctggcaggcaccaccctcagatcaaaatgaacctcagcagtaatgacacgtccacatcagcacccccaacaccactccctgaggaggacatgccagttctgggaacatcacactcatcgtgacaaaacatcagacaaacccaaacggatgaaatgtgaggaaaatctgtagttggttttacgtggatgttaatctcttagttttgatcattgtgctgtagctgcataagaggttagctgggtgaagtgtatctggggaccctctatggcttttgcatcttttctctaagtctcctgtcatttcaaagtaaaaacaaaaaaagaagacaagggtagcggcttcaggtacagctggacccagcactcagtgctatctgggcttgtggctccaactcaactcctccatcagaactgtgagaaatgcattctttcagcttctaatcctgcaaaaagaactgcatggtcttcccccagaaatcctaagagtagctgctggtgtctcatgcatgcgagctgcatatgggcccccgttagtcaggaacccatgctgagaggtgctatgctttgaatgtttggctcctcccaaactcgtgttgaaacttaatagccattgtaacagtattaagaggcagggccttcaagagctggtcaggccatgagggccctgtcctcctgactgagtgaatgctgttattgtaggagtgggcttgtttggcctcctcttgctctctctacccctctctgagcccttgtgttgtgggatgacacagccagaaggcccttgccaggttccggtccctccaccttggacctcccagcctcccgaacgttgagccaatacatctctgctcattgtaaattacctagtcttgggcattgtgttacagcagcaaaaagcagcctacggcagtcaccgtgctaacacctgcagcagcctgcggcggtcaccgtgctaacacgtgcagcagcctgtgtggctcaggccagtcagcttcccctggaagcaagtgtgaggtcgtcgcctctggaagtgctagcggagggtgatctcccggaggaaatcagagtggtgttctactagaaggccgatgactcctgggtaaagtgccaatgctcacctccatctctgcaagctcagtccctcgtggaatttccaggagcacaagggcaatctcgacagctccacgttcccagtgcccgacccaagcctggcccatgatcagataaatgcctaagtggggtggcatggacatttgcacacgtccagactgctttatgttagaagctgagctggcatgccactagctggttttgatgtaaacaacaattttgtaaaaccctggactgaatgggtctgactaacggctggttctgtgaacttgagcctcagcgtcctgtgtcagaagagcacaaaccactttcccagagaggttatgaagacagaaatgaccctgtgacccctttgcaaagtatgaagaacggttcccactcatgcatggagctggatcttctcaagtgggaaacaggcgtggtaaataaatactgttgtttcagctggtgt

SEQ ID NO: 955 - DNA, 6525 bp, Homo sapiens
  source 1..6525: mol_type = genomic DNA
ccgagccgggagccgagcgcgctgggcgcggccgtcccgctgccgccgccaagcccggagtgcgccagcggccatggttcccgcggcggcgccgggcgcctgagccccgggacgcaagcgctggaggcgggctgccggctgtgcgggcgctccggagagaccgacagaaggtgagcactgtgggctatgggatggatgaggtggagcaggaccagcatgaggcccgactcaaggagctgtttgacagttttgacacgacgggcacagggtccctggggcaggaggaactcaccgacctttgccacatgttgagcttggaggaggtggccccagtgctgcagcagacattacttcaggacaacctcttgggcagggtacattttgaccaatttaaagaagcattaatactcatcttgtccagaactctgtcaaatgaagaacactttcaagaaccagactgctcactagaagctcagcccaaatatgttagaggtgggaagcgttacggacgaaggtccttgcccgagttccaagagtccgtggaggagtttcctgaagtgacggtgattgagccactggatgaagaagcgcggccttcacacatcccagccggtgactgcagtgagcactggaagacgcaacgcagtgaggagtatgaagcggaaggccagttaaggttttggaacccagatgacttgaatgcttcacagagtggatcttcccctccccaagactggatagaagagaaactgcaagaagtttgtgaagatttggggatcacccgtgatggtcacctgaaccggaagaagctggtctccatctgtgagcagtatggtttacagaatgtggatggagagatgctcgaggaagtattccataatcttgatcctgacggtacaatgagtgtagaagattttttctatggtttgtttaaaaatggaaaatctcttacaccatcagcatctactccatatagacaactaaaaaggcacctttccatgcagtctttcgatgagagtggacgacgtaccacaacctcatcagcaatgacaagtaccattggctttcgggtcttctcctgcctggatgatgggatgggccatgcatctgtggagagaatactggacacctggcaggaagagggcattgagaacagccaggagatcctgaaggccttggatttcagcctcgatggaaacatcaatttgacagaattaacactggcccttgaaaatgaacttttggttaccaagaacagcattcaccaggcggctctggccagctttaaggctgaaatccggcatttgttggaacgagttgatcaggtggtcagagaaaaagagaagctacggtcagatctggacaaggccgagaagctcaagtctttaatggcctcggaggtggatgatcaccatgcggccatagagcggcggaatgagtacaacctcaggaaactggatgaagagtacaaggagcgaatagcagccttaaaaaatgaactccgaaaagagagagagcagatcctgcagcaggcaggcaagcagcgtttagaacttgaacaggaaattgaaaaggcaaaaacagaagagaactatatccgggaccgccttgccctctctttaaaggaaaacagtcgtctggaaaatgagcttctagaaaatgcagagaagttggcagaatatgagaatctgacaaacaaacttcagagaaatttggaaaatgtgttagcagaaaagtttggtgacctcgatcctagcagtgctgagttcttcctgcaagaagagagactgacacagatgagaaatgaatatgagcggcagtgcagggtactacaagaccaagtagatgaactccagtctgagctggaagaatatcgtgcacaaggcagagtgctcaggcttccgttgaagaactcaccgtcagaagaagttgaggctaacagcggtggcattgagcccgaacacgggctcggttctgaagaatgcaatccattgaatatgagcattgaggcagagctggtcattgaacagatgaaagaacaacatcacagggacatatgttgcctcagactggagctcgaagataaagtgcgccattatgaaaagcagctggacgaaaccgtggtcagctgcaagaaggcacaggagaacatgaagcaaaggcatgagaacgaaacgcacaccttagaaaaacaaataagtgaccttaaaaatgaaattgctgaacttcaggggcaagcagcagtgctcaaggaggcacatcatgaggccacttgcaggcatgaggaggagaaaaaacaactgcaagtgaagcttgaggaggaaaagactcacctgcaggagaagctgaggctgcaacatgagatggagctcaaggctagactgacacaggctcaagcaagctttgagcgggagagggaaggccttcagagtagcgcctggacagaagagaaggtgagaggcttgactcaggaactagagcagtttcaccaggagcagctgacaagcctggtggagaaacacactcttgagaaagaggagttaagaaaagagctcttggaaaagcaccaaagggagcttcaggagggaagggaaaaaatggaaacagagtgtaatagaagaacctctcaaatagaagcccagtttcagtctgattgtcagaaagtcactgagaggtgtgaaagcgctctgcaaagcctggaggggcgctaccgccaagagctgaaggacctccaggaacagcagcgtgaggagaaatcccagtgggaatttgagaaggacgagctcacccaggagtgtgcggaagcccaggagctgctgaaagagactcttaagagagagaaaacaacttctctggtcctgacccaggagagagagatgctggagaaaacatacaaagaacatttgaacagcatggtcgtcgagagacagcagctactccaagacctggaagacctaagaaatgtatctgaaacccagcaaagcctgctgtctgaccagatacttgagctgaagagcagtcacaaaagggaactgagggagcgtgaggaggtcctgtgccaggcaggggcttcggagcagctggccagccagcggctggaaagactagaaatggaacatgaccaggaaaggcaggaaatgatgtccaagcttctagccatggagaacattcacaaagcgacctgtgagacagcagatcgagaaagagccgagatgagcacagaaatctccagacttcagagtaaaataaaggaaatgcagcaggcaacatctcctctctcaatgcttcagagtggttgccaggtgataggagaggaggaggtggaaggagatggagccctgtccctgcttcagcaaggggagcagctgttggaagaaaatggggacgtcctcttaagcctgcagagagctcatgaacaggcagtgaaggaaaatgtgaaaatggctactgaaatttctagattgcaacagaggctacaaaagttagagccagggttagtaatgtcttcttgtttggatgagccagctactgagttttttggaaatactgcggaacaaacagagcagtttttacagcaaaaccgaacgaagcaagtagaaggtgtgaccaggcggcatgtcctaagtgacctggaagatgatgaggtccgggacctgggaagtacagggacgagctctgttcagagacaggaagtcaaaatagaggagtctgaagcttcagtagagggtttttctgagcttgaaaacagtgaagagaccaggactgaatcctgggagctgaagaatcagattagtcagcttcaggaacagctaatgatgttatgtgcggactgtgatcgagcttctgaaaagaaacaggacctactttttgatgtttctgtgctaaaaaagaaactgaagatgcttgagagaatccctgaggcttctcccaaatataagctgttgtatgaagatgtgagccgagaaaatgactgccttcaggaagagctgagaatgatggagacacgctacgatgaggcactagaaaataacaaagaactcactgcagaggttttcaggttgcaggatgagctgaagaaaatggaggaagtcactgaaacattcctcagcctggaaaagagttacgatgaggtcaaaatagaaaatgaggggctgaatgttctggttttgagacttcaaggcaagattgagaagcttcaggaaagcgtggtccagcggtgtgactgctgcttatgggaagccagtttagagaacctggaaatcgaacctgatggaaatatactccagctcaatcagacactggaagagtgtgtgcccagggttaggagtgtacatcatgtcatagaggaatgtaagcaagaaaaccagtaccttgaggggaacacacagctcttggaaaaagtaaaagcacatgaaattgcctggttacatggaacaattcagacacatcaagaaaggccaagagtacagaatcaagttatactggaggaaaacactactctcctaggctttcaagacaaacattttcagcatcaggccaccatagcagagttagaactggagaaaacaaagttacaggagctgactaggaagttgaaggagagagtcactattttagttaagcaaaaagatgtactttctcacggagaaaaggaggaagagctgaaggcaatgatgcatgacttgcagatcacgtgcagtgagatgcagcaaaaagttgaacttctgagatatgaatctgaaaagcttcaacaggaaaattctattttgagaaatgaaattactactttaaatgaagaagatagcatttctaacctgaaattagggacattaaatggatctcaggaagaaatgtggcaaaaaacggaaactgtaaaacaagaaaatgctgcagttcagaagatggttgaaaatttaaagaaacagatttcagaattaaaaatcaaaaaccaacaattggatttggaaaatacagaacttagccaaaagaactctcaaaaccaggaaaaactgcaagaacttaatcaacgtctaacagaaatgctatgccagaaggaaaaagagccaggaaacagtgcattggaggaacgggaacaagagaagtttaatctgaaagaagaactggaacgttgtaaagtgcagtcctccactttagtgtcttctctggaggcggagctctctgaagttaaaatacagacccatattgtgcaacaggaaaaccaccttctcaaagatgaactggagaaaatgaaacagctgcacagatgtcccgatctctctgacttccagcaaaaaatctctagtgttctaagctacaacgaaaaactgctgaaagaaaaggaagctctgagtgaggaattaaatagctgtgtcgataagttggcaaaatcaagtcttttagagcatagaattgcgacgatgaagcaggaacagaaatcctgggaacatcagagtgcgagcttaaagtcacagctggtggcttctcaggaaaaggttcagaatttagaagacaccgtgcagaatgtaaacctgcaaatgtcccggatgaaatctgacctacgagtgactcagcaggaaaaggaggctttaaaacaagaagtgatgtctttacataagcaacttcagaatgctggtggcaagagctgggccccagagatagctactcatccatcagggctccataaccagcagaaaaggctgtcctgggacaagttggatcatctgatgaatgaggaacagcagctgctttggcaagagaatgagaggctccagaccatggtacagaacaccaaagccgaactcacgcactcccgggagaaggtccgtcagttggaatccaatcttcttcccaagcaccaaaaacatctaaacccatcaggtaccatgaatcccacagagcaagaaaaattgagcttaaagagagagtgtgatcagtttcagaaagaacaatctcctgctaacaggaaggtcagtcagatgaattcccttgaacaagaattagaaacaattcatttggaaaatgaaggcctgaaaaagaaacaagtaaaactggatgagcagctcatggagaactcagtggttggaagtagcagagaagggtgcagttctctgcctgagatagtgtgtgaagatgcagcacctgaggtccactgcgacgcctagcccgtcccctcatgcttgggatttgcagctgctccagcagcaagcctgtccgatggtgcccagggagcagtttctgcagcttcaacgccagctgctgcaggcagaaaggataaaccagcacctgcaggaggaacttgaaaacaggacctccgaaaccaacacaccacagggaaaccaggaacaactggtaactgtcatggaggaacgaatgatagaagttgaacagaaactgaaactagtgaaaaggcttcttcaagagaaagtgaatcagctcaaagaacaagtgagcctacccggtcatctctgttcacccacctcacattccagctttaactccagttttacatccctttattgccattaa

SEQ ID NO: 956 - DNA, 3013 bp, Homo sapiens
  source 1..3013: mol_type = genomic DNA
cggggcggccgccgccggtgggccgcagatgaagaggaggcggtggcagtggtggaagaagaggcggcggcggcgggggtagggagcctggaaacgcgagcggggatggtaggtggtttggacccgccgggccgccgtcgtttccagaaagggtttgactggaggaacctctggagcagctgttggctggctcctctggctgatggcatgttgaggtacatgggccagcggcagcgagggcatccaatccagaggggtccactctagaggccaggccaccagcaccatgggccagtgtgtcaccaagtgtaagaatccctcatcgaccctgggcagcaaaaatggagaccgtgagcccagcaacaagtcacatagcaggaggggtgcaggccaccgtgaggagcaggtaccaccctgtggcaagccaggtggagatatcctcgtcaacgggaccaagaaggccgaggctgccactgaggcctgccagctgccaacgtcctcgggagatgctgggagggagtccaagtccaatgccgaggagtcttccttgcaaagattggaagaactgttcaggcgctacaaggatgagcgggaagatgcaattttggaggaaggcatggagcgcttttgcaatgacctgtgtgttgaccccacagaatttcgagtgctgctcttggcttggaagttccaggctgcaaccatgtgcaaattcaccaggaaggagttttttgatggctgcaaagcaataagtgcagacagcattgacggaatctgtgcacggttccctagcctcttaacagaagccaaacaagaggataaattcaaggatctctaccggtttacatttcagtttggcctggactctgaagaagggcagcggtcactgcatcgggaaatagccattgccctgtggaaactagtctttacccagaacaatcctccggtattggaccaatggctaaacttcctaacagagaacccctcggggatcaagggcatctcccgggacacttggaacatgttccttaacttcactcaggtgattggccctgacctcagcaactacagtgaagatgaggcctggccaagtctctttgacacctttgtggagtgggaaatggagcgaaggaaaagagaaggggaagggagaggtgcactcagctcagggcctgagggcttgtgtcccgaggagcagacttagtggctctgtcccaggagcagcagcaaggatctgccagctgccctgcagccaactgaggaattggaccattttggaaattactgaagatccggatattttctactttacacctttctctgccttgtatctgaaagggctctaaaatgctgtatcatgttttaggcactttcttcatttttttggttattttggttatttcctttttggggggatctcccagaatatttgaacctggttacatgttgtgtatctttttttgaagccttcagatagaataagcctgccatttcttgcacaaatttaggttttttttttgtttttttttgtttttttttttttttttttggtaggggagggcatagagcagggcggggggatgggactgttaggttgaattaacattacaaaatgatacagtgccagatctcagtttcgcatattgtttttcagggcaggtctgtactgtgtgtagtgctgtttacatagatgaatttaggttgtaataattatttttaaagatttacacagatttgaatagcagtgttaactgttaaccacattgcattaattcccaggcgatttagagctcttggagagccaaggccagccaagagcatttgtagtctggtgacaacccccttttaagctaatttatccagaaccctgatttccctcacttcttgctcattccttctttgacctattgcatttcatgttgagtttttccatcaacatgctgcacctgtcagtcaagtgagcattttttaagaacacattgtactgagaaccacttaagcattgaatgcggagaaagcagtgctacctcagttttgctggaagtagacttctttgatagttttctttctttgatgaagtttctgtattttcatgttgtaagtggaaatacttttttttgtttgtttgtttcatttgccttggagccaaagtttctgttcctggtggtcgggaaactgcctgccggccaactgacttgaaggaaaactgtggtatggagctctgcttgaatttttttttttttaatatttttatttttttctttgaatatcatcagcttacttgtctggcaagggcagaagcctggggttggcctgaactctgccaaacaaatatcaaagtgtatttaatagttaaatttgtgccctttcccttcttgctgcacccatgttgtcacttaacccccaggagttatttattatctttttgttaaagtcaggctcatttggggtaatgtgatgactgtttaggtttacatgaccctcctctcctttccctacccccaaatatgtatatatacatatataaaatatgtatatattttacctatataaaatatatatatatacacatatatgtatctatattcctttgtttctttgcctgcttatactggccataaaagagggagctgccttcaatgtataaagtataagaagagtgccagggaatgccataatggaggcttttggatctgaatttggaccatttcactaaagagaacatgagtttgctcagccctttcctcacaagagggagggccccggttccccagacttctccacgcgctggctccataaaggccagctttggccaggctgccacaggggcctgaggagctcactctgggcctacctggtttcagttagagggtcctcctgttatttttccatttaaaaagtatgtcctcagaaaactgtactggaaggatgggtggcaggaacttgtatagttcagcttccaacactttggaacagattaaaaagggaatcttttaaataaaaacgtataaaaata

SEQ ID NO: 957 - DNA, 2531 bp, Homo sapiens
  source 1..2531: mol_type = genomic DNA
aagttcgtcaggaaccagaccctgagattggtggatccatgccgtacgccactgtgcagcccgcggattggcaggaaaagccactccccatccctcctgttcgggagctgtggcagacgctctggttgttaaggcgactcgtcccgccttctggggcactagtttgactttgtgattggctactagtatcaaggaatcccggcgtggacagcgcgaggagaaagatggcggcgatggcggtcgggggtgctggtgggagccgcgtgtccagcgggagggacctgaattgcgtccccgaaatagctgacacactaggggctgtggccaagcaggggtttgatttcctctgcatgcctgtcttccatccgcgtttcaagagggagttcattcaggaacctgctaagaatcggcccggtccccagacacgatcagacctactgctgtcaggaagggactggaatacgctaattgtgggaaagctttctccatggattcgtccagactcaaaagtggagaagattcgcaggaactccgaggcggccatgttacaggagctgaattttggtgcatatttgggtcttccagctttcctgctgccccttaatcaggaagataacaccaacctggccagagttttgaccaaccacatccacactggccatcactcttccatgttctggatgcgggtacccttggtggcaccagaggacctgagagatgatataattgagaatgcaccaactacacacacagaggagtacagtggggaggagaaaacgtggatgtggtggcacaacttccggactttgtgtgactatagtaagaggattgcagtggctcttgaaattggggctgacctcccatctaatcatgtcattgatcgctggcttggggagcccatcaaagcagccattctccccactagcattttcctgaccaataagaagggatttcctgttctttctaagatgcaccagaggctcatcttccggctcctcaagttggaggtgcagttcatcatcacaggcaccaaccaccactcagagaaggagttctgctcctacctccaatacctggaatacttaagccagaaccgtcctccacctaatgcctatgaactctttgccaagggctatgaagactatctgcagtccccgcttcagccactgatggacaatctggaatctcagacatatgaagtgtttgaaaaggaccccatcaaatactctcagtaccagcaggccatctataaatgtctgctagaccgagtaccagaagaggagaaggataccaatgtccaggtactgatggtgctgggagcaggacggggacccctggtgaacgcttccctgcgggcagccaagcaggccgaccggcggataaagctgtatgctgtggagaaaaacccaaatgccgtggtgacgctagagaactggcagtttgaagaatggggaagccaagtgaccgtagtctcatcagacatgagggaatgggtggctccagagaaagcagacatcattgtcagtgagcttctgggctcatttgctgacaatgaattgtcgcctgagtgcctggatggagcccagcacttcctaaaagatgatggtgtgagcatccccggggagtacacttcctttctggctcccatctcttcctccaagctgtacaatgaggtccgagcctgtagggagaaggaccgtgaccctgaggcccagtttgagatgccttatgtggtacggctgcacaacttccaccagctctctgcaccccagccctgtttcaccttcagccatcccaacagagatcctatgattgacaacaaccgctattgcaccttggaatttcctgtggaggtgaacacagtactacatggctttgccggctactttgagactgtgctttatcaggacatcactctgagtatccgtccagagactcactctcctgggatgttctcatggtttcccatcctcttccctattaagcagcccataacggtacgtgaaggccaaaccatctgtgtgcgtttctggcgatgcagcaattccaagaaggtgtggtatgagtgggctgtgacagcaccagtctgttctgctattcataaccccacaggccgctcatataccattggcctctagccctgcgtgccaagtgtccagagccttggaagcagcttcaggttctgctcctgtagtacagaaggtgcagtacatctatgggctgtgattccccttgcccatcagagaggagcatttcaatctgctttcctgccttacatcaaggtgggcaagggattataattaattgcagggctcaagccaccaatctatgaagacctcaggccagggggtgaggaattagtgctggatttgaagctacgcactcagcctcaagaactccctggaatatccctgagaacatggggtttgaacggattttcagcctttttctgttcttgttttgatggttttgtgtaagaggaaatacaaataaagttatagccctttactgcacgaccatgctgccccctg

SEQ ID NO: 958 - DNA, 1067 bp, Homo sapiens
  source 1..1067: mol_type = genomic DNA
gtctcatggctcctgggagcgtcaccagcgacatctcaccctcctcgacttccacagcaggatcatccaggtctcctgaatctgaaaagccaggcccgagccacggcggtgtcccaccaggaggcccgagccacagcagcctcccggtgggacgccgccaccccccggtgctacgcatggtgctggaggcgctgcaggctggggagcagcgccggggcacgtcggtggcagctatcaagctctacatcctgcacaagtacccaacagtggacgtcctccgcttcaagtacctgctgaagcaggcgctggccactggcatgcgccgtggcctcctcgccaggcccctcaactccaaagccaggggggccactggcagcttcaaattagttcccaagcacaagaagaaaatccagcccaggaagatggcccccgcgacggctcccaggagagcgggtgaggccaaggggaagggccccaagaaaccaagtgaggccaaggaggaccctcccaacgtgggcaaggtgaaaaaggcagccaagaggccagcaaaggtgcagaagcctcctcccaagccaggcgcagccacagagaaggctcgcaagcaaggcggcgcggccaaggacaccagggcacagtcgggagaggctaggaaggtgccccccaagccagacaaggccatgcgggcaccttccagtgctggtgggctcagcaggaaggcaaaggccaaaggcagcaggagcagccaaggagatgctgaggcctacaggaaaaccaaagctgagagtaagagttcaaaacccacggccagcaaggtcaagaatggtgctgcttccccgaccaaaaagaaggtggtggccaaggccaaggcccctaaagctgggcaggggccaaacaccaaggctgctgctcctgctaagggcagtgggtccaaggtggtacctgcacatttgtccaggaagacagaggcccccaagggccctagaaaggctgggctgcccatcaaggcctcatcatccaaagtgtccagccagagggctgaagcttagggccagaggcaggggcggaga

SEQ ID NO: 959 - DNA, 2769 bp, Homo sapiens
  source 1..2769: mol_type = genomic DNA
gcgacgccgagtttcactctggctgccttctcctgagagtcggagccacagccagagccctgcccaggccgagccggagctgcagcccgagcgcggtggtgccctcagccccgtcctcttgtcctcctcagcctcggtgccttggaatttgtgtcgctgagtcagcaagcctttcagatttgcccggtttttgttgtttgtggtttgtatcaagatgggaactcaaacaagtcattcctcctaaggagctggtgtcttcatccagaagggacagtttgtgccagctctccagagagaaaaggatctggtactgttctggagtggcctgtagcagacactgaaccaccagccagctgcatttgttgtcctggaagtcattgccaactctgccagtcacactggggtccccagagaagtcaagatctgccggaggcgctgggcaatgaccccgggactccaggccagaggggtctgaagctgtttgggaaagcagcgggactccttgggaagatggccatggccccaagcccttccctggtgcaggtgtacaccagccccgcggctgtggccgtgtgggaatggcaggacgggctgggcacctggcacccctacagtgccaccgtctgcagcttcatcgagcagcagtttgtccagcagaagggccaacgttttgggcttgggagcctggcccacagcatccccttgggccaggcagacccctcgctggccccttacattattgacctccccagctggacccagttccgccaggacaccggcaccatgcgggctgtgcggagacacctgttcccccagcactcagcccctggccgaggtgtcgtctgggagtggctgagcgacgatggctcctggactgcctatgaagccagcgtctgtgactatctggagcagcaggtggccaggggcaaccagctcgtggacttggcccccctggggtacaactacactgtcaactacaccacccacacgcagaccaacaagacttccagcttctgccgcagcgtgcggcgccaagcagggccgccttacccggtgaccaccatcatcgctccgccgggccacacaggcgtcgcctgctcttgccaccagtgcctcagtggcagcagaactggccccgtgtcaggccgctaccgccactccatgaccaacctccctgcataccccgtcccccagcaccccccacacaggaccgcttctgtgtttgggacccaccaggcctttgcaccgtacaacaaaccctcactctccggggcccggtctgcgcccaggctgaacaccaccaacgcctggggcgcagctcctccttccctggggagccagcccctctaccgctccagcctctcccacctgggaccgcagcacctgcccccaggatcctccacctccggtgcagtcagtgcctccctccccagcggtccctcaagcagcccagggagcgtccctgccactgtgcccatgcagatgccaaagcccagcagagtccagcaggcgctcgcaggcatgacgagtgttctgatgtcagccattggactccctgtgtgtcttagccgcgcaccccagcccaccagccctcccgcctcccgtctggcttccaaaagtcacggctcagttaagagattgaggaaaatgtccgtgaaaggagcgaccccgaagccagagccagagccagagcaggtcataaaaaactacacggaagagctgaaagtgcccccagatgaggactgcatcatctgcatggagaagctgtccacagcgtctggatacagcgatgtgactgacagcaaggcaatcgggtccctagctgtgggccacctcaccaagtgcagccatgccttccacctgctgtgcctcctggccatgtactgcaacggcaataaggatggaagtctgcagtgtccctcctgcaaaaccatctatggagagaagacggggacccagccccagggaaagatggaggtattacggttccagatgtcgctccccggccacgaggactgcgggaccatcctcatagtttacagcattccccatggtatccagggccctgagcaccccaatcccggaaagccgttcactgccagagggtttccccgccagtgctaccttccagacaacgcccagggccgcaaggtcctagagctcctgaaggtggcctggaagaggcggctcatcttcacagtgggcacgtccagcaccacgggtgagacggacaccgtggtatggaacgagatccaccacaagacagagatggaccgcaacattacgggccacggctatcccgaccccaactacctgcagaacgtgctggctgagctggctgcccagggggtgaccgaggactgcctggagcagcagtgacctcgcaccccagcacgcccgcctctggtggccaccccgctgccccatggctggctgggtggccaggcaggaagtgcccagcccgagaggctgggaggtttgttgagggtgtggggtgtgccccacctgaagccggggctccccctgcctgcctctctctcctcctcccctctgggaattgggcagccctgggcagttgtactcatgggggcttaggatgcagctacctcagtgcgcagggcccgtctgtcctctgggggctgcttcgggcccgcggtgctcggggcctggtgtggggcgagtagagacttccccagcctggacgggcgtgggttctgggtcagcttcttttacctcaattttgtttgcaataaatgctctatagccaaa

SEQ ID NO: 960 - DNA, 4686 bp, Homo sapiens
  source 1..4686: mol_type = genomic DNA
gagagagggaggacccgtcacaggtaacgatgcgcccagtgagcgtcctttcctctggggccaaccagcgtctccgcgccgctgccgccaacctcgcgccgaactacgccctgagatttgggcgggtagcgattgggggaaaacaggcaacctaagagttattaccgttagcagcgaagactgcgactaacgtcaacgacggagactgcgtctgccttcgcttccgcctcgtagccccgggaaccggaaatccgtctgccccgggtcacgtgcttaggagccatattgtcgctagtggccgctggggctgggaggggtgtgctagagaggcgcagcttctctgggcgtggtttttatcctgggggaaggatcggtggaatgtgaggggaggtggaggagatggcggcgacggcccgggaagatggcgccagcggtcaagagcgaggtcagcggggctgcgagcactatgacagaggatgtctcctaaaggcaccttgctgtgacaagctttatacttgccgcttgtgtcatgataacaatgaagatcatcaactagatcgctttaaagtgaaggaagtgcagtgcataaactgtgaaaaaattcaacatgcccaacagacttgtgaagaatgtagcacattgtttggagaatattattgcgatatatgccatttgtttgacaaagataagaagcagtatcactgtgaaaactgtggaatttgtaggattggtccaaaggaagattttttccattgtttgaaatgtaacttatgcctagctatgaatcttcaaggaagacacaagtgtattgaaaatgtgtcccgacagaattgtccaatatgtttggaggacattcacacatcccgtgttgttgctcatgtcttgccatgtggacatcttttacatagaacgtgttatgaagaaatgttgaaagaaggctacagatgtccattatgtatgcactctgctttagatatgaccaggtattggagacagctggatgatgaagtagcacagactcctatgccatcagaatatcagaacatgactgtggatattctctgcaatgactgtaatggacgatccactgttcagtttcatatattaggcatgaaatgtaagatttgtgaatcctataatactgctcaagctggaggacgtagaatttcactggatcagcaatgacgagcctacacagtactggagaacttggcattttctgatatagaaaaaggctttccttggtatcgtgttatcatgtgtcgtcatctatgcattagagttgatgtgttttgtactagtgtcacagcataaaatcatattacaagtacgtaaggattcagggtctcttgatagacttatcatagctctatattgaatgaaagccactgtgcttgtgttttgattggaaattcctttagtgtcagttttttggaagccaatgatgtttgccactgatacattcatagaagtgtattatattttcatgaagctttgctttaagtgacactacgcgtgcagttcatttctagttcttgatagaactgcacttaattttcagtagtagtcttgactttttaagggctgtgttatattaagttctcccttactgttaaaacctaattaaatatgctttagaattttctaagacagtcctctggatcctctaaatgtgaattttgatgtaataactgctaataaaattatattgaaactgttttatagaaagttttttccaaagttttctatgtttggctcaattagggcagtatcatcagttctataatgtaaaagaaattttctttcttttgaggtattccataaaagtagttgggaaaattattatgtaaaataataagactcttccaaagccttaataaaaacatcaacattgaaaacagttttttttaggttgcccaaaattatttcttcaaagagtcattcattccttcatttagcaagtatttattgagcaactgctatgtggcagatatgtttctagatgctgtagagacaacagtgaacaataaagataaaagtccttgtcctcacagcagtacattctattgttcatcatatttgatcaatgtactcatttttctttatgcaaggagtggatgtcttattgtaaatgaatagaatatttcttccctaagcgtgtgaaaataggggatggatgagtgggaagggcatgggatattcctggcaagatctctgatttcataatacttttttgggctcatgtagtggaattaaatatacctcttacttcaggaacaaagttaacaaatatgtttgatgatccagccgactttgacactgttatctccgtaatagctttaccattaggctaggatgtaaaatgtacatttatcagttgataagtacctattgagcaccagttgtatttccaactttgagctatttgaatcttctttgaataaggaagttagccttttaactagaaagcctaagagttctggcacatttatttcttcttttgttgaaatttattcacctagataaaggcagcagtttgggactcagatctttattttatcccaccttcttgtcttctgtattccactcttcttatgttctttcccttcatctgtttccttggcctggccagagcagcagtgctgatcttcatttgggaaaggatgttcctgggtattaccaattagtatacagataagtaaagactagttttccagatctaatacttttttttgaagtggttttgctctgtcatttaggctagagtgtagtgaagtgatcgtagctcactgcagccttgacttcctgggctgaactgatccttccacctcagcctcctgagtagctgggactacaggtgtgtgccaccatgcccagctaatttttaattgttttgtagaaacaaagtccaggctggtcttgaactcctgggctcaagcatttctcctacctcggccttccaagggctaggattacaggcatgagccactgtgcttggtccagatgtattactttttatgtttggtattattctgccaaaccaatcatgttattgtttttaatcattgaatcattggatctttaaataggagtgagtatataataataaggctcttctgttttcaacatctgtgctgggtcatgcattagcattaattactacaatgattctgtggggtaagtgttgtcctcatagacaagaaagctgaggtttagaggttaaaatgacacattgggggtaaataacagacactatatgttggagttgggaatcagatccaagtttgactccaaacccacttttaccacattgcttttgatctaaacttctattttgctaaaatacccctcacagctagtcatccatatcattgaagcgctcatgatttgatagattaacctttcatttttttaggtgactctagttagaaagtcttatttcacaatctgattgtttctttaacttaggatccaaacatgtccaaaataatgcagagtacatatgcaatcactcgtttatgctgtctagtcatgcacttaaagcaattttcaaatgtactcaaagtctctaggcttcggtacccagggttgcttcaagtatttgttcatgacacgtcaactcgatgattaaaatccttcaacacttctcattcacaataagaataaaatctacatcccttaccattcagtatgcaaaacttaaaatacataactttacccttaaatattttttctttctctgacttcataagtataggttatacctctataagaaagaaggtaaaaaactctcaacaatcccttctttcagagagaactactgttaacattttaacagacaacttcattcttttcctattcttttttataatgcttacaggaatgttaaatacttagacagatcttaagtacactagaattatctgtccctgaaataagttaggttgccctgccgcagaatttgtatctatagtttatttggattatttttgaaaaaagtaaaataacaatacccttacgaattttttggtgcatagcatctcagcttcttttatcattaaagatgtatgtataaaaaaaaaatgagtgtatatcaagttgttcatttcttagtttctggggtcttcttaaccagtacatagaactctttatgaattaactttagcttatgttggaagtagtagtttgtttatagtgtcatggattttaaaatcaaactcagtttttatttcttcactaaaacctattttcatatgatatacatgttaaatttcccttttattttggtcatgcatcaaaataaatttactaagtactaaagagccaacattattttataagtgcctggcaataggtattcactagttgaatagtttaatttgaaatgaattaattttaaatgggagttgttcaaaactatgccactttttcttttgtcctttgtgttattaaaatttaattgataattgtgtatattatatatatggagtacaatgtgatgttttgatatatgtttacagtgtagaatgattaaatcaatgtaataaatttattgcctcataccattttttgtggtaaaaaaaccacttaaaatctactcttaatatttttgaaatgtacaatgcattatttattatactcaccattctgtgtaatagatcagtaaagtttattcctcttgtctaa

SEQ ID NO: 961 - DNA, 2413 bp, Homo sapiens
  source 1..2413: mol_type = genomic DNA
gccacagggacagccggtgggctcggtggggctgcagaaggtcggggctgcactgctctcggcccccacacggttggttggttggcgtggtaagtgccctgatccctggtcctgagaactcaggctggcacagggattcccagggcatctaccaccacgcagctggagcagggctgagcccaggagcatggagatggacgcccccaggccccccagtcttgctgtccctggagcagcatcgaggcccgggagggctgccatcagcagcagtgagccatcacctctgctggccacattgtgttttttctcctagaactgtggacaacggaaggctgagccccatccattgagttcctggggccccactggaggggctgctgtggccagggtgcacggtcacaaatgaagacaccaaggcgcagagaggtgactcagcctgccctcagtcacctatctgctcctggaggtgatccccgactccatgaggaagcaagaggtgcggacgggcagggaggccggccagggccacggtacgggctccccagccgagcaggtgaaagccctcatggatctgctggctgggaagggcagtcaaggctcccaggccccgcaggccctggataggacaccggatgccccgctggggccctgcagcaatgactcaaggatacagaggcaccgcaaggccctgctgagcaaggtggaggccacccgcgggggcgggcaccccgccaggaccgtcgccctggaccggctcttcctgcctctctcccgggtgtctgtcccaccccgggtctccatcactatcggggtggccggcatgggcaagaccaccctggtgaggcacttcgtccgcctctgggcccatgggcaggtcggcaaggacttctcgctggtgctgcctctgaccttccgggatctcaacacccacgagaagctgtgtgccgaccgactcatctgctcggtcttcccgcacgtcggggagcccagcctggcggtggcagtcccagccagggccctcctgatcctggacggcttggatgagtgcaggacgcctctggacttctccaacaccgtggcctgcacggacccaaagaaggagatcccggtggaccacctgatcaccaacatcatccgtggcaacctctttccggaagtttccatctggatcacctcccgtcccagtgcatctggccagatcccagggggcctggtggaccggatgacggagatccggggctttaacgaggaggagatcaaggtgtgtttggagcagatgttccccgaggaccaggcccttctgggctggatgctgagccaagtgcaggctgacagggccctgtacctgatgtgcaccgtcccagccttctgcaggctcacggggatggcgctaggccacctgtggcgcagcaggacggggccccaggatgcagagctgtggcccccgaggaccctgtgcgagctctactcatggtactttaggatggccctcagcggggaggggcaggagaagggcaaggcaagccctcgcatcgagcaggtggcccatggtggccgcaagatggtggggacattgggccgtctggccttccatgggctgctcaagaagaaatacgtgttttacgagcaagacatgaaggcgtttggtgtagacctcgctctgctgcagggcgccccgtgcagctgcttcctgcagagagaggagacgttggcatcgtcagtggcctactgcttcacccacctgtccctgcaggagtttgtggcagccgcgtattactatggcgcatccaggagggccatcttcgacctcttcactgagagcggcgtatcctggcccaggctgggcttcctcacgcatttcaggagcgcagcccagcgggccatgcaggcagaggacgggaggctggacgtgttcctgcgcttcctctccggcctcttgtctccgagggtcaatgccctcctggccggctccctgctggcccaaggcgagcaccaggcctaccggacccaggtggctgagctcctgcagggctgcctgcgccccgatgccgcagtctgtgcacgggccatcaacgtgttgcactgcctgcatgagctgcagcacaccgagctggcccgcagcgtggaggaggccatggagagcggggccctggccaggctgactggtcccgcgcaccgcgctgccctggcctacctcctgcaggtgtccgacgcctgtgcccaggaggccaacctgtccctgagcctcagccagggcgtccttcagagcctgctgccccagctgctctactgccggaagctcaggtggataccagggcagggggcaggggctggggaaggggcagaggagagagcagaagccgtcccctccccaccaccaagcttctctgtcagtctcctagggctgccgtaa

SEQ ID NO: 962 - DNA, 3063 bp, Homo sapiens
  source 1..3063: mol_type = genomic DNA
acgggatgtaggcggcggcggcggtagtggtagcggttattcggcggcccgcggcggaccatggccctggccctggcccggcgtcgctgggctttcctcacggcgtccccgagcagcgtcgcagagcgggccgacttccgggaaggaactgaccagcgactgagcggcggccggcgcgcttagcgccctgaacatgcggcagtccctgcgggcgaccccgggctccggacaggcggcggcggaggcggcggctcgggagggaaggaggcggcggcgccggcggaggtggcggcggagacggccggcgcccggcgcggagccctagggaggcagttcagcgcggcctcgggcctcgtcgagaaggatgctgtcccgaaagaaaaccaaaaacgaagtgtccaagccggccgaggtgcaggggaagtacgtgaagaaggagacgtcgcctctgcttcggaatcttatgccttcattcatccggcatggtccaacaattccaagacgaactgatatctgtcttccagattcaagccctaatgccttttcaacttctggagatgtagtttcaagaaaccagagtttccttagaactccaattcaaagaacacctcatgaaataatgagaagagaaagcaacagattatctgcaccttcttatcttgccagaagtctagcagatgtccctagagagtatggttcttctcagtcatttgtaacggaagttagttttgctgttgaaaatggagactctggttcccgatattattattcagacaatttttttgatggtcagagaaagcggccacttggagatcgtgcacatgaagactacagatattatgaatacaaccatgatctcttccaaagaatgccacagaatcaggggaggcatgcttcaggtattgggagagttgctgctacatctttaggaaatttgactaaccatggttctgaagatttaccccttcctcctggctggtctgtggactggacaatgagagggagaaaatattatatagatcataacacaaatacaactcactggagccatcctcttgagcgagaaggacttcctcctggatgggaacgagttgagtcatccgaatttggaacctattatgtagatcacacaaataagaaggcccaatacaggcatccctgtgctcctagtgtacctcggtatgatcaaccacctcctgtcacataccagccacagcaaactgaaagaaatcagtcccttctggtacctgcaaatccatatcatactgcagaaattcctgactggcttcaggtttacgcacgagcccctgtgaaatatgaccacattctgaagtgggaactcttccagctggctgacctggatacataccagggaatgctaaagttgctcttcatgaaagaattggagcagattgttaaaatgtatgaagcatacagacaagcccttcttacagagttggaaaaccgaaagcagagacagcagtggtatgcccaacaacatggaaaaaatttttgagctgattttttaaaaatttaagttttgtaagagctttaaaatattttcacagataaaaaattgcaaacaagtactctggttaataaatgctgcttcctttgtggaaattataaaattctaactttacatgtattttgttattagaaattttcttttattgaatgagaaaaattagtctatcattttaagagccaatatggcaaacactttcaaatactgtatattaggaaactgttttggtattcttgatggaaaaaaacgcagcggaaatgtcattatgaacagatgttaaataggaaattattacttgttaacttcttacagcagtagtaccttctttaaaaaaaaaaaagaatctgcggtatttttttaaaaaaaaagtttaccgctgtagtgtgaaatattgtctggaaagggatggtttaaatattaccatgatgtagttgaaatataaaataggatttggaaccttattgtgataaatatttatatatgatgtatgtttgtctcccctctccaaagtaaggaacccagctgggcgtggtggctcactcctgtaatcccagcattttgggaggccgaggtgggtggaccgcttgagtccacgagtttaagaccagcctgggcaacatggtgaagccccatctctacaaaaaatacaaaaaaattagccgggtatgatggtgtgtgcctctagtcccagctacttgggaggctgaggtcagaggatggcttgagcccaagaggcagaggttgcagggtcaagatcgcaccacttgcactgcagcctgagagagagagagccagaccttgtctcaaaaaataaaaaataaaaaaataaaaacaaaataaggaatccttttaaagcatgttgagaaagtattttttggtatgaatgggtgacgggccttttaatctttcaggaatacatataagcaggaatacttagcctgtattgggaaggtgcgtgaaactcaaagttgctaacatcatcttccttattttcagccagtgctgttactgcatttagcatggctctgacgaggcagtggagagttcctgacagcatagcatactgccttctgacagactgggttaagctaccaaaaatgacaaccagggattcaaaaaaaatttttggtcattaaatcgaatgtatattattactttttaattttctaagtatttatcacaggactttaacaccatatatttccctcccagtttttctccccttttggtttaatagttaaaacatttttcataattagtgctgtacatttgattgcaaacaaattggtgatacttctaaactataactataaatctctagaattctgtgaatttcaacattatttgaagtagttcttcagttatatttacatgtgttgtaaatatgtaaatatacttttagcttaggaagtcttccagaatacaaactactcccagttagatatcagtgagtttgaataactgaagaaatgttgacaatgttaagtgtttgattttatataacaagcttattaaatatatttttgtggaaacta

SEQ ID NO: 963 - DNA, 2891 bp, Homo sapiens
  source 1..2891: mol_type = genomic DNA
ccacccgcctctggctcctctccttcccacccctgccgtgctccggcaggaagaggtggtgccagggccgttgctaggatacgaccaacagctgagaacgcggcgagtatggaagctgcgtcttaggagcctgggaaagcacttcgacgagaatagtttggtttcgtacacaggaaaatgtctaatcaacaggagaagtatgaagctcagaatatagtcaattcaacagaagagagtgatgatgcttttgatactgtcactattccagttccctcagaagagcctcaagagtcagatcaaactgaagagcatgaatctggaatagaacaattcagtgagagccatgcaatacatgttgaggagcagagtgaccaaagcttttcaagcctggaaccagacaatgaacaactcatggaagaggttatatcaccaagacaagtttcatatactccgcaacatcatgaaaagcaatatgcaatgcagaggccaaatgatgatagtttggcatttctggataaaataaagtctgtaaaggaatctttgcaagaatcagtggaagattctctagcaacagtaaaagttgtacttattccagtgggccaggaaattgtaataccttttaaggttgataccattcttaaatatcttaaggaccatttttcacacttattaggtatcccacattctgtactgcagataagatactcaggaaaaattcttaaaaataatgagactctagtacaacatggagttaagccacaggaaattgtacaagtggaaatcttttctacaaatccagatctgtatccagtcagaagaatagatggattaactgatgtctctcaaatcataactgtcactgtccaaactggacttgatcaataccagcaggtacctgttgagattgtcaaatctgactttcacaaaccatttcttggtggattcagacataaagtaacaggagtagagtatcacaatgctggaacacaaactgtacctaaaaggattcccgaaagactcagtatattttgtagggatacgcagacagtttttcagaaaaaaaatctccaacaaactacaaatacaacatccacacagatgactaacattggtgtatatgtatcaaatatgactgataaactggtaacaccaggaaagtatttttcagcagcagaataccatgctcaaagactaaaggcggtgatagtgatacagacttactacaggcaatggcatgctaaaatcttcgtagagaatttaagaagacagaaaagcttaagactggaatgggaaacacagcaagaactaaggaagataagagaaaaagaagaatggataaaattggactatcaccggaggcataatcctaaaacaaatgaagattttgaatttctttataatgcattagaattctggcggcaagaagaacttacacgtattaaccaatcttttactggagctgaaaggaaagctgctctgtgtgaacttctggaaaaagagactcagataattgcttccattgggagacatagatacattgcttatatggcaaatcaggaagcagcaatacaagcttttttggataagtgttcagctccaaaaatatggagaacccctaatggcaaaacaattgagatggatacgcagttcaccatcagagccagagagctgcaaaatatctataagtgcattatgctgaaaaatatctcccaagatgagaggctggatgtgctgttaactcttaaacacactgtaaaggaacatgaatgtaaactaactcaggaaattctagaattgattgacagagaggttgaccttatgatgagaggagtcaaacatcataaccttgaaggactcagaaaaagaattgcgacactcttttttcattatatcaaaacacctctgtttaatcctgaagttgcaaaataccttaaggtccctcaagacccattgaaattttataagaagatttacttttgccacagttgccagctttatttgccttctacagaattttctgtatcatccacctcacgccgcatataccggtgtcgtaactgcattaaccttcagaatgaggctcaaaaacgagaatcatttttgaagtacaaatgtttacttcaacagctctactatacagaagctgattatgaagatgattctaaaattgctttcttgatgcagctacaagacattcagtacctgacagagaacatctgggcgtcccagtcagtcctcagtgcttgcgacaatctcagtgatctggtcatggtcagatggaataaatccctggagtggtccccctggaactgcattcttcttaccaaagatgaagcagctgctcatctcaagctaacaagtattgaagagggatatgaacgctcatttattcacaagatcaaacacaaacatatcctggctaagaactatttttctcaggttccagtgctggcttcatttatacttgatgatggtgaaattgatgagatcagatggaagtatcactcagacacaacacctaagattatagaatcccagaggcctcctcattaggtgatccaggagtatttgtttgatgatcggcattttgttcactgctaatagggtaatacagaggtcacagagtatggaaatggaatttaatctgtttattgattttgttttttgtttttcatagtattttgagttatataaagagaaaacatttctatataagtaagtattctttgttaggaagttggtgctaaattgaaatgcaattttgttactgaaattaatattttggggtaaagaaaacattttaaaatgtgttttcacattaaattttttaaattttttcaagtatattagagttaaaatctaacaaacagccaaataaaaactagacaact

SEQ ID NO: 964 - DNA, 5598 bp, Homo sapiens
  source 1..5598: mol_type = genomic DNA
gagcctggggaggtcgagggtgcagcgagccgtgatcgtgctactgcactccagcctgggcaacacagagagaccctgtctcaaaacaaacaaacaaacaaacaaacaaacaaacaaaaaaaacaaagaaaaaaaaatgggagtgggccgggcgcggtgactcacacctgtaatcccagcactttcggaggccaaggcgggtggatcacgaggtcaggaattcaagattagcctggacaacatggtgaaaccccatctctacgaaaaatacaaaaattagccaagtatggtggccggcgcctgtaatcccagctactcgggagactgaggcagagaactgcttgaacctgggaggcagaggttgcagtgatccgagatcgcgtcactgcactccagcgtgggcgacagagcgagactccgtttcagaaaagaaaaaaaaaaaaaaaaaaaagggagtcggggtggagctctcattggctcgttgcatgtgagtgtccctacggcctagaaatacaagagaagcacatcggaacgggctggaaatccacccagttaactagagggctttgaaccttttattaacttggaggttgactctcctgtcaactcgattcccttttggctgtttggcagggtcagtgagacatcccctgggtcgctcgaccccgtaggacggttcagggagccctccaggtcttcgtttctcctcttccccgcacagtgctgttatccagctgggggatccaacgcacacttaaggctccagcaaagtggctccgctgccggatgggagtgccccagtgtgctggatgaagctggcgcatgcaccatgtcatcatgtgtctctagccagcccagcagcaaccgggccgccccccaggatgagctggggggcaggggcagcagcagcagcgaaagccagaagccctgtgaggccctgcggggcctctcatccttgagcatccacctgggcatggagtccttcattgtggtcaccgagtgtgagccgggctgtgctgtggacctcggcttggcgcgggaccggcccctggaggccgatggccaagaggtcccccttgacacctccgggtcccaggcccggccccacctctccggtcgcaagctgtctctgcaagagcggtcccagggtgggctggcagccggtggcagcctggacatgaacggacgctgcatctgcccgtccctgccctactcacccgtcagctccccgcagtcctcgcctcggctgccccggcggccgacagtggagtctcaccacgtctccatcacgggtatgcaggactgtgtgcagctgaatcagtataccctgaaggatgaaattggaaagggctcctatggtgtcgtcaagttggcctacaatgaaaatgacaatacctactatgcaatgaaggtgctgtccaaaaagaagctgatccggcaggccggctttccacgtcgccctccaccccgaggcacccggccagctcctggaggctgcatccagcccaggggccccattgagcaggtgtaccaggaaattgccatcctcaagaagctggaccaccccaatgtggtgaagctggtggaggtcctggatgaccccaatgaggaccatctgtacatggtgttcgaactggtcaaccaagggcccgtgatggaagtgcccaccctcaaaccactctctgaagaccaggcccgtttctacttccaggatctgatcaaaggcatcgagtacttacactaccagaagatcatccaccgtgacatcaaaccttccaacctcctggtcggagaagatgggcacatcaagatcgctgactttggtgtgagcaatgaattcaagggcagtgacgcgctcctctccaacaccgtgggcacgcccgccttcatggcacccgagtcgctctctgagacccgcaagatcttctctgggaaggccttggatgtttgggccatgggtgtgacactatactgctttgtctttggccagtgcccattcatggacgagcggatcatgtgtttacacagtaagatcaagagtcaggccctggaatttccagaccagcccgacatagctgaggacttgaaggacctgatcacccgtatgctggacaagaaccccgagtcgaggatcgtggtgccggaaatcaagctgcacccctgggtcacgaggcatggggcggagccgttgccgtcggaggatgagaactgcacgctggtcgaagtgactgaagaggaggtcgagaactcagtcaaacacattcccagcttggcaaccgtgatcctggtgaagaccatgatacgtaaacgctcctttgggaacccattcgagggcagccggcgggaggaacgctcactgtcagcgcctggaaacttgctcaccaaaaaaccaaccagggaatgtgagtccctgtctgagctcaaggaagcaaggcagcgaagacaacctccagggcaccgacccgccccccgtgggggaggaggaagtgctcttgtgagaggcagtccctgcgtggaaagttgctgggcccccgcccccggctcccccgcacgcatgcatccactgcggccggaggaggccatggagcccgagtagctgcctggatcgctcgacctcgcatgcgcgccgcgtcgcctctggggggctgctgcaccgcgtttccatagcagcatgtcctacggaaacccagcacgtgtgtagagcctcgatcgtcatctctggttatttgttttttcctttgttgttttaaaggggacaaaaaaaaaaaaaggacttgactccatgacgtcgaccgtggccgctggctggctggacaggcgggtgtgaggagttgcagacccaaacccacgtgcattttgggacaattgctttttaaaacgtttttatgccaaaaatccttcattgtgattttcagaaccacgtcagatataccaagtgactgtgtgtggggtttgacaactgtggaaaggcgagcagaaaactccggcggtctgaggccatggaggtggttgctgcatttgagagggagtagggggctagatgtggctcctagtgcaaaccggaaaccatggcaccttccagagccgtggtctcaaggagtcagagcagggctggccctcagtagctgcagggagctttgatgcaacttatttgtaagaaggatttttaaattttttatgggtagaattgtagtcaggaaaacagaaagggcttgaaatttaataagtgctgctggaaggggattttccaagcctggaagggtattcagcagctgtggtggggaaacatttctcctgaaagactgaacgtgtttcttcatgacagctgctcaaagcaggtttctgagatagctgaccgagctctggtaaatctctttgtcaaattacgaaaacttcagggtgaaatcctatgcttccatgtacattacatggcttaagattaaacaaaaacatttttcaagtctctaactagagtgaactctagagcacagtagttcagaaactatttagagcttccaggatatatttcacagcttcaggcatgtgatcagttagagccgatgaaacctatgcccgcctgtatatatattagcagcttagctagttcataacctgtatattctaaagactgctaaggttttgttttcattttaaatcctagctgattgttgtggtcaatgaaatacccagtttctggagggccaggtgggaaatgctttcactggaccaacacacaaatgatcatcctgaggatctgagcttccctagactccacacaataaccttggggcacccttttagagaagactgttgaaacccacagcactcgttggggtatgaggaaaccagggcttggcacaggaagttcccctttgtagctaaaagtccagaaagaaagggttcatctttttgacttccaactgatattgggaagtttggttgaggttcaagtgtgactccttccagagccacaggtaggggagtgtgaagttgagggggaggaaagctggaaggactctgccttgggagattcccagctctgctttccagcgcttggtggaatctgggctggggaaagacggcaccgggaaactctgcttccccattgtttccatctgatcagctgtggtgtgaggacttctcagacaaaggcaaggcctcgtgcccctgcccagcccattcatggagccctgggccttcttggcttccatagatcctaagctcttgactgtagtttagccagacttgttttgctatcttataagcagttcagaattagggaatgctggttttgaagagcaaaggacaggtagtctagagagggtcgtctggcctgcttgctgggtctttgtaacccagcacttcctcttgccctcctggctttatgtttatggggagaggactcaatagctccaccccttctggcaccagatggggcttggttagtttgcaataagcaccttgcagaggttaaagccagcgggtccctagtcttaggcccagcctgcttgtgtgggctctggcctggcctggtggctggcccagggggcagcagtgcttagagcttctgcagggcttctcttgtttacacagctgcatcagacaatgccatttctccccaccacggaaccttccatctaagatttcttccagggaatgccagcaatcaggcagcacccagctgtgggggcagtggggtgggggagacccacattgatgactttttttttttcttttaatgaagaaacaccaaagaaagctgtggaaaggacctgccccacatgaaaaggataagccaagatggctgtaaacacagagcatttgagctgccactcttggagcacattgatttttcaaaagccagctctgtcaggaaaggaggtgctgttatgagcagctcttccagtgggcaaagaggacgcccataatttcttccattgctagctcatctgtgggaccaatttggtgtaagcaacctgtggcctgcacttgtggcctcgaaggaagcacaaaccctccatccacttcccatttcctctgcccttttccacctcccccttccatcccaccagctgccagtggctcccagaaagccttattgagccccttgttgacacttggggctgcggaggcctctccctactggtctggcctttcctgagaggcaggtcttccgtcctcagagcctttctggaacaaggagaatgcctgtgcaggtggacacacaggcctggcctgtcgctctcacttgtcttccagcggggagcttcacgttgccgagtggaagaaccatgacctccacttgcttccaaggtgctagggaagtttcagggtacgctggttcccctctccagctggaggccgagtttctggggactgcagatttttctactctgtgatcgattcaatgcccgatgcttctgtttcattcccgaccctttctactatgcattttccttttatcaggtgtataaagttaaatactgtgtatttatcactaaaaagtacatgaacttaagagacaactaagcctttcgtgtttttccacaggtgtttaagcttctctgtacagttgaaataaacagacagcaaaatggt

SEQ ID NO: 965 - DNA, 2433 bp, Homo sapiens
  source 1..2433: mol_type = genomic DNA
ggagacagcggcgtggcggcggcggtggcggtagcgacggcacgccgtagggcggtcagaaggtttccggttccggtgtaacgttcgggctccgtctcaggggctgaagtttgtgaggtgtagtattgagtcctgtttgagctattgttctctttttcctgaaaaatggcactgtcaaagagggagctggatgagctgaaaccatggatagagaagacagtgaagagggtcctgggtttctcagagcctacggtggtcacagcagcattgaactgtgtggggaagggcatggacaagaagaaggcagccgatcatctgaaaccttttcttgatgattctactctccgatttgtggacaaactgtttgaggctgtggaggaaggccgaagctctaggcattccaagtctagcagtgacaggagcagaaaacgagagctaaaggaggtgtttggtgatgactctgagatctctaaagaatcatcaggagtaaagaagcgacgaataccccgttttgaggaggtggaagaagagccagaggtgatccctgggcctccatcagagagccctggcatgctgactaagctccagatcaaacagatgatggaggcagcaacacgacaaatcgaggagaggaaaaaacagctgagcttcattagcccccctacacctcagccaaagactccttcttcctcccaaccagaacgacttcctattggcaacactattcagccctcccaggctgccactttcatgaatgatgccattgagaaggcaaggaaagcagctgaactgcaagctcgaatccaagcccagctggcactgaagccaggactcatcggcaatgccaacatggtgggcctggctaatctccatgccatgggcattgctcccccgaaggtggagttaaaagaccaaacgaaacctacaccactgatcctggatgagcaagggcgcactgtagatgcaacaggcaaggagattgagctgacacaccgcatgcctactctgaaagccaatattcgtgctgtgaagagggaacaattcaagcaacaactaaaggaaaagccatcagaagacatggaatccaataccttttttgacccccgagtctccattgccccttcccagcgccagagacgcacttttaaattccatgacaagggcaaatttgagaagattgctcagcgattacggacaaaggctcaactggagaagctacaggcagagatttcacaagcagctcgaaaaacaggcatccatacttcgactaggcttgccctcattgctcctaagaaggagctaaaggaaggagatattcctgaaattgagtggtgggactcttacataatccccaatggctttgatcttacagaggaaaatcccaagagagaagattattttggaatcacaaatcttgttgaacatccagcccagctcaatcctccagttgacaatgacacaccagttactctgggagtatatcttaccaagaaggaacagaaaaaacttcggagacaaacaaggagggaagcacagaaggaactacaagaaaaagtcaggctgggcctgatgcctcctccagaacccaaagtgagaatttctaatttgatgcgagtattaggaacagaagctgttcaagaccccacgaaggtagaagcccacgtcagagctcagatggcaaaaagacagaaagcgcatgaagaggccaacgctgcccgaaaactcacagcagaacagagaaaggtcaagaaaattaaaaagcttaaagaagacatttcacagggggtacacatatctgtatatagagttcgaaatttgagcaacccagccaagaagttcaagattgaagccaatgctgggcaactgtacctgacaggggtggtggtactgcacaaggatgtcaacgtggtagtagtggaagggggccccaaggcccagaagaaatttaagcgtcttatgctgcatcggataaagtgggatgaacagacatctaacacaaagggagatgatgatgaggagtctgatgaggaagctgtgaagaaaaccaacaaatgtgtactagtctgggagggtacagccaaagaccggagctttggagagatgaagtttaaacagtgtcctacagagaacatggctcgtgagcatttcaaaaagcatggggctgaacactactgggaccttgcgctgagtgaatctgtgttagagtccactgattgagactactgcaagcccttgcctctcctcccttgcctttgtctcttcagtcctctcacttattctatttcccaaccccctcccacttgtttgtgtgatctcagaactgtgccaagcagacactgggacaaagggagaatatcttgctcccctcctgagtcagcctggtgttgccctttattccccttatgtgcatatgattaaagagttatttttaaa

SEQ ID NO: 966 - DNA, 2950 bp, Homo sapiens
  source 1..2950: mol_type = genomic DNA
ctgggagagaggaagtgatcgctcccggaggagcgcgagccgagcggccggcgcagcgtgagacagcacatcctgcccgcgccggccccgccaccttcgggagccgcctgcaccaacgctgccgccgcccaggagccgccgccggctcggggagcccagttccgccgctgccgagcgcgtccaggaaaccaacatgtctgacaaaagtgacttaaaagctgagctagagcgcaaaaagcagcgcttagcacagataagagaagagaagaaacggaaggaagaggagaggaaaaagaaagaggctgatatgcagcagaagaaagaacccgttcaggacgactctgatctggatcgcaaacgacgagagacagaggctttgctgcaaagcattggtatctcaccggagccgcctctagtgcagccgctgcattttttaacatgggatacctgttattttcattatttagtcccaacccctatgtctccctcctcgaaatcagtgagcactcccagtgaagctggaagccaagactcaggcgatctggggccattaacaaggaccctgcagtgggacacagacccctcagtgctccagctgcagtcagactcagaacttggaagaagactgcataaactgggcgtgtcaaaggtcacccaagtggatttcctgccaagggaagtagtgtcctactcaaaggagacccagactcctcttgccacgcatcagtctgaagaggatgaggaagatgaggaaatggtggaatctaaagttggccaggactcagaactggaaaatcaggacaaaaaacaggaagtgaaggaagcccctccaagagagttgacagaggaagaaaaacagcagatccttcattcagaggaatttctcatcttttttgaccggacaatacgggtaattgaaagagccctggctgaagattccgacatcttttttgactacagcggccgagagttagaggaaaaagatggggatgttcaggctggagccaatctttctttcaatcgtcagttctatgatgaacattggtccaagcatcgagtggtcacttgtatggactggtccctccagtaccctgagctgatggtggcttcttacaacaacaatgaagatgctccccatgaaccagatggagtggccttggtttggaacatgaagtttaagaaaaccacaccagaatacgtcttccactgtcagtcctctgtgatgtcggtctgcttcgcccgtttccatcctaacttggtggttggtgggacttactcgggccagattgtcctctgggacaatcgcagtcatcgaaggactccagtgcagcggacacccttatcagctgctgcacacacgcatcccgtgtactgtgtaaatgttgttgggacccagaatgctcataacctcatcactgtctccactgatggcaaaatgtgttcctggagcctggacatgctctcaactccacaggagagcatggagctggtgtacaataagtccaagcctgtcgctgttaccggaatggctttcccaacgggagacgtcaataacttcgtggttggcagtgaggaaggtacagtctacacggcttgtcgtcatggaagcaaagcaggtattggtgaggtctttgaaggtcaccaagggccagtgacaggaattaactgccacatggcagtgggcccaatcgacttttctcacctgtttgtcacatcatcatttgactggactgtcaaactgtggaccaccaagcacaacaagccgctctactcctttgaagacaatgcagactatgtgtacgatgtcatgtggtcccccgtgcatcctgcgctttttgcctgcgtggacgggatggggcgcttggacctctggaacctcaacaatgacaccgaggttccaacagcaagtgtggccattgagggggcatccgccctaaaccgtgttcgttgggcccaagctggcaaagaagttgctgttggggactcggaaggccgtatttgggtctatgacgttggagagcttgcagttccccacaatgatgaatggacccgatttgccaggacccttgtggaaattcgtgctaacagagctgatagcgaggaggaaggcactgttgagttatctgcctagtggaaatgagccacccccactgcagcccccacctttgtgtcctagagctcagcgtctgcagtcaagtctcttgtattcggtgtccattcagtatcagtattgctgtgatattttgggtgccatattgtgccagctttgctccaagtattctaaatgtgtcccatcatgctttccactgacccaaaattcaccacagcatttctatctttatatttctgtctcaaaaatgaagagaagggggttatgggttaagttgctgccttttaactactttgtagctgtatttaatagctggaaacctctggttaaatttgtgcttacatgcactcctggcatagtcctattaaatccatatgaagccagatatgattgggtgcagatgtggtgttcctcatattatggtacagggccaaagacttgagacgtggtgttttacatggtgactcacattatgaatggatttactagaagaacattgctgctccttatttattgtagtgtgctgcatggaacgtatttatttgaaagcattaaaataaatgatcctagagcatgtgcataatgagaggactgtattctctctgctgctgttgaggttatattaagttccacatagcaattacagtatgccagttccactgaagacatgaaatctttagaggtttcttgcagtgaacgaaatgaattttaatgcctattatttctgggtactttaacaatatttcaaatatcattgaccactaatacttctcactgaagctaacacagtctgacaaaagtctatggttcctaaatatgacatcagtgttgccaataaaa

SEQ ID NO: 967 - DNA, 8055 bp, Homo sapiens
  source 1..8055: mol_type = genomic DNA
atgacggaagtgacggcggctcggcgatggctctcccgcaggcgcagaaacggctgctgggcagctgatgggcaggagcttaccaggctggcttgctctgagctgcggttactgtgtccaggccccgggttctcagaactgtcatacataaagtacacagaaatgaagagaaaagtcgtgaatactcacaagctgagattgagtcctaatgaggaagccttcattttgaaggaagattatgaaagaaggcgaaaactaagattgctacaggttcgagaacaagaaagagatatcgccttacagataagagaagacataaaacagaggagaaatcaacaatttacacgtttggcagaggagctaagggcagaatgggaagaatcacaaactcagaaaatacagaacttggaaaaactgtatttggcaagtttaagaagtatgggagagggacatcgacaggccaaagaaaatgaacctgatttggatgctttggcacagcgggcagcagaaaggaaaagaaaagcagatttgaggcataaagaagccttgaaagtacagaaaaatcaaaaagaaatattactgaaacaaaaaacctggcatataaaagctcgaaaggaagcactgcttgtggaaaaagagagatcagccaaaattacaagtctgccacctcctcctccaactctttttgagaacatcgaagtaaaaagaatttctgcagtcaaaaccaatagttctacctaccatcatcttcacacttttgtgaatagagagacagacacaaaacggccagatgctcgtttggctgctgaagaggaagctaaacgattggaagaactacaaaaacaggcagcacaagagagaatggaacggtttgaaaaggcacatgtacggggattccaagcaatgaagaagatccatttggctcaaaatcaggagaaactaatgaaagaactcaaacagctacagcaagaggacctggcacgtaggagacagactgtagcacaaatgccaccacaactagttgaacttccatacaaacgcagtgaaatgaaagaagactggcagagagaattggaatttgcctttgaagatatgtacaatgcagacaggaaggtgaaagggaatctgattctgcaccttgaaccagagcccttgcccactgtgactaatcagatccaagatgaagagctggacctttcaatggaacaagaaaatttgggtgcagctgaagaccttccagtgacagaagctgaaatatgttctagtgaaacagatgttcccttggtaatgaagacccaacagattccttcaaaagttctttttaaaaaattattaaataagatccgaagccaaaaatctctctggacaattaaatctatgtctgaggatgaaagtgaaatgattacgactgttagtgaaattgagagtaaagcaccaacggttgagtcaggaacaattgccagcaaagagagaacgttatcctctgggcaggaacaagttgttgaaagtgatacactaacaattgagtctggaccacttgctagtgaagataaaccactttcgtgtggtacaaactctggaaaagaacaagaaataaatgagactctgcctatcacaactgtagctcagagttcagttctacttcatcctcaagaagcagcagccaggattagaatgtcagcaaggcagaaacagataatggaaatagaagagcagaagcaaaagcaattggaattacttgaacaaattgaacagcagaaattaagattagaaactgactgcttcagggctcagctggaagaagaaaaaagaaaaaaaactcaaccgactggggttggcattgctccagcatcatgccctgtaatttctgatgaagatagtcataggcagatgattcgtaactatcaacatcagcttttacaacaaaacaggttacacaggcagtctgttgaaacagccaggaaacaattacttgaatatcaaactatgttaaaaggaaggtgcccatcggtgtcagctccatcattgataactgattctgttatatcagtgccatcatggaaatctgagagaccgactgctatatcagagcattgggatcaaggtcagagactcaagttgagtcctaacaaataccaacccatacaacctatacagacctccaaattagaacaagatcattttcaggtagcgagacaaaatcactttccacaaagacaggtggaaacaacagaaacattacgcgcttcagatattttaaccaatcaagctttagaatcacaagaacatctaaggcaattctctcagactgaaacacaacagagagactataaattggtccccaaagattctgagacactttcaagggctttgtcacatgacaggcagctaatatcacaggatgctagaaaaatatctgaaacatttggggcaacaacttttcaaagtttagaatcccaacaattgttctcagagaatagtgaaaatatatcttaccatttaactgaaccttcttcatttgtaccactggtacctcagcattcttttagttctctgcctgttaaagttgagtcaggaaaaattcaagaacccttttcagccatgagcaaaagtacagtttccacaagccattctataatcagccaaatgcatgataggcctttgctgccgtcagagaatatcacagcccagcaaggtaatatgaaggccctccaagaacagttagacctacagaagaaagttcttcaggcaactcaggaagctcaggaacagttgcttttgtgcaaacagaaagaagtggaacagcaaacgggcctctcggtattccttcccttggtaactccagattcatctgctttattgccttctgccaaagcagatttggggagaatccaggaatcttcaccaaccaagaataatattgcagtttcctcagaccatcatgtgatctcacaacttcaggataagcgtttgagtctttcacagcctatcctatcacagcaaaataattttaaatttctccaagagcagttgaatattcagaaggatagccttcaggctaggcgagaagcccaggaagtattgtatgtacataaacagagtgaattggatagaagagtatgttccgaacaggctgagccctctttcccatttcaggtagctcagcatacatttacttcactaccatctgctgatacaaaatctggaaaaatacaggagcaacattcatctaagagcgagaaaggacttgtttcatgccaatctgacatccccatatctcaggatgggtctttgagtttcctacagcagttcctacctctacatgatagtttgaagttgctccaagaacagttgactaaacagagggatactcttcaggctaggcatgaagctcaggtggaattacttttacatagacaaagagatttgggggacagtaagtctgggctggtgagctcttcatcctcaccagtggttgttcagcattcagttgcttcacaagcttctgctaaagctgagcctaggagaattcaggagctttatttatctgagaaggagaatgtaggtccctcctgtcatttgataatcccaacatttcaggataagtctcttagttttccacagcatagcctggcacagcaagaaaatttgacaatactccaagaacagtcacaaatacaaagggtaatacttggtgctaaagaaggaactcaggaatttgtacacacagaaagtgaattggagaaaagaatttcttctgaacagactggcacctcctcatccctttcccaggtggatgaatctgagagattccaggaatgtatatcaatcaagagtgacagtaccattcccttaagccatcctaagatcccaagatgtcaggaaagacttttgagagtttcacaacatatgctacctctacaagataatttggaggaacaccaagcatggctagacactgagaaagaagcctttcatttcagccagaaaacccaagaaaatacatcttctgaacaaactggttcatcttcattcataccccagttggtacagctttcatttacttcgttagcttcagctgagtctggcacaatcctggaacctctttttacagagagtgaaagtaaaattttttcaagccaccttcagatcccacaattgcaggataggcttttgaggatatcgcaacttatccagcctcaacaagataatttgaaggcacttcaagaacagttagctacacagagagaagccatcattctagctagacaagaagctcgggaagaattacttttacatcagagtgaatgggagggaagaatatctcccgagcaggttgacacctcttccttacccctagtaccacagcattcattcgcctcattacctcttaatgaatctgaaagaaaccaagaaccatgttcaattaacagtgataatatagtatcctcaggtcactcagagataccaacattgcctgatgggctgttgggtttatcacatcttgttttacctcaacaagataatttgattgcacttgaagaacacttgcatgcacagacagatttccttccttctattgagaaaacccagaaagaattggttttgtcaaaaccatgtaaatttgaggaaaaggtatcttctgagcattttatccagtctcaccatggtgatttgcaggcacttcaacagcagttagatacacagaagaaagccattcgatctatacaggaagtccaagaagaattgcttttgcaaagattaagtgaattggagaaaagggtatcatctgaacaagtttgctcctcttcatttgtatcccaggtgcctgttgctgactctgaaagaacccagaagtctttcccaaccaaaagtaatgatactcttccctcaagtcatcgtgagattccaagattacaggatagacttttgagtttatcaaagcctattctgcctcagcaagataatatgacagcacaattggatgcacaaagggaagtgatgtattcttatgagaaaccccaggaagaactgtctttaaacaaacaaagaaagttgaacaaaagtgaatctgctgagcatactatcccctctttgtttctacccaaggaaacagagcattcgtttattccactaccttttgcagaagctaaacctaaaagcacttgtgaattgtattcatcccagaatgaacatgcagcccccccaagtaatcctgtgatcccagggtttcaagatagacttttgagtttttcacagtctgtcttaactcagcaagataacttgggacttcagaaacagttggatctacaaagagaagttctgcattatagccagaaagcccaggaaaaattgcttgtacagagacaaacagcattgcagcagcagatacagaaacatgaagagactttgaaggatttctttaaagacagtcagataagtaagcccacagttgaaaatgatttaaaaacccagaagatggggcagctcagagactggtttcctaatacacaagacctagcaggaaatgatcaagaaaatattaggcatgcagataggaacaactctgatgataatcatttggcttcagaagatactagtgccaagcaaagtggtgagcatctggagaaagatctggggagaagatcctcaaagccacctgtagcaaaagtcaaatgtggtttggacttaaaccagcatgaacttagtgctatacaagaagtagagtcaccagcaattggcagaacttctatactaggtaaaccaggtatttatgaagacagagaccccctgcgagtctcaataagccgagaacaaagtttctttgggagcccactggcccatgatccgtttagttgtcttcaactggttggccaagagaatgtctgtggtgatgactatgatgaagcagttaagctgaaggaatctgttgttgaaaatcatgcagtgttaagttatgctgtggaggaagaacatgcatatttgggtccaactgtgaagccagatgataaggctaaaacactgtcttatgaaccattatcttcagcaactgtttccactgggagccttttaagttatgaaaacacagatttgagccttacagatccagagtcattttcagagcacatggatgatagcaagcaagaatctaccaccagtaaagaagaggaaacaaatattataagttccatagttccttcaacacaagatatttatcagcggcagaactcttcagacgttcataaatctctgttgcctgcagtggatgaaactacatgtggtcacacacactttcagcaaatgatagacaagtacattaatgaagcaaatttgatacctgaaaaaacagatttgcaagaattggaacacatttttcctaatttgcatcatcagctgtttaaacccttagaaccacatccagattttgacttatcatcatcatcctctgggatttctccagacaacagagacttttaccagagatcagattcttcatctgaaagccactgtgctactggattatccaaaagtacagtttatttcacagcactgaggaggaccagcatgcattcttctcttaacacaagtccgaatcaacaacctgacactaacttggctcatgttggagctcacagttttgctacagaaaatattattgggggatctgaacaatgttttgaacagcttcagccagaatattcttcacaggaggagagccagcatgctgatctaccaagtatttttagcattgaagcaagagattcttcccaaggcatgaaaaatcagaactatccctctgaagaacatactgaaatattacaaaacaagaaaaaaattgttcatttccagctttctataggaaacttaagttcagtctacagttcatctgatgaagctaatgtatttgatcagttaaatgtacagcatagcactccatgtggttctaactctagtgagtgctcaacaaaacaccaactagaaagcagaaaggaaagtatgggctttgaagaactatcaaaaagaggggttgttacaatgttacaaagtcaaggactcattgaagataataaaaatgaaacctgtagggttttagacataaatccacaggtagaggaaactgactctcgattatgtgtaagaacagtggagatgggaacttcaattcaggcaccatattccttaactactcaaaatgaaaaatattttgagaattcagctgaaacagacattccaaaaatcaccaaaaaactatctcaactaggagaatcagagctttttgcaagttctggatcattttcattacagagctctataccagtctgggaaacagaaactggccatggtataatggaagaaccagaacttactttaataagcaccactgataccagtattgctgaaatggattttgcaaatttaaccctagaagagaagagcgagaatgaagcaaaatgcttctttcaggtgagtgagtttctgcctcttgtatcagcaacagaagcctcagattatccagctgtatcagaactttccatagaaaaaccaaggacagcatctacagaaacccctcgcaggcttacacctgtaccagggagcttacaagaagcatttataaagaggaaaaaatcatttatggagagatcccaccagaggcagaaagaaataaggaataaaattcatgtctctgaaaattctcaaatcaaaacagttaaagagaaaccatctataagttcatctgtgagtcgtctaaagggcgtgaataaagtcagagcatcttttcctgaagacagaaagactacacaggctctaaggcaccaaaggggtctaaggttatacaatcaactagctgaagtgaaacaacaaaaggaagaaaaaacaaaacaagaagcttatgcccaaaacagagcaagggcaaaagaattccataagaaaacactagagaaacttcgagccaaaaatacatgctgactttctagaaatagtgtaaaggttttttaattgtgtatatgtagcattagacaaaattatttaaagtcaataaattgttattcgagg

SEQ ID NO: 968 - DNA, 2857 bp, Homo sapiens
  source 1..2857: mol_type = genomic DNA
ctcttggcgggtgccggccatggcggcttcgctcccgggacctgggagccggcttttccgcacatatggggctgcggacggcaggagacagcggcggccgggccgggaagccgcgcagtggttcccgccgcaggaccggaggcgtttcttcaacagcagcggcagcagcgacgccagcatcggcgacccctcgcagtccgacgatcctgacgatcccgacgaccccgacttccccggcagcccggtgaggcggcggcggaggcgtcccggcggccgagtgcccaaggaccggcccagcctgaccgtgaccccaaagcgctggaagctgcgagctcgcccaagcctaaccgtgaccccaagacgcctggggctgcgagctcggcccccgcagaagtgcagcacaccctgcggcccgctccgacttccgcccttccccagccgcgactccggccgcctcagcccggacctcagcgtgtgcggccagcccagggacggcgacgagctgggcatcagtgcctccctgttcagctctctggcctcgccctgccccgggtccccaacgccaagggacagtgtcatctcgatcggcacctccgcctgtctggttgcagcctcagccgtcccgagcggcctccacctcccagaagtctccctggaccgagcatctctcccctgctcccaggaggaagcgacaggaggagccaaggacaccaggatggtccaccaaacccgcgccagcctcaggtcagttctctttggccttatgaactcaggaacccctgaggattctgagtttcgggcagatgggaagaatatgagagagtcctgctgtaaaaggaaactggtggtgggaaatggaccagagggtccaggtctgtcaagcacaggcaagaggagggccacaggccaggactcttgtcaagagagagggcttcaagaggccgtccggagagagcatcaggaggccagtgttcccaagggccgcattgtgccaaggggaatagacaggctggagagaactagatcaagccggaagagcaaacatcaggaggcaacggaaacctctctcctccattcccaccgctttaaaaagggccaaaagctgggaaaagattcgttccccacccaggacctgactcctttacagaatgtctgcttttggaccaaaaccagggcttccttcagtttccacaagaagaaaattgtgactgatgtgtcagaggtctgcagcatctataccactgccacttctctctctggatccctcctatcagaatgttcaaaccggcctgtcatgaacagaacaagtggtgctccgtcctcttggcactcctcctctatgtatttgctaagccccttaaacactctaagtatttcaaacaaaaaggcatctgatgctgaaaaggtttatggggaatgcagtcagaagggtcctgtcccctttagccattgccttcccacagaaaaactgcaacgctgtgagaagattggggaaggggtgtttggcgaagtgtttcaaacaattgctgatcacacacccgtagccataaaaatcattgctattgaaggaccagatttagtcaatggatcccatcagaaaacctttgaggaaatcctgccagagatcatcatctccaaagagttgagcctcttatccggtgaagtgtgcaaccgcacagaaggctttatcgggctgaactcagtgcactgtgtccagggatcttaccctcccttgctcctcaaagcctgggatcactataattcaaccaaaggctctgcaaatgaccggcctgatttttttaaagacgaccagctcttcattgtgctggaatttgagtttggagggattgacttagagcaaatgcgaaccaagttgtcttccttggctactgcaaagagcattctacaccagctcacagcctccctcgcagtggcagaggcatcactgcgctttgagcaccgagacttacactgggggaacgtgctcttaaagaaaaccagcctcaaaaaactccactacaccctcaatgggaagagcagcactatccccagctgtgggttgcaagtgagcatcattgactacaccctgtcgcgcttggaacgggatgggattgtggttttctgtgacgtttccatggatgaggacctgtttaccggtgacggtgactaccagtttgacatctacaggctcatgaagaaggagaataacaaccgctggggtgaatatcacccttatagtaatgtgctctggttacattacctgacagacaagatgctgaaacaaatgaccttcaagactaaatgtaacactcctgccatgaagcaaattaagagaaaaatccaggagttccacaggacaatgctgaacttcagctctgccactgacttgctctgccagcacagtctgtttaagtaagctaaatgtatcttactgccccgaaatgagaggagactggtcttgaagcctctggtgctgtttcaacctccatccccacaggagggtggaactcccattctcacaggtttccagtcagcttttcaaacaagaattttgtttccaaatggaaactgaaatatttgttgaaatgtttaaatttgctgataacaaatgttctgaaagaagtaaactagccgggcacagtggcgtgcgcctgtagtcccagctactcgggaggctgaggcaggaggatcgcttgagcccaagagttcatatctagcctggtcaacatagcaagacccctgtctctatttttttaaataaataaactacatgtgaaaacaaacgtttatatttataaaccctcttttttttttttttaattttattgagacagagtcttgctctgtcacccaggct

SEQ ID NO: 969 - DNA, 1855 bp, Homo sapiens
  source 1..1855: mol_type = genomic DNA
aggcgcagtcccgcgttccctcggcggctgccggcgtagtgagcccgccgccgtggagtgtagcggaaagggctcgccgtcctcctccgtttctcgctgcttcgggacgcgctctctgcggctctgtgagcgcccctgagcgccggcagcggccgcggtgggttcttcaggttatcttatgatgaggcttttgctatggctaatgatcccttggaaggcttccatgaagtaaaccttgcttcacctacttctccggaccttcttggtgtgtatgaatcaggaactcaagagcagactacctcaccaagtgtcatctaccggccacacccttcagctttatcctctgtacctatccaggcaaatgcattagatgtttctgaacttcctacacaacccgtgtattcatcccccagacgtttaaattgtgcggaaatatctagtatcagctttcatgttacagacccagccccttgctctacctctggagtcacagctggattaactaaattaactacaagaaaggacaactataatgcagagagagagtttttacagggtgctactataacagaggcttgcgatggcagtgatgatatttttgggttgagtactgatagtctgtctcgtttacgaagcccatctgttttggaagttagagaaaagggctatgaacgattaaaagaagaactcgcaaaagctcagagggaactgaagttaaaagatgaagaatgtgagaggctttcaaaagtgcgagatcaacttggacaggaattggaagaactcacagctagtctatttgaggaagctcataaaatggtgagagaagcaaatatcaagcaggcaacagcagaaaaacagctaaaagaagcacaaggaaaaattgatgtacttcaagctgaagtagctgcattgaagacacttgtattgtccagttctccaacatcacctacgcaggagcctttgccaggtggaaagacaccttttaaaaaggggcatacaagaaataaaagcacaagcagtgctatgagtggcagtcatcaggacctcagtgtgatacagccaattgtaaaagactgcaaagaggctgacttatccttgtataatgaattccgattgtggaaggatgagcccacaatggacaggacgtgtcctttcttagacaaaatctaccaggaagatatctttccatgtttaacattctcaaaaagtgagttggcttcagctgttctggaggctgtggaaaacaatactctaagcattgaaccagtgggattacaacctatccggtttgtgaaagcttctgcagttgaatgcggaggaccaaaaaaatgtgctctcactggccagagtaagtcctgtaaacacagaattaaattaggggactcaagcaactattattatatttctcctttttgcagatacaggatcacttctgtatgtaacttttttacatacattcgatacattcagcagggactcgtgaaacagcaggatgttgatcagatgttttgggaggttatgcagttgagaaaagagatgtcattggcaaagctgggttatttcaaagaggaactctgatgctctgcgtgggaccatgcctgaactccccgaataactgaaaaatggctgaatatttttatggttacttgatatttatttccaaggagtgagcctaagacttttttccccttttgcaaattgctctaagaagtaccatgatttcttttaaactgatctatgctgtgtttgcttattctttagttgaacacactatgaagaattccaggtgtactagtgaatgtaatttatagttgccaaaaaaaaaaaaaacctgaaataaataaatgttagattg

SEQ ID NO: 970 - DNA, 1880 bp, Homo sapiens
  source 1..1880: mol_type = genomic DNA
agggaagtgaagccagtaggagactgagagattagaagaacagggcagtagaggatgaatttgcagtgaggttaaaggaacaatttattgggagaagggaatgtaggagggtagaagactttaaaattgaaaagaaataaaaggaggcagggatgtaaaacgagccataagtacaatgacaaatgggcattaaggaggaaaaagactatgtagaagaatctggtaaatatggatattaacagcaataagctcctttttaacgatttaattctaccaagtaaatatttgggattactcgctttttgccttttatttaccaaaaaattcatatattttcaaaggaacagctaccggacctgcatagccatttttctgatctgaacctggaagctcatatgtatgcatcccagtggtttctcactctttttactgccaagttcccactctgcatggtgttccacatcattgacttactgctttgtgagggtttgaacataatctttcatgtagctttggctctcctaaagacctcaaaggaagaccttctgcaggctgattttgaaggtgctttaaagttctttagagttcagcttccaaagagatacagggcagaggaaaatgcaagaagactgatggagcaggcttgcaatattaaagtaccaaccaagaagctgaagaaatatgagaaagaatatcagacaatgcgagagagtcagctgcaacaggaagacccaatggatagatacaagagggagaaccgaagattacaggaggccagcatgaggttggaacaagagaatgatgaccttgcccatgaactagtaacaagcaaaattgctctacggaatgacttggatcaggcagaagacaaggcagatgtgttgaataaagagctccttttgaccaaacagaggctggtggagactgaagaggagaagaggaagcaagaggaagagactgcccagctaaaagaagtcttcaggaaacagctagagaaggcagaatatgaaataaagaagactacagctatcattgctgagtataaacagatctgttcgcagttgagtaccaggctggagaaacagcaagcagccagcaaggaggagctggaagtggtaaagggtaagatgatggcatgcaaacactgcagtgacattttcagcaaggagggtgctttgaaactagcagccacaggcagagaggaccagggaattgaaacagatgatgagaaggactcacttaagaagcagctgagagagatggaactggaactggcacaaaccaaactgcagttggtggaggccaagtgtaaaattcaggaacttgaacatcagagaggagcccttatgaatgaaatccaagctgcgaaaaactcttggtttagcaaaaccctgaactctatcaaaacggccacgggcacccagccattgcagccagcaccggtcacccagccacccaaggagagcacatagttccagccttacccaagcacaagagcacaatgttcaaaccaatggaaatctgggaggattcttcctggtgtccctttgaaggaaagtcaaggaggccagaaaacaagccagaatttttcagtagctctcactctttcttgtatgacacttttcaaagggatgctatttaaactgacctgttctatgttgaatacctattttccagcttctggaaggccatgttcagatccatcatagtattacacattattttgtttgcctgatgtttagttggaaataagtaattcagaactaaatgcttttttatttagaattattcataattatttttatcttacataaaaatggagacatctgttattccaaggttgaagtgataagaagatctttgtcacaggaaaaaaaaaa

SEQ ID NO: 971 - DNA, 3825 bp, Homo sapiens
  source 1..3825: mol_type = genomic DNA
gagatgctgtttggcgactcgtcgccattcccggagcaggtcggcctcggcccaggggcgagtatccgttgctgtgtcggagacactagtccccgacaccgagacagccagccctctcccctgcctcgcggcgggagagcgtgtccggccggccggccggcggggctcgcgcaacctccctcgcctccccttcccccgcagcctccgccccgccaggcccggcccggactcccgagccccggcctcctcgtcctcggtcgccgctgccgccgggcttaacagccccgtccgccgcttctcttcctagtttgagaagccaaggaaggaaacagggaaaaatgtcgccatgaaggccgagaaccgctgccgccgccgacccccgccggccctgaacgccatgagcctgggtccccgccgcgcccgctccgctccgactgccgtcgccgccgaggcccccgttgatgccgctgagctcccccaacgccgccgccaccgcctccgacatggacaagaacagcggctccaacagctcctccgcctcttcgggcagcagcaaagggcaacagccgccccgctccgcctcggcggggccagccggcgagtctaaacccaagagcgatggaaagaactccagtggatccaagcgttataatcgcaaacgtgaactttcctaccccaaaaatgaaagttttaacaaccagtcccgtcgctccagttcacagaaaagcaagacttttaacaagatgcctcctcaaaggggcggcggcagcagcaaactctttagctcttcttttaatggtggaagacgagatgaggtagcagaggctcaacgggcagagtttagccctgcccagttctctggtcctaagaagatcaacctgaaccacttgttgaatttcacttttgaaccccgtggccagacgggtcactttgaaggcagtggacatggtagctggggaaagaggaacaagtggggacataagccttttaacaaggaactctttttacaggccaactgccaatttgtggtgtctgaagaccaagactacacagctcattttgctgatcctgatacattagttaactgggactttgtggaacaagtgcgcatttgtagccatgaagtgccatcttgcccaatatgcctctatccacctactgcagccaagataacccgttgtggacacatcttctgctgggcatgcatcctgcactatctttcactgagtgagaagacgtggagtaaatgtcccatctgttacagttctgtgcataagaaggatctcaagagtgttgttgccacagagtcacatcagtatgttgttggtgataccattacgatgcagctgatgaagagggagaaaggggtgttggtggctttgcccaaatccaaatggatgaatgtagaccatcccattcatctaggagatgaacagcacagccagtactccaagttgctgctggcctctaaggagcaggtgctgcaccgggtagttctggaggagaaagtagcactagagcagcagctggcagaggagaagcacactcccgagtcctgctttattgaggcagctatccaggagctcaagactcgggaagaggctctgtcgggattggccggaagcagaagggaggtcactggtgttgtggctgctctggaacaactggtgctgatggctcccttggcgaaggagtctgtttttcaacccaggaagggtgtgctggagtatctgtctgccttcgatgaagaaaccacggaagtttgttctctggacactccttctagacctcttgctctccctctggtagaagaggaggaagcagtgtctgaaccagagcctgaggggttgccagaggcctgtgatgacttggagttagcagatgacaatcttaaagaggggaccatttgcactgagtccagccagcaggaacccatcaccaagtcaggcttcacacgcctcagcagctctccttgttactacttttaccaagcggaagatggacagcatatgttcctgcaccctgtgaatgtgcgctgcctcgtgcgggagtacggcagcctggagaggagccccgagaagatctcagcaactgtggtggagattgctggctactccatgtctgaggatgttcgacagcgtcacagatatctctctcacttgccactcacctgtgagttcagcatctgtgaactggctttgcaacctcctgtggtctctaaggaaaccctagagatgttctcagatgacattgagaagaggaaacgtcagcgccaaaagaaggctcgggaggaacgccgccgagagcgcaggattgagatagaggagaacaagaaacagggcaagtacccagaagtccacattcccctcgagaatctacagcagtttcctgccttcaattcttatacctgctcctctgattctgctttgggtcccaccagcaccgagggccatggggccctctccatttctcctctcagcagaagtccaggttcccatgcagactttctgctgacccctctgtcacccactgccagtcagggcagtccctcattctgcgttgggagtctggaagaagactctcccttcccttcctttgcccagatgctgagggttggaaaagcaaaagcagatgtgtggcccaaaactgctccaaagaaagatgagaacagcttagttcctcctgcccctgtggacagcgacggggagagtgataattcagaccgtgttcctgtgcccagttttcaaaattccttcagccaagctattgaagcagccttcatgaaactggacacaccagctacttcagatcccctctctgaagagaaaggaggaaagaaaagaaaaaaacagaaacagaagctcctgttcagcacctcagtcgtccacaccaagtgacactactggcccaggctaccttctccatctggtttttgtttttgtttttttttcccccatgcttttgtttggctgctgtaatttttaagtatttgagtttgaacagattagctctggggggagggggtttccacaatgtgagggggaaccaagaaaattttaaatacagtgtattttccagcttcctgtctttacaccaaaataaagtattgacacaagagatctcttcctgccaaggtttttagttcattgccagtttagtctttttgacccatgtgtaattaatttttctcaacccaaagtaagattgagtcccctttgagatgcattagagcagtccaacccagaatggcacacactgctctgctgtagcatcatgtcagggcttcctggactcagtacacctctcagtttgtcttttaaaaaacagctgaatctttactacctatttagttctccttgttaaagaaacaggggtgggaataaaatggatttaggacacccagtttgaattgcagtttttttttttctgacacatggccaggctgtggtgccagcttaatggagtaggctgtccttggcacttgcatgtgtgaaaggagggttttgcctcttcttgagcatggcttgagttggtaaggaaagctgtaactcacgaagccctgagacctgctacccctaagatcgagcttgttttcagtgactggcttgagtcataggaggaggagtctggtacagctgcaggagagcagggccatctgaagcggtagcattgccaccatctccctctcatctagagcagttttcttatgccttggtttgagctgaatttgatgtgaattcttttgctgcttaataaagtgacctctaggtgcattagaatgcgaaggcaaatagttgcaataaatcacctgcacaagcattgtga

SEQ ID NO: 972 - DNA, 7697 bp, Homo sapiens
  source 1..7697: mol_type = genomic DNA
agtgccctgggacacctcttcagtccgtggactttcccgctgcacactgccctccgaagtcggggacgcgggctcgtgagatggaagattttcgaggtatagcagaagaatcatttccaagctttctcaccaattcattatttggtaacagtgggattttggaaaatgtcactctttcttcaaatcttggcttgcctgttgctgtttctacacttgctagggatagatccagcactgataacaggtatcctgatatccaggcatcttacttagtagaagggagattttcagttccatccgggtcatctcccggaagccagagtgatgctgaaccaagagagaggttacagcttagcttccaggatgatgattctatctctaggaaaaagagctatgtggaaagtcaacgtttgtcaaatgctctcagcaaacagtcagctttacaaatggagacagcaggaccagaagaggagccagccggagctacagaatccttgcagggccaagatctcttcaacagggcttcaccactggaacaagcacaagactcacctattgattttcatttacagtcatggatgaataataaggaacccaagattgttgtgcttgatgctggaaaacattttgaagacaagactctaaagagtgacctaagccacactagcttattagaaaatgagaaacttatcttaccgacaagcttggaagattcttctgatgatgatattgatgatgaaatgttttatgatgatcatttggaggcttattttgaacaactggcaattccaggaatgatatatgaagacctagaaggaccagaacctccagaaaaaggttttaagttacctacaaatggtcttagacaggcaaatgaaaacggtagcttaaactgcaagtttcaatcagaaaataacagctctctgatttccctcgactcacactcttctgaaacaactcacaaagagtctgaggaaagccaagttatttgtctacctgggactagtaattctataggtactggagatagtagaaggtacacagatggtatgttaccattttcctctggtacttggggaactgagaaagaaatagaaaatttgaagggtattgttccagatcttaacagtgaatgtgcaagtaaagatgttctggtgaagaccctcagggctattgatgtgaaacttaactctgataattttcatgatgcaaatgccaatagaggtggttttgatctgactgaccctgtaaaacagggggcagagtgtcctcaccaaaataagacagttttgcacatggatggatgtttagacactgagactcctacggtgtccattcaagaaaatgtggatgtagcctctttgaagcccattagtgacagtggaattaatttcactgatgccatttggtcaccaacttgtgaaaggcgaacatgtgaatgtcacgagtccatcgaaaagaataaagacaaaacagatctcccacagagtgtggtctatcaaaatgaagagggtaggtgggtcacagaccttgcctattacacatcttttaatagcaaacaaaatttaaatgtgtctctaagtgatgagatgaatgaagacttcagatctggttccatcatttggctattttattagatcaccagagaagagagaacctattgccttaataagaaaatctgatgtatcaagaggtaatttggaaaaagaaatggctcatcttaaccatgatctatattcaggagatttaaatgaacagtcccaggcacagctaagtgaaggatcaattacacttcaggttgaagcagtagagagtacttcacaagtggatgaaaatgatgtgacgttaacggctgataaaggcaaaacagaggacactttcttcatgagcaacaaaccccaaagatacaaagacaagctaccagatagtggtgattctatgcttaggatcagcaccattgcttcagccattgcagaggcatcagttaatactgatccttcccaacttgctgcaatgatcaaggcactttcaaataaaaccagagacaagacttttcaggaagatgagaaacaaaaggactattctcatgtgcgtcatttcttacctaatgatttagaaaaaagtaatggatccaatgcacttgatatggagaaataccttaaaaaaacagaagttagtagatatgaaagtgcattggaaaacttttcaagggctagtatgtctgatacttgggatttatctttgcccaaagaacaaactactcaagacattcatccggtggacttaagtgctactagtgtaagtgtgagggcaccagaagaaaacacagcagctattgtttatgttgaaaatggagagagtgagaatcaagagtcatttagaaccataaactcctcaaattcagttacaaatagagagaataacagtgcagtagttgatgtgaagacatgttccattgacaacaaattacaagatgttggtaacgatgaaaaagctacctcaatttccactccatctgatagttattcatcagtgaggaaccccagaataacatccctttgtctgttaaaagactgtgaagaaatacgagataacagagaaaatcagaggcaaaatgagtgtgtcagtgaaataagcaacagtgagaagcatgtgacttttgaaaaccatcgcatagtctcacctaaaaatagtgatttgaaaaatacctctcctgagcatggtggacgtggctcagaggatgagcaggagagcttcagaccttccacgtcaccactgagtcattcttctcctagtgaaatttctggaacgagttcatcagggtgtgcgttagagtcctttggttcagcagctcagcagcagcagcctccctgtgagcaggagttgtctcccttggtgtgctcgcctgctggggtgagcaggctgacgtatgtgtctgaaccagagagctcctatcctaccacagccacagatgatgccctggaggaccgcaagagtgatatcaccagcgagttgagtaccacaattattcaaggcagtccagccgcattggaggaacgggctatggaaaaattgagagaaaaagttccatttcagaatagaggaaaaggaacattatcatctattatccagaataactctgatacaagaaaagcaactgaaactacttctctgagtagcaagcctgaatatgtaaaacctgactttagatggagtaaagatccttcctccaaaagtggaaatctgttggaaaccagtgaggtaggttggacatcaaaccctgaggaattggacccgatcaggctggctctcctgggcaagtcaggtctgagctgtcaggtggggtcagccacatcacaccctgtgtcctgccaggagcctatagatgaagatcaaagaataagtcctaaagataagtcaactgctggccgtgagttcagtggccaggtttctcatcagaccacctctgaaaaccagtgtactcctattcccagcagcacagttcacagctctgtggctgacatgcagaacatgcctgctgctgtgcacgcactcttgacacaaccctctctcagcgctgctccttttgctcagcggtatttgggaacactcccttcaactggaagcaccaccttgcctcagtgccatgctggcaatgccacagtctgtggcttctcaggaggccttccctatccagctgttgcaggagagcctgtgcagaactctgtggctgtgggaatttgtctaggatcaaatatcggctctggatggatgggtacctcttccctctgtaacccatattctaataccttaaatcagaacctgctaagcacaacaaaaccttttcctgtgccgtctgttggtacaaactgtggaattgaaccatgggattcaggagtgacatcaggattggggagtgtccgagtgcccgaggagttgaagcttcctcatgcttgctgtgtcgggatcgcttcccagaccctcctcagtgtgcttaatccaactgaccgctggctgcaagtcagcattggggtcctcagcattagtgttaatggtgaaaaggtggatctttcaacatatcgttgtttagttttcaagaataaagccatcataagacctcatgccacagaagagataaaagtgctttttataccatccagtcctggggttttcagatgcacattcagtgttgcttcttggccatgttcgacagatgctgagaccatcgtacaggcagaagctttggccagcaccgtcactctcactgccattgccgagagtcctgttattgaggtagaaacagaaaagaaagacgttcttgattttggtgacttgacttatggaggctggaaagccctcccactaaaattgataaaccgaacgcatgccactgtgccaattagactgattattaatgctaacgctgtagcctggcgctgtttcacgttttccaaggaatccgtccgagctcctgtggaagttgctccttgcgctgatgtggtcactcggctagcaggcccttctgtggtcaaccacatgatgcctgctagttatgatggacaggatccagaatttctgatgatttgggttcttttccatagtccaaagaaacagatcagctcttcagatattctggactcagcagaagaattctcggcaaaagttgatatcgaagttgacagcccaaaccctacgcccgttcttagaagtgtgagtctccgagcaagagcaggaatagctaggatccatgctcccagggacttgcagacgatgcatttcttggccaaagtggcttcctcaagaaagcagcacttacctttgaaaaatgctgggaacattgaagtttatttggatatcaaggtcccagaacaaggaagtcacttttcagtggatccaaagaatctactccttaaacctggagaagaacatgaggttattgtttcatttactccaaaggatcctgaagcctgcgaggaaaggatcttgaaaatatttgtgcagccatttggacctcagtatgaggtagtgttaaaaggcgaagtcatttcttcaggaagtaaacctctgtcacctggaccttgcttagatattccatcgattttgtccaacaaacaatttctggcttggggaggagtccctctaggtagaacacagcttcagaaactagctttaagaaataattctgcatctacaactcaacatttacgactgcttattagaggacaagatcaggactgctttcagcttcagaacacttttggttcagaacagcgattgaccagtaactgtgagatcagaattcacccaaaggaagacattttcatctctgtattatttgcacctactcgattatcttgcatgttggctagactagaaatcaaacaacttggaaatcgatcacaaccaggcattaagttcacaatacctttgtctggatatggaggaacaagcaatcttattttggaaggcgttaaaaaattatctgacagttacatggtaacagtgaatggcttagtacctggcaaagaaagtaaaattgttttttctgtccgcaacactggctcccgagcagcttttgttaaagcagtaggttttaaggattctcagaaaaaagttttgctggatcctaaagtattgaggatttttccagataaatttgtactcaaggaaagaacacaagaaaatgttactttaatatataatccatcagacagaggaatcaataataaaactgcaacagaactatcaactgtatacttatttggtggagatgaaatttcaagacagcagtatcgcagggccctgttacataaaccagagatgataaaacagatacttccagaacatagtgtgcttcaaaacattaattttgttgaagcatttcaagatgagctattagtaactgaagtatatgatcttccccaacgacctaatgatgttcagctcttttatggaagcatgtgtaaaattatactttcagtaattggagaattcagagattgcatttctagcagagaattccttcagccttcttccaaagctagcttggaatctacaagcgacttgggagcttctgggaaacatggtggcaacgtctctttggatgttttaccagtcaaaggtcctcagggttctcctcttctctcacgggcggctcgcccgcctctggatcagctggcctccgaagagccgtggactgtcctacccgagcacttgattctggtagctccttctccttgtgacatggcaaaaactggacgtttccagattgtgaataactctgtgaggttactgagatttgagctgtgctggccagcgcattgcctcacagtcacgccgcagcatggatgtgtcgcgccagagagtaaactacaaattcttgtgagtcctaattcctccttatccacaaaacagtcaatgttcccgtggagtggtttgatctatatacactgtgacgatggacagaagaaaattgtgaaagttcaaattcgagaagatttaactcaagtggaacttttaactcgtttgacctccaaaccatttggaattctttccccagtatctgagccttcagttagtcatttggtcaaaccaatgacaaaaccgccttccacaaaagttgaaataagaaacaagagtattacttttcctacaacagaacctggtgaaacttcagagagctgtctagaactcgagaatcatggcaccacagacgtgaaatggcatctgtcatctttagcgccaccttatgtcaagggagttgatgaaagtggagatgtttttagagctacctatgcagcattcagatgttctcctatttctggtctgctggaaagccatgggatccaaaaagtctccatcacatttttgcccagaggtaggggggattatgcccagttttgggatgttgaatgtcaccctcttaaggagcctcacatgaaacacacgttgagattccaactctctggacaaagcatcgaagcagaaaatgagcctgaaaacgcatgcctttccacggattccctcattaaaatagatcatttagttaagccccgaagacaagctgtgtcagaggcttctgctcgcatacctgagcagcttgatgtgactgctcgtggagtttatgccccagaggatgtgtacaggttccggccgactagtgtgggggaatcacggacacttaaagtcaatctgcgaaataattcttttattacacactcactgaagtttttgagtcccagagagccattctatgtcaaacattccaagtactctttgagagcccagcattacatcaacatgcccgtgcagttcaaaccgaagtccgcaggcaaatttgaagctttgcttgtcattcaaacagatgaaggcaagagtattgctattcgactaattggtgaagctcttggaaaaaattaactagaatacatttttgtgtaaagtaaattacataagttgtattttgttaactttatctttctacactacaattatgcttttgtatatatattttgtatgatggatatctataattgtagattttgtttttacaagctaatactgaagactcgactgaaatattatgtatctagcccatagtattgtacttaacttttacaggtgagaagagagttctgtgtttgcattgattatgatattctgaataaatatggaatatattttaatgtggtatatcc

SEQ ID NO: 973 - DNA, 4842 bp, Homo sapiens
  source 1..4842: mol_type = genomic DNA
gcggcctccatgcgggcgtcaacgtccgatccaagcgccaaattcaaatttgcggccatcttgagcgggcggaattcagtcgcgcgcggtgcagtcgggaggtggaggcaccggctgcattgttttcgggatcgaggggtgagggcgctatggcacccggctgcaaaactgagttacgcagcgtgacaaatggtcagtctaaccaaccaagtaatgaaggtgatgccatcaaagtttttgtgcgaattcgtcctcctgcagaaagatctgggtcagctgatggagagcagaacttatgcttatctgtgctgtcctccacgagtctccggctgcactccaaccctgagcccaagaccttcacgtttgatcatgttgcagatgtggataccactcaggaatctgtattcgcaactgtggctaaaagcattgtggagtcttgcatgagcggttataatggtaccatctttgcatatggacagactggctcagggaagacatttactatgatgggaccatctgaatctgataatttttctcataacctgagaggagtaatcccacgaagttttgaatatttgttttccttaattgatcgtgaaaaagaaaaggctggagctggaaagagtttcctttgtaagtgttcctttattgaaatctacaacgagcagatatatgatctactggactctgcatcggctggactgtacttaagggagcatatcaagaagggagtctttgttgttggtgcggtggagcaggtggtaacctcagctgctgaagcctatcaggtgttgtctggaggatggaggaatagacgtgtggcatcaacatcaatgaacagagaatcgtctaggtctcatgccgtctttacaattacaatagagtcaatggagaaaagtaatgagattgtgaatatacggacctccctactcaacctggtggatttagcaggatctgaaaggcaaaaagatacccatgcagaagggatgagattgaaggaagcaggtaacataaatcgatcattgagctgcctgggccaagtgattacagcacttgtcgacgtgggtaatggaaaacagagacatgtttgctacagagactccaaacttaccttcttactacgggattcccttggaggtaatgccaaaacagccataattgcaaatgttcatcctggatccaggtgttttggggaaaccctatcaacacttaactttgctcaaagagccaagctgattaaaaacaaggcagtagtaaatgaagacacccaaggaaatgtgagccagctccaagctgaagtgaagaggctcaaagaacaactggcggagcttgcttcaggacagacaccaccagaaagcttcctgaccagagacaaaaagaagactaactatatggagtatttccaggaagcaatgttattctttaagaaatctgaacaggaaaagaagtctctgatagaaaaagttacccaattagaagacctcaccctcaaaaaggaaaaatttattcaatctaataaaatgattgtgaaattccgagaggatcaaataatacgcttggaaaagctccacaaggaatcccggggaggttttctgcctgaggagcaggatcgtttgctctcagaattaaggaatgagattcaaactctgcgagaacaaatagagcaccaccccagagttgcaaagtatgctatggaaaatcattccctcagggaggagaatagaagactgagattattagagcctgtgaaaagagctcaagaaatggatgcccagaccattgcaaaactagaaaaagctttctctgaaataagtggcatggagaaaagtgacaaaaatcagcaaggattttcacctaaagctcagaaagagccatgtttgtttgcaaacactgagaagttaaaagcacaactcctgcaaattcagacagagctgaataattcaaagcaagaatatgaagaattcaaagaacttactaggaaaaggcagctagaattggaatcagagcttcagtctttgcaaaaagcgaaccttaatcttgaaaaccttttggaagcaacaaaagcctgcaagcggcaagaagtttctcagctgaataaaattcatgctgaaacacttaagattataactacaccaaccaaggcctaccaacttcattcccgaccagtaccaaaattaagccctgaaatgggaagctttggctctctatacactcagaattctagcatattagataatgatatattaaatgagccagttcctcctgagatgaatgaacaagcttttgaggccatttctgaagagcttagaacagtgcaggaacaaatgagtgctcttcaagccaaactggatgaagaagagcataaaaacctaaagcttcagcagcatgttgacaaactggaacatcattctacccaaatgcaggagcttttctcatcagaaagaattgattggaccaaacagcaggaagagcttctctcacagttgaatgtccttgaaaagcagcttcaagagactcaaactaaaaatgactttttgaaaagtgaggtacatgacctgcgagtagtccttcattctgctgacaaggagctttcttcagtgaaattggaatatagttcattcaaaacgaatcaggagaaagaattcaacaaactttccgaaagacacatgcatgtacagcttcaattagataatctcaggttagaaaacgaaaagctgcttgagagcaaagcctgcctacaggattcctatgacaacttacaagaaataatgaaatttgagattgaccaactttcaagaaacctccaaaacttcaaaaaagaaaatgaaactctgaaatctgatctgaataatttgatggagcttcttgaggcagaaaaagaacgcaataacaaattatcattacagtttgaagaagataaagaaaacagttctaaagaaatcttaaaagttcttgaggctgtacgtcaggagaaacagaaagagacggccaagtgtgagcagcagatggcaaaagtacagaaactagaagagagcttgcttgctactgaaaaagtgatcagttccctggaaaagtctagagattctgataagaaagttgtagctgacctcatgaaccagatccaggagctaagaacatcggtctgtgagaaaacagaaactatagacaccctgaaacaagaactgaaggacataaattgcaaatacaactctgctttggttgacagagaagagagcagagtgttgatcaagaagcaggaagtggatattctggatctgaaagaaacccttaggctgagaatactttctgaggacatagagagggatatgctctgtgaggacctggctcatgccactgagcagctgaacatgctcacagaggcctcaaaaaaacactcggggctgctgcagtctgcccaggaagaactgaccaagaaggaagccctgattcaggaacttcagcacaagctaaaccaaaagaaagaggaagtagaacagaagaagaatgaatataacttcaaaatgaggcaactagaacatgtgatggattctgctgctgaggatccccagagtcctaagacaccacctcactttcaaacacatttggcaaaactcctggaaacacaagaacaagagatagaagatggaagagcctctaagacttctttggaacaccttgtaacaaagctaaatgaagacagagaagtcaaaaatgctgaaatcctcagaatgaaggagcagttgcgtgaaatggaaaacctacgcctggaaagtcagcagttaatagagaaaaactggctcctgcaaggtcagctggatgatattaaaagacaaaaggaaaacagtgatcagaatcatccagataatcaacagctgaagaatgaacaagaagaaagtatcaaagaaagacttgcaaaaagtaaaatagttgaagaaatgctgaaaatgaaagcagacctagaagaagtccaaagtgccctttacaacaaagagatggaatgccttagaatgactgatgaagtcgaacgaacccaaactttggagtctaaagcattccaggaaaaagaacaactgagatcaaagctggaagaaatgtatgaagaaagagagagaacatcccaggagatggaaatgttaaggaagcaggtggagtgtcttgctgaggaaaatggaaagttggtaggtcaccaaaatttgcatcagaagattcagtacgtagtgcgactaaagaaggaaaatgtcaggcttgctgaggagacagaaaagttgcgtgccgaaaatgtatttttaaaagaaaagaaaagaagtgaatcttgaggattccggtcagctacctaggcatcaccttgtttgaagatgtttcttctcttttacaagtaagacctactcctggccacttaggagagctgaatttatggaccttaattattaaatgtttataaggtggtggtaaccacctcaagtttctgatgaacattctgcatccatatacaccctgtgacagtcagcagtctgctattaagtggcctacttcaaggctttgaatcaacttaagggaaaaccttttgtctttgtaaaaataaaagcctgtagctaaggtttacagtggacattagccagatcattttcttcttagattatgccataatctcctttgattcttatggaagttctaacaatatatggtggttccaacacctgcagtgagtttaatgactgacttagtagcaggtacaagaagcaaacttgttaatatagattatttttgtattcttactttaggtattttcttgagcattttccatgactgtaaataaagccattttttaagataataattaaa

SEQ ID NO: 974 - DNA, 8723 bp, Homo sapiens
  source 1..8723: mol_type = genomic DNA
gtttgggaggcgcgggagatgtccaccctgggctggtggcgccgccgggcgccgggcgccatgagggtgcgctaggcggctgttcgtgcccgaggctgcgcagcactgaggtgagctttgccttcttgatcttccgtccttcttggagacgactggcgagaggaagagggactaggtccaaacgctaggtggctgggtccagatacctgtgttttgactctgttcctgtggatagctgcttggtctgaagttccagaaaggatcctgttcccagacaggtccctgagtactgacggtcacaggctgccgcgtctttcctgttgactcatgtttggttcctccagtgaaaattttacttagagaaatgctgcctccaaagcacttgtctgccaccaaacctaagaagtcctgggccccaaatctgtatgagctagacagtgacttgactaaggagccggatgtcatcataggagaaggtccaactgactctgagttttttcatcagaggtttcggaacctaatctatgtggaatttgttgggcctcggaagaccctgatcaaactccgaaacctctgcctcgattggttgcagccggagacccgcaccaaggaggagatcatcgagctcttggtccttgagcagtacctgaccatcatccctgaaaagctcaagccttgggtgcgagcaaaaaagccggagaactgtgagaagctcgtcactctgctggagaattacaaggagatgtaccaaccagaagacgacaacaacagtgacgtgaccagcgacgacgacatgacccggaacagaagagagtcctcaccacctcactcagtccattctttcagtgaccgggactgggaccggaggggcagaagcagagacatggagccacgagaccgctggtcccacaccaggaacccaagaagcaggatgcctccgcgggatctttcccttcctgtggtggcgaaaacaagctttgaaatggacagagaggacgacagggactccagggcttatgagtcccgatctcaggatgctgaatcataccaaaatgtggtggacctcgctgaggacaggaaacctcacaacacaatccaggacaacatggaaaactacaggaagctgctctccctcgtgcagcttgctgaagacgatggccactcccacatgacgcagggccactcatcaagatccaagagaagtgcctacccaagcaccagtcgaggtctaaaaactatgcctgaagccaaaaaatcaacccaccggcgggggatttgtgaagatgaatcttcccacggagtgataatggaaaaattcatcaaggatgtgtcacgcagttccaaatcgggaagagcaagggagtcaagcgaccggtcacagagattccccagaatgtcagatgataactggaaggacatttcattgaacaagagggagtcagtgatccagcagcgggtttatgaagggaatgcatttaggggaggctttaggtttaattcaacccttgtttccagaaagagagttcttgaaagaaagaggcgctatcattttgacacagatgggaagggctcgattcacgatcaaaaaggctgtcccaggaagaagccctttgaatgtggtagtgagatgagaaaagccatgagcgtgagcagcctgagcagcctcagctccccctcctttaccgagtcacagccaattgattttggggcaatgccatatgtatgtgatgagtgtgggaggtcgttcagtgtcatctcagaatttgttgagcaccagatcatgcatactagagagaacctctatgagtatggtgagtcctttatccacagtgtggctgtcagtgaagttcagaaaagtcaggttggagggaaacgttttgaatgtaaggactgtggagagaccttcaataagagtgccgccttggctgaacatcggaagattcatgctagaggttatcttgtggaatgtaagaatcaggaatgtgaggaagccttcatgcctagccccacctttagtgagcttcagaaaatatatggcaaagacaaattctacgagtgcagggtgtgtaaggaaaccttccttcatagttctgccctgattgagcaccagaaaatccactttggggatgacaaagataatgagcgtgaacatgaacgtgaacgtgaacgtgagcgcggggaaacctttaggcccagcccagcccttaatgagtttcagaaaatgtatggtaaagagaaaatgtacgaatgtaaggtgtgtggggagactttccttcatagctcatccctgaaagaacatcagaaaatccatactagagggaacccatttgaaaacaagggtaaagtgtgtgaggaaacctttattcctggtcagtcccttaaaaggcgtcagaaaacttacaataaggagaagctctgtgactttacagatggccgggatgccttcatgcaaagctcagagctcagtgagcatcagaaaattcattctcgaaagaacctctttgaaggcagagggtatgagaaatctgtcattcatagtgggccattcactgaatctcagaagagtcatactataacaagacctcttgaaagtgatgaggacgaaaaggcgttcaccattagctctaacccctatgaaaaccagaagattcccactaaggaaaatgtctatgaggcaaaatcatatgagaggtctgttattcatagcttagcctctgtggaagctcagaaaagtcacagtgtagcagggcccagtaaaccaaaagtaatggcagagtctaccattcagagcttcgatgctatcaaccatcagagagttcgtgctggagggaacacctctgaaggaagggaatacagtaggtctgttatccatagcttagtggcttccaaacctccaagaagtcacaatggaaatgaattggtggaatctaatgagaagggagaatcctccatttatatctcagaccttaatgataagcgacagaagattcctgccagagagaacccttgtgaagggggcagtaagaatcgcaactatgaagactctgtcatacagagtgtattccgtgccaaacctcagaaaagtgttcctggagagggatctggtgagtttaagaaggatggcgaattctctgttcccagctcaaatgtccgtgaataccagaaggctcgtgctaaaaagaaatacattgagcataggagcaatgagacctctgtaattcactctctgccttttggtgaacaaacatttcgccctcgagggatgctctatgaatgtcaggagtgtggggagtgctttgctcatagctctgacctcactgagcaccagaagattcatgatagggagaagccctctggaagcagaaactatgaatggtctgtcattcgcagcttggcccctactgaccctcaaacaagttacgcccaagagcagtatgctaaagagcaagcgcggaacaaatgtaaggacttcagacaattttttgctaccagcgaagacctcaacacaaaccagaaaatctatgaccaagagaagtctcatggcgaggagtctcaaggcgagaatactgatggggaggagacccacagcgaggagacccatggtcaggagacaattgaagaccctgtcattcaaggctcagacatggaagaccctcagaaggatgaccctgatgacaaaatctatgaatgtgaggactgtggcctgggctttgtggatctcacagacctcacagaccatcagaaagtccacagcaggaagtgcctggttgacagtcgggagtacacacattctgtaattcacacccattccatcagcgagtatcagagagattacactggagagcagctgtatgaatgtccaaagtgtggggaatcttttattcatagctcattccttttcgagcatcagagaatccatgaacaagaccagttgtattccatgaaggggtgtgatgatggttttattgccctcttgcccatgaagccacggaggaatcgtgctgcagagaggaatcctgctcttgctgggtcggccattcgatgccttttgtgtggacaaggcttcattcatagctctgcccttaatgagcatatgagacttcatagggaagatgatttactggagcagagccagatggctgaggaagctatcattccaggcttagccctcactgagtttcagagaagtcagaccgaagagagactctttgaatgtgcagtctgtggagaatctttcgtcaacccagcagaacttgcagatcacgtaactgttcataagaatgagccctatgagtacgggtcctcctatactcacacctcatttcttactgagcccctcaaaggagctataccattctatgaatgcaaggattgtggtaagtcctttattcatagcacagtcctcactaaacataaggagcttcatctggaagaagaagaagaagatgaagcagcagcagctgcagcagcagcagcccaggaagttgaagccaatgtccatgttccacaagtagttctgaggattcagggcttaaacgtagaggctgctgagccagaagtggaggctgccgagccagaagtggaggctgctgagccagaagtggaggctgctgagccaaacggagaggctgaagggccagatggagaggctgcagagcccattggagaggctggacagccaaatggagaggccgagcagccaaatggggatgctgatgagccagatggtgcaggtattgaagacccagaagaaagagctgaagagccagagggaaaagctgaagagccagagggagatgccgacgagcctgacggtgtgggaattgaagacccagaagaaggtgaagatcaagagattcaggtagaagaaccatactatgactgccatgaatgcacagaaaccttcacttccagcacagcattcagtgaacacctgaaaactcatgccagcatgatcatatttgagcctgcaaatgcctttggggagtgctcaggctacatcgaacgtgccagcaccagcacaggtggtgccaatcaagctgatgagaagtacttcaaatgtgacgtctgtgggcagctcttcaatgaccgcctgtccctcgccagacaccagaatacccacactggctgagggcatggggtaaaggttagaaaaccttcacctaggacttgacccttaccaaaccacagagaatccaaaccaatccatgataatgtcagtaggagacttaaccttagtgtgttacacacctgacttaacatctctaaactcagattgaaaagagaccgaatgtgcagattccacagtcttaagctttccccttcagatgtcagtgtctgcatgtgggaaagccatagcacacatcttacctttccaagtaatcagattgagaaaaccctatgagtattccagactacagagtttgcccaaatcaactgtaaatgacacttgtgtaacgtatatatagtgtttcatgaggtgtatataaaatagcaaattatgacagaacagtgatcacatatatttggatttatatgatatacagttacagtttactctgcagaggtaccttacctggtattctttgaattttttttttttttggaggaggaagagagcaacaaatttgattatatttttaagtgtcttagatcctgagaaagatttattgtgcattatttgaaccctgtcaatatctttttgagtaattgttttgtttcttacccttaaatagtcttgtgaagctgtaggcatgatagataacatggcttttactccttactgtttgaaaagataagtactttagcttctttctgcagccatttcatctgcgccaacactttggaacctaatactgtgtaaggctttacaatatacggattggctttttgtgacccagattgattggttgccacatgttatgtttgttgaagtggttctcatgcaaaaatattacacatttgtgttctgggttttttttttttttaaccaactcaatatgtgtttgatgatagtgaattgataaaacccgaagcttttccctgtaaatcttacatctttgcctttaaagaatgggttacaaccatcactagatcacagtagtgcctaatgaaggttgagaaccgtaggagaggctctcatgctgtaaataatgttgcaggctaataacctttcatcacttcctttgtgcgcttcctgccttaagtgacaagtagcaacatggcttgggtcccctgtgcagcatcagcttatgctgccacaagtcagtttgcaccctaggtgcccaggagctagtatccttagatctttctatcgctaacttaattctcttcgttatttatctgaccctctaactccatgtctaacttgcattaaaaaaaaaaaaattctttacagtcaacccaagcttaacatggactcaggttccccagcagccttaatttgttttgttaacatctgttccttctttttcagctctcctagagtatttctgagtgttgtgttcatctaatcttagtattcttttaattacaaattgacctcacagcttgaggtttcttgtgtcctattctgtggactacctgtgctcctttgcttcccctcccctcgcataataactatattaagaaattttttttggccttgagttggctggaaaaaaaatataaaatttaaaaaatttaaaaaaaaagatttgcaaaatgtaagtgtagatcatttgaacaagcaaaattaaagtacccactgggggaaatgtgtctgaatcttactcttctggatctgcaggattagggcttggaagtatgtcaaagatgcagggagtgtcaaagtttaggaagattgtagagctgagagcaagaagcagaaatgagtgagtcaaagaagggagtcctaatatatcaccagatctaggaggggagaggagacagacagaagaaaacaccagaggcaagaactgtagaaggccaggtttctgagaatgaattgagcggggtgtcctgagcagtttggaaaaggagtttttgatggtatggtgtaggtgagggctggctgcataggaaggactgaggttggaacggacatcgggaaagctgaggggcagtgaggtttactacatgggaaaaggactcttgaaacgagaatcagtgttgatgtcggggtgaactttgtgggtacattacttggtgttaacattgttggcagtggtagccccttttcagaaagcaacttgctgtaagtcagggtgtccgttccaaccttcagctagtgaaaaggtagtaacaaatggtaaacaagagaatgattgtttaaacctatctgtggacacttaatgcaactgtttaaaaatgataatcacgagttatgtagcaacgtggaaatatatttacagaacattaagtggagaaagcaggacacgaaagtatatttatactacagttataactcaacagttcatttatatgctgttcatttaacagttcatttaaacagttcattataactgtttaaaaatatatatgcttatagtcaaaagctgttgtggtgttgttgttgtaggcttatagttgagcattattttcttaaatttcttgaatgttctttatggtagtgttactaaaaagtttatgatcacattttcattgtgaacataatttgaactcattatcacacacttggaaaatacagaaaagtggaggaaaaaaaatcatatccccaccatccaaagacatatactctcctcttatcttgttcattcttgtttctgtgcacaggtttatgattataactgtgtcaaaatgtatattcaaaatagctgttacattacctttgtggaattatggttaaatactttcactttaattttttcaaatgttccctataataatgtcctgataacagtgtattatgtgtgtctccattggtgtgcataatacatacccagaggaaaaattagaaaataaagtaaattattttaaaaaattacctatattcccaacacctaacaactactgctaacatcttgatctgtttcctctatcttgtttcagtgcacacgcttgtgataacagtgttaaatatgtgtgcataaagtcttaaatgaaaagatgtggaaaataactaaaatagtgttgtcattgtgggaatttggttaaatattttgtctcaaattccttaaataatctttggtgttttggtaataaattttatgtatgtattttccattacaaatataatacatactcatacaaaactttggaaattcagtaaagaaaattcacacatattcccaacacccaacaacaattaactgttaacatcttgatctgtgcactagtctgtgattattagggtgttagtgataagtatgcataaatgtcaaagatgggaagaaagatgaaaaacaagaaatagttgtgtggttgttgtgggattatggttattttgtttcggtttccttgaaaggtcatcattctagtgttttggtagtccacctttactacatatatttccattatatatgaaatgtgttcattatagaaactttgaagttacagaaatgtagaagagaaactcacccatgttttcaccatccaaagagtgtggttaacatcttgatatattttcttcatcttgtttctgtgcacaggtttttggtttgttaatatggttgtggtcattctatctgtaatagtgtcaacaataaaaataaagttaaaaataa

SEQ ID NO: 975 - DNA, 3001 bp, Homo sapiens
  source 1..3001: mol_type = genomic DNA
aatcttataacttgaagaactgccctggagaaaggaagaaacttataataaatgggaaattataaatctagaccaacccaaacttgtactgatgaatggaagaaaaaagtcagtgaatcatatgttatcacaatagaaagattagaagatgacctgcagatcaaggaaaaagaactgacagaactaaggaatatatttggctctgatgaagccttcagtaaagtcaatttaaattaccgcactgaaaatgggctgtctctacttcatttatgttgcatttgtggaggcaagaaatcacatattcgaactcttatgttgaaagggctccgcccatctcgactgacaagaaatggatttacagccttgcatttagcagtttacaaggataatgcagaattgatcacttctctgcttcacagtggagctgatatacagcaggttggatacggtggcctcactgccctccatattgctacaatagctggccacctagaggctgctgatgtgctgttgcaacatggagctaatgtcaatattcaagatgcagtttttttcactccattgcatattgcagcgtactatggacatgaacaggtaactcgccttcttttgaaatttggtgctgatgtaaatgtaagtggtgaagttggagatagacccctccacctagcatctgcaaaaggattcttgaatattgcaaaactcttgatggaagaaggcagcaaagcagatgtgaatgctcaagataatgaagaccatgtcccactccatttctgttctcgatttggacaccatgatatagttaagtatctgctgcaaagtgatttggaagttcaacctcatgttgttaatatctatggagatacccccttacacctggcatgctacaatggcaaatttgaagttgccaaggaaatcatccaaatatcaggaacagaaagtctgactaaggaaaacatcttcagtgaaacagcttttcatagtgcttgtacctatggcaagagcattgacctagtcaaatttcttcttgatcagaatgtcataaacatcaaccaccaaggaagggatgggcacactggattacactctgcttgctaccacggtcacattcgcctggttcagttcttactggataatggagctgatatgaatctagtggcttgtgatcccagcaggtctagtggtgaaaaagatgagcagacatgtttgatgtgggcttatgaaaaagggcatgatgccattgtcacactcctgaagcattataagagaccacaagatgaattgccctgtaatgaatattctcagcctggaggagatggctcctatgtgtctgttccatcacccttggggaagattaaaagcatgacaaaagagaaggcagatattctcctcctaagagctggattgccttcacatttccatcttcagctctcagaaattgagttccatgagattattggctcaggttcttttgggaaagtatataaaggacgatgcagaaataaaatagtggctataaaacgttatcgagccaatacctactgctccaagtcagatgtggatatgttttgccgagaggtgtccattctctgccagctcaatcatccctgcgtaattcagtttgtgggtgcttgcttgaatgatcccagccagtttgccattgtcactcaatacatatcagggggttctctgttctccctccttcatgagcagaagaggattcttgatttgcagtctaaattaattattgcagtagatgttgccaaaggcatggagtaccttcacaacctgacacagccaattatacatcgtgacttgaacagtcacaatattcttctctatgaggatgggcatgctgtggtggcagattttggagaatcaagatttctacagtctctggatgaagacaacatgacaaaacaacctgggaacctccgttggatggctcctgaggtgttcacgcagtgcactcggtacaccatcaaagcagatgtcttcagctatgctctgtgtctgtgggaaattctcactggcgaaattccattcgctcatctcaagccagcggctgcggcagcagacatggcttaccaccacatcagacctcccattggctattccattcccaagcccatatcatctctgctgatacgagggtggaacgcatgtcctgaaggaagacccgaattttctgaagttgtcatgaagttagaagagtgtctctgcaacattgagctgatgtctcctgcatcaagtaacagcagtgggtctctctcaccttcttcttcttctgattgcctggtgaaccggggaggacctggccggagtcatgtggcagcattaagaagtcgtttcgaattggaatatgctctaaatgcaaggtcctatgctgctttgtcccaaagtgctggacaatattcctctcaaggtctgtctttggaggagatgaaaagaagtcttcaatacacacccattgacaaatatggctatgtatccgatcccatgagctcaatgcattttcattcttgccgaaatagtagcagctttgaggacagcagctgacagcattcggcgtatacctaaggagagttttttccccgaactgacagcaacgattccaaccacggcaagctggcttccaactataacattttactctcaaaggtctccttaaattgggcttgtttttacttgtcctatttaattccccactattagcaggctttggatttgtgcctaaggaataatatgcaaaagaaccaagacagaatgtatatgaagaattgtttttaattttgtaaattaaaaaaaaatttagatcgttacttggaaatggagcctaagtctgtggtggacagataataattatgttttcctgggctgaattatgtagacttgtgtttgacagctatgggtttatttcttagaacattgttcattttcttttctcattatgttacttctagtgttcacctctgtgattaaagattctttggtgaaatag

SEQ ID NO: 976 - DNA, 4164 bp, Homo sapiens
  source 1..4164: mol_type = genomic DNA
gagcggccgcgccccctgcgctgccaacccgcgagcccgcatcatggatgtcgagctcccctatttcgcattgctagccctggaattcgagaccccagacgaggaccaggattcatgaaatcagtcgcaggggccggggcaggggcctctggctcccgacactggccgagaggtgatgagtgaggttcgaagaacggaagatttaaaaagcagccggggcctccgtattgaatgaaagacccagtgcaaagacatcaccatgaacactagcattccttatcagcagaatccttacaatccacggggcagctccaatgtcatccagtgctaccgctgtggagacacctgcaaaggggaagtggtccgcgtgcacaacaaccacttccacatcagatgcttcacctgtcaagtatgtggctgtggcctggcccagtcaggcttcttcttcaagaaccaggagtacatctgcacccaggactaccagcaactctatggcacccgctgtgacagctgccgggacttcatcacaggcgaagtcatctcggccctgggccgcacttaccaccccaagtgcttcgtgtgcagcttgtgcaggaagcctttccccattggagacaaggtgaccttcagcggtaaagaatgtgtgtgccaaacgtgctcccagtccatggccagcagtaagcccatcaagattcgtggaccaagccactgtgccgggtgcaaggaggagatcaagcacggccagtcactcctggctctggacaagcagtggcacgtcagctgcttcaagtgccagacctgcagcgtcatcctcaccggggagtatatcagcaaggatggtgttccatactgtgagtccgactaccatgcccagtttggcattaaatgtgagacttgtgaccgatacatcagtggcagagtcttggaggcaggagggaagcactaccacccaacctgtgccaggtgtgtacgctgccaccagatgttcaccgaaggagaggaaatgtacctcacaggttccgaggtttggcaccccatctgcaaacaggcagcccgggcagagaagaagttaaagcatagacggacatctgaaacctccatctcaccccctggatccagcattgggtcacccaaccgagtcatctgcgacatctacgagaacctggacctccggcagagacgggcctccagcccggggtacatagactcccccacctacagccggcagggcatgtcccccaccttctcccgctcacctcaccactactaccgctctgctggagacagtaacatctaccggaaacccccgatctacaaacggcatggtgatttgtctacagcaaccaagagcaaaacaagtgaagacatcagccagacctccaagtacagtcccatctactcgccagacccctactatgcttcggagtctgagtactggacctaccatgggtcccccaaagtgccccgagccagaaggttctcgtctggaggagaggaggatgattttgaccgcagcatgcacaagctccaaagtggaattggccggctgattctgaaggaagaaatgaaggcccggtcgagctcctatgcagatccctggacccctccccggagctccaccagcagccgggaagccctgcacacagctggctatgagatgtccctcaatggctcccctcggtcgcactacctggctgacagtgatcctctcatctccaaatctgcctccctgcctgcctaccgaagaaatgggctgcacaggacacccagcgcagacctcttccactacgacagcatgaacgcagtcaactggggcatgcgagagtacaagatctacccttatgaactgctgctggtgactacaagaggaagaaaccgactgcccaaggatgtagacaggacccgtttagagcgccacctgtcccaggaagagttctaccaagtctttggcatgaccatctctgagtttgaccggctggccctctggaagaggaatgaactgaagaagcaagcccggctgttctaggcagaggctctataaatatatatgcatttatataaagatatatgtaaaatctctctactgaagctcggtataatcctctcttgtgtaatgggacacactgcctgccatgagacttgcttttctgtactgtcaggcaagcccacgtcatcgagatatttttatgctccttactttctcttttctaagtgctgtgggatctgggaagggatttgaggggactctgtccttttattggggatcctttttatactgaaacatctgtcctaacttgagtgccccaaggtccaactctctttcctaaagaaggtgcctgaagaagtctctcttctctctgcttcgtggcccctttcttaaatttctagggctgatgctgaccatgtggtttccacaccttattggccccagaggggccctcccatgggaagatctgcagcagtctccccaaatcagtgagcacctttgagcgcccacgaagaactttctcaacacccccaattaggagctcagtgctctcttggggcaatgcagttaaaagggtgagcctcaaatctagtcattacaccagtcaacagaagtggacagggcctaggcctctcctcagctccttaaccctcctccttctgccctggattgtaacctctcccttgtccaaatctaggattcctggtaggaaaaggaaaaggcccttcccttccctccaccacttccaactggcccctttgcctgacctggacttggagaaccagaggaaaagagagggagcggaagtgggagatggagcagggcacctgttagaatcagagctgcaggatttcttgggaccctcctctctccctcactgctcccagcacctcctgacccttccctctttcaaggagaagcccatgattgcagcttgtattctttagccttattacaatctatgtgcctgacaactcaacacaccgcagggctaatgttcccaccagagctccaactgaacaaccagacagacaactctcatcatcctccagagagaaaataggccgtgtctcaaagaaaggttcttggtctatgcctctggtctgtgggctggcagggcaaccataccatacccccgccagtcctcggctcctgctgcaaagttggccatgtttcacagggaaacttttggaagagtggctgcttatgagattccaaaatgaagtgttggccaacaccgctcatggccatcctggattttcccagtggcttcccttcctgctcgcctccctgaacaggggagaaagcttaacctctcttctcctctccaaacctttcaccttgaatgggtaatgtttggtgggggctgttccttcttggagaagccttgagtcggaccattttgagatcatggaggaaggatgaagaagtgaaaatgacaataatgactctcaagaggctggcgatgtgacatggcaaatgtagaactgacttaaattgaacaaaccctcactgagcacctctgatgttgagcacctgctgaatactgagcactgaatgggggagggggaggggagcacggggtgagtcaacctgggactcggtctcagggatatgcctaccaatagcgggtatcgtaaggcatgtacccaaacataacggatgtaaggcagaaagtgatcggagaaggaatgagaaagtgtgcgtgatgttaatgaaaagtcatatgcagctagagcagacccaggaaagctttctggaagagattgcatctgaggaaattcaggaaggatctttgtagattggggggagattctaaattgaaggggtgatggggtgaggggccagagggaagtctgctgtgttctcatgtaggatgtcagccctccctgcaacttctctttttggccaatgtcttttcactttcctgaccctttagaatcatccccagccagacgcaatcatggaagttgccttattgtcactggttaagaacttggcgagattgaagggcttttgttattgttgttggatatttttgtttcccataaaagcacatcatttcaaccctaaacctgtgtgcttctgttgtttcttgtgtgggagtggaaatgactgacatgggaagaggctgaaccctgcacatttttcaaaatgaaagcaccaaaacagcagcc

SEQ ID NO: 977 - DNA, 1967 bp, Homo sapiens
  source 1..1967: mol_type = genomic DNA
gttgcgcgccgtggcggcctctgtgcagtcgccggttccggaggagggcccaacccggctgggtgggtgggaagtgtggctggtaacctggcagccgcggagagagagaagattataaatggcagagccatttaactgtggttagctgttggattctgatactttcttaaaaatacgttcttgcaccaacatcttcattgggaacagttcagaaaaagcaaagaggagagccaacattcacatttaccatggctataccaataacagtgcttgactgtgacctcttgctatatggccgtggtcaccggacattggaccgttttaagctggatgatgtgactgatgaatacttgatgtccatgtatgggtttccacggcagttcatttattacttggtggagctcttgggggcgaatctttctaggcctactcagcgatccagggctattagcccagagacacaggtccttgcagcattgggtttttatacctcaggttccttccagactcggatgggagatgccattggaatcagtcaggcgtctatgagtcgttgtgttgccaatgtcactgaagcacttgtggaaagggcctcacagttcattcgctttccagctgatgaagcctccattcaggctctgaaggatgaattctatgggttggcagggatgccaggggtgatgggggtggttgactgtatccatgtggccatcaaggcaccaaatgctgaagacctctcctatgtgaaccgaaaaggcctgcattctttaaactgcctgatggtgtgtgacattagagggacactaatgaccgtggagacaaactggcccggcagcctacaggactgtgctgtgctgcagcagtcttccctcagtagtcagtttgaagcgggtatgcacaaagatagctggcttctgggtgacagttccttctttcttcgaacctggctcatgaccccacttcacattcctgaaactccagcagaatatcgctataacatggcccattctgcaactcacagtgtgattgagaagactttccgaaccctctgctcccgattccgctgcctggatggatccaagggggcactgcagtactcaccagagaaatccagccatatcatcttggcctgttgtgtcctccacaacatctccctggagcatgggatggatgtttggtcctctccaatgacaggacccatggaacagcccccggaagaggagtatgagcacatggagtccctggacttagaggctgaccgtattcgtcaggagctaatgctcactcattttagctaatgtagaaggtggagaggagggatacttcccaggagttgtgacagactttcctcctcatcaccttttacacagttccatcatctagcatgactgagtatacagatacttgtcataaactgacatttaatatgtgtgttttggtaaggttggggctatgccagaatatcttgattcatttgcatatgcattaattaaactgaaaccaagacagcggctccctactatccagtgaactctaggttgagtaccactaatttgaaagctcagtggttgcaaacatttatgactgtgcctacaaagtcatagtaaaggtcaggagttcaagacaagaccagcctggccaacatggtgaaaccccgtctctactaaaaatacaaaaattagcggccgggtgcggtggctcacgcctgtaatcccagcactttgggaggccgaggcgggcggatcacctgagttcaggagttaagaccagcctgggcaacatggcaagaccctgtctctactaaaaatacaaaaaaattagctgggcgtggtgacaggtgcctgtaatcccagctactcggtaggctgaggcaggagaatcacttgaaccagggaggcggaggttgtggtgagccgagatcgtgccattgcactccagcctaggcaagaagagcgaaactccgtctc

SEQ ID NO: 978 - DNA, 3972 bp, Homo sapiens
  source 1..3972: mol_type = genomic DNA
gcggtggtggtggcggccgctggccagtgtaagatggcggcggcgttggtggtggcagtggacggggcggctgggcctggaacagtcggagcagccgctagcagaaggatgacccaagacgggaagcgggctgctgagcctcgccgattcccgtgcttgtaactgccccagccggacaccccccctcccttgacctacccgtccttcagtgaatctacagacctattttctcaggagctcagcctggccttacttcagtgataaaaggaggaaaggctggctacagcaaacatcattcaagatgtccagcaaagggagcagcacagatggcagaacagacttagctaatggaagcctgtctagcagtccagaggagatgtctggagctgaagaggggagggagacatcctcaggcattgaagtggaggcctcagacctgagtttgagcttgactggggatgatggtggccccaaccgcaccagcacagaaagtcgaggcacagacacagagagctcaggtgaagataaggactctgacagcatggaggacactggtcattactccattaatgatgaaaatcgagtccatgaccgctcagaggaagaggaagaggaggaagaagaggaggaagaagagcagcctcggcgccgtgtacagcgcaagcgggctaaccgtgaccaggactcatcagatgatgagcgggccctagaggactgggtgtcctcagaaacatcagctctaccccgacctcgctggcaagccctccctgcccttcgggagcgggagctgggttcaagtgcccgctttgtctatgaggcctgtggggcaagagtctttgtgcagcgtttccgcctgcagcatgggcttgagggccatactggttgtgtcaataccctgcactttaaccagcgcggcacctggctggccagtggcagcgatgacctgaaggtggtggtgtgggattgggtacggcggcagccagtactggactttgagagtggccacaaaagtaatgtgttccaggccaagtttcttcctaacagtggtgattctactctggccatgtgtgcccgtgacgggcaggttcgagtagcagaactgtctgccacacagtgttgcaagaatacaaaacgtgtggcccagcacaagggagcgtcccacaagttggcactggaaccagactctccctgtacgttcttatctgcaggtgaagatgcagttgttttcaccattgacctgagacaagaccgcccagcgtcgaaactggtggtgacaaaagagaaagagaagaaagtggggctgtatacgatctatgtgaatcctgccaatacccaccagtttgcagtgggtggacgagatcagtttgtaaggatttatgaccagaggaaaattgatgagaatgagaacaatggagtactcaagaagttctgtcctcatcacctggtgaacagtgagtccaaagcaaacatcacctgtcttgtgtacagccacgacggcacagagctcctggccagttacaatgatgaagacatttacctcttcaactcctctcacagtgatggggcccagtatgttaagagatacaagggccacagaaataatgccacagtaaaaggcgtcaatttctatggccccaagagtgagtttgtggtgagcggtagtgactgtgggcacatcttcctctgggagaaatcatcctgccagattattcagttcatggagggggacaagggaggcgtggtaaactgtcttgagccccaccctcacctgcctgtgctggcaaccagtggcctagaccatgatgtgaagatctgggcacccacagctgaagcttccactgagctgacagggttaaaagatgtgattaagaagaacaagcgggagcgggatgaagatagcttgcaccaaactgacctgtttgatagtcacatgctgtggttccttatgcatcacctgagacagagacgccatcaccggcgctggcgagaacctggggttggggccacagacgcggactctgatgagtctcccagctcctcagacacatcggacgaggaggagggccctgaccgggtgcagtgcatgccatcttgaggcctcatacctaggtggggcaggctggggctgccaacctgatcctgcctgggcaaccctttcctgtcccaggccctacattcagcagaaacgcactttggactttttgctttagataaaagaaagacatcccaggagaaggacaaaccagaggagtgaaccaacaaagagtacctaggaatgggagttgagccctggaatggggctctatggagaggtgcataggactcggcagaaatggcctctccccaaagcctctttttgagaggagagggaagcctattttgttaactggtttgggatagggaatggggtttctttttctttaatctcccttgtttcttgggctgggggaggggtggggggaacaactggctattcagtaccaaggggccagagtggagggtaggagtgccactctctctttggtttaggtttttgaccttttcttcctttgttttttaaaagtttatgacagttggctccccccccacccccagcaaccccatcccagaatcctattttcctgggaagtccttaaagcccctaaccatcccacactcttcactttcctttccaccttattcattctctgtacttaccacagtattttgcacttgattacatatccttcactctcttctcttcatcccatcaccccctaaataggtcaggtgagggaggctgggaagaggtgggaggaggggcagaagtgaaggaagaataggaaggatattacctcttctgttatttttttaagaaacattgtttggtggcagcaatctccctgtccctatcactgttagaggcctaattttatatctataaatatattaaaaagcaagtcaaacttggatgtatcaaggtaaaattattgtcaaagtttaaatacctatatattctctgaatgcaataaagggacttaagagtgaacaagagtaatggtgtggaagtgacacctggggtcagtttacctctgtgtatggtcactagagattgggacttaccctttaggttttaggaggcttgagaatggaaggatcctcatttctgcccttcctggttccctgctttggtgtaggggttgggaaaaacaggaaattcctctcagctctgcctcagatctcctacctctccttaagtcttgtagggggttccaaggatggctcttctaaccagaggctggcctgtctttaaaacttaactactttagggtggtgccaccactgcagactattgtggtactttgtgacagaagacatgtacacacacaccacacacatacatacacactctctcactctgtctctcttacctttagctgcttgatcattaagccatccaacttcatgccagttcccttctttatagaagagtgaagggaaagacttcctgggtttgacttaaaccttgtccacctcttgatattttaggattgaggaataagtcattaatctaaggactgattacagtggctggagcttgggcacttgtcttatcactggtcactgagtctgaaagtcccagctgaattcttgcccttaagtgcttttgctgctatttttttgcccccagttccacaagatccaaccaagaattctgtatcctgggacagtcagattcttctaaatcaggccaggaaggaggggaaaagagtgagagaatggtattcccagatacttcttcctcctgccccttttcccagcagctctgagaccagatgttggctgctgtacttactccctgaggtagggaatgtgtggtgatcgagtggtctgtgttcctattgctggtggggtgatagggtgggctaaaaaccatgcactctggaatttgttgtattttctcccagtaaagcttttcttctcccgactgct

SEQ ID NO: 979 - DNA, 2651 bp, Homo sapiens
  source 1..2651: mol_type = genomic DNA
agtttctcctttgttttacgtttgggaggaggtggcattggaaatagcagagtgcttcgcggtaacaggggttggagtgcaatggtgtgatctcagctcactgcaacccctgcctcccaggctccagcgatcctcccacctcagcctcctgaatagctgaccaccagcacactaggcaaacccaccccactcacggcctcccttgggaattcagacctaaccatcgctgagctgaaacaaatgtactgaggctggagcctgtgtgaacagaacagaagaggccttcactctagtagtgctcacagtccagcaggtgtttgctgaagacagcttactcagatcactactgcctggaggtggttgatatatcctggtgtaaaccttcaagaagggcacaggcaggaaaacatgagccagcaactgaagaaacgggcaaagacaagacaccagaaaggcctgggtggaagagcccccagtggggctaagcccaggcaaggcaagtcaagccaagacctgcaggcggaaatagaacctgtcagcgcggtgtgggccttatgtgatggctatgtgtgctatgagcctggccctcaggctctcggaggggatgatttctcagactgttacatagaatgcgtcataaggggtgagttttctcaacccatcctggaagaggactcactttttgagtccttggaatacctaaagaaaggatcagaacaacagctttctcaaaaggttttcgaagcaagctcccttgaatgttctttggaatacatgaaaaaaggggtaaagaaagagcttccacaaaagatagttggagagaattcgcttgagtattctgagtacatgacaggcaagaagcttccgcctggaggaatacctggcattgacctatcagatcctaaacagctcgcagaatttgctagaaagaagccccccataaataaagaatatgacagtctgagcgcaatcgcttgtcctcagagtggatgcactaggaagttgaggaatagagctgccctgagaaagcatctcctcattcatggtccccgagaccacgtctgtgcggaatgtgggaaagcgttcgttgagagctcaaaactaaagagacatttcctggttcatactggagagaagccgtttcggtgcacttttgaagggtgcggaaagcgcttctctctggactttaatttgcgtacgcacgtgcgcatccacacgggggagaaacgtttcgtgtgtccctttcaaggctgcaacaggaggtttattcagtcaaataacctgaaagcccacatcctaacgcatgcaaatacgaacaagaatgaacaagagggaaagtagtcctccaacaggatgaagcagattaacagaagagtgatcagtgacaaacatgcctcattgattattgtttctaggaaggaatttctaaatcaatattgcaaccccaaaagcggttataatttggtgttactaagatgctcctacactttgtgataccgttttaaggacatggtgcatttttttttcttttatttgttttatttagaactttttttatttgttttatttagaactttgtgtgttcttaaagtgtgcttccaacaggaaggtcagtgataaattttcaaaagcataaccttcaatatattatctgttggattattggatataagacttattttcatgtactataaatatgaaaataactttgatttttaattgtgtagtttccatttcttagcttttgccttttaaatttatacttcagccaggcatagtgactgatgcctgtaatcccaacactttgttgggaggccaaagcaggaggatagcttgaggccaggagttccagaccagcctgggcaacatagtgagatcctgtctctacaaaaaaatttgtttttatttgtatttatatatttttatttttgtttttgttggtaggcgtctcgctctgtcacccaggctggagtctagtgtcgtgatcttggctcactgcaacctccacctcccgggttcaagtgattctctggcctcagcctcccaagtagctgggactacaggtgtgtgtcaccacgcccggctaatttttgtatttttagtagagatggggtttcaccatgttggccaggctagtctcaaactcctgacctccagtgatctgcccacctcggcctcccaaagtgctgggattacaggtgtgagccactgtgcctggccccccacaacatgtttaaacttagctaggcctggttgcatacgcctgtgttcccagctactcaggaggctgaagcaggaggatagcttgagcccaggagtttgaggctacagtgagctgtgattgcaccactgtactccagactggataacagcaagagcccatcttttaaaaaaagtaaaaattaaaaatatacttcatggttcatgtcatagccctagagaatgaaaaatttgcagtagatagtcaataaatgaatcagtagttaaatattccttaaagtcaactgtatttcattgtgatttttgttttctttttatcattgtatcaaactatatggaaatcatatggttagatgtgattatttgataatgttagtccatttgaatccattttagatatttcacaattaaagaatatgaaacttcagaaa

SEQ ID NO: 980 - DNA, 1909 bp, Homo sapiens
  source 1..1909: mol_type = genomic DNA
gcacagctgcccgccggaagaaccgagcttggctgtgtttatctcgttggggactaaggcgtcggttggcgcgcaacgggttctaggctgcaggcagctcgaggacccgcggccccgccccggctcggcctggcagatagcagaggcagcaggccgtgccgggggggcatgttgctgtaaccagtggcccaggggatgttacggtggacagtgcacctggagggcgggccccgcagggtgaaccatgctgcagtggctgtcgggcatcgggtatactccttcgggggttactgctctggtgaagactatgagacactgcgtcagatagatgtgcacattttcaatgcagtgtccttgcgttggacaaagctgcccccggtgaagtctgccatccgtgggcaagctcctgtggtaccctacatgcgctatggacactcaaccgtcctcatcgacgacacagtcctcctttggggcgggcggaatgacaccgaaggggcctgcaatgtgctctatgcctttgacgtcaatacgcacaagtggttcacaccccgagtgtcagggacagttcctggggcccgggatggacattcagcctgtgtcctaggcaagatcatgtacatttttgggggctacgagcagcaggcggactgtttttccaatgacattcacaagctagataccagcaccatgacatggactcttatctgtacaaagggcagccctgcacgctggagggacttccactcagccacaatgctgggaagtcacatgtatgtctttgggggccgtgccgaccgctttgggccattccattccaacaatgagatttactgcaaccgcattcgagtctttgacaccagaactgaggcttggctggactgtcccccgactccagtgctgcctgaggggcgccggagccactcggcctttggctacaatggggagctgtacatctttggtggttataatgcaaggctgaaccggcacttccatgacctctggaagtttaatcctgtgtcctttacctggaaaaagattgaaccgaaggggaaggggccatgtccccgccggcgccagtgctgctgtattgttggtgacaagattgtcctctttgggggtaccagtccatctcctgaggaaggcctgggagatgaatttgaccttatagatcattctgacttacacattttggactttagccctagtctgaagactctgtgcaaactggccgtgattcagtataacctagaccagtcctgtttgcctcatgatatcaggtgggagctgaatgccatgaccaccaacagcaatatcagtcgccccatcgtctcctcccatgggtaggaggaagtttctgccacctcccctcctgagcctgctgtcatcttcactgcccctgcccatctgtcacccacctgctcctttgacccctggacttggtatacctccatgtggagttgttgggcgagaggtgttctctgtgctgtgaattcagtggggagctgtagcggggtgggggctaggttcctccccccttgggccgagggccccttccccttggtgctctgtccccatccacctcctttcagctgctcctgggcctcagctctgcccagggccagccaggttctgctgggaagggaagggaatggggagaagggagaagcaagcagtgtctgagcctcaggagcttccccctccccctttgcctatcccctcccctctgcttgagccttgagccttgactgggagctgaaaggagttgcagctgttggcatgagacctccttctccccgtcttggggaggtggggaccagcagataaatcccacccttccttgagctgtcgctgtactctgaagttcagccagctcagattttataaaaattaattaaaatctccaaacgtg

SEQ ID NO: 981 - DNA, 2968 bp, Homo sapiens
  source 1..2968: mol_type = genomic DNA
ggcggtagcggcagcggcggcggcggcggcggcggcggcggcggcggcggcggcggcggcggcagcggcggcggcctgggcccgggcgcagcggcggcggcggcggggcctggagccggatctaagatggcagcggcggcggcggcggtggggccgggcgcgggcggcgcggggtcggcggtcccgggcggcgcggggccctgcgctaccgtgtcggtgttccccggcgcccgcctcctcaccatcggcgacgcgaacggcgagatccagcggcacgcggagcagcaggcgctgcgcctcgaggtgcgcgccggcccggactcggcgggcatcgccctctacagccatgaagatgtgtgtgtctttaagtgctcagtgtcccgagagacagagtgcagccgtgtgggcaagcagtccttcatcatcaccctgggctgcaacagcgtcctcatccagttcgccacacccaacgatttctgttccttctacaacatcctgaaaacctgccggggccacaccctggagcggtctgtgttcagcgagcggacggaggagtcttctgccgtgcagtacttccagttttatggctacctgtcccagcagcagaacatgatgcaggactacgtgcggacaggcacctaccagcgcgccatcctgcaaaaccacaccgacttcaaggacaagatcgttcttgatgttggctgtggctctgggatcctgtcgttttttgccgcccaagctggagcacggaaaatctacgcggtggaggccagcaccatggcccagcacgctgaggtcttggtgaagagtaacaacctgacggaccgcatcgtggtcatcccgggcaaggtggaggaggtgtcactccccgagcaggtggacatcatcatctcggagcccatgggctacatgctcttcaacgagcgcatgctggagagctacctccacgccaagaagtacctgaagcccagcggaaacatgtttcctaccattggtgacgtccaccttgcacccttcacggatgaacagctctacatggagcagttcaccaaggccaacttctggtaccagccatctttccatggagtggacctgtcggccctccgaggtgccgcggtggatgagtatttccggcagcctgtggtggacacatttgacatccggatcctgatggccaagtctgtcaagtacacggtgaacttcttagaagccaaagaaggagatttgcacaggatagaaatcccattcaaattccacatgctgcattcagggctggtccacggcctggctttctggtttgacgttgctttcatcggctccataatgaccgtgtggctgtccacagccccgacagagcccctgacccactggtaccaggtgcggtgcctgttccagtcaccactgttcgccaaggcaggggacacgctctcagggacatgtctgcttattgccaacaaaagacagagctacgacatcagtattgtggcccaggtggaccagaccggctccaagtccagtaacctcctggatctgaaaaaccccttctttagatacacgggcacaacgccctcacccccacccggctcccactacacatctccctcggaaaacatgtggaacacgggcagcacctacaacctcagcagcgggatggccgtggcagggatgccgaccgcctatgacttgagcagtgttattgccagtggctccagcgtgggccacaacaacctgattcctttagccaacacggggattgtcaatcacacccactcccggatgggctccataatgagcacggggattgtccaagggtcctccggcgcccagggcagtggtggtggcagcacgagtgcccactatgcagtcaacagccagttcaccatgggcggccccgccatctccatggcgtcgcccatgtccatcccgaccaacaccatgcactacgggagctaggggcccgccccgcggactgacagcaccaggaaaccaaatgatgtccctgcccgccgcccccgccgggcggctttcccccttgtactggagaagctcgaacacccggtcacagctctctttgctatgggaactgggacacttttttacacgatgttgccgccgtccccaccctaacccccacctcccggccctgagcgtgtgtcgctgccatattttacacaaaatcatgttgtgggagccctcgtcccccctcctgcccgctctaccctgacctgggcttgtcatctgctggaacaggcgccatggggcctgccagccctgcctgccaggtcccttagcacctgtccccctgcctgtctccagtgggaaggtagcctggccaggcggggcctccccttcgacgaccaggcctcggtcacaacggacgtgacatgctgctttttttaattttatttttttatgaaaagaaccagtgtcaatccgcagaccctctgtgaagccaggccggccgggccgagccagcagcccctctccctagactcagaggcgccgcggggaggggtggccccgccgaggcttcaggggccccctccccaccaaagggttcacctcacacttgaatgtacaacccaccccactgtcgggaaggcctccgtcctcggcccctgcctcttgctgctgtcctgtccccgagcccctgcaggtccccccccgcccccccactcaagagttagagcaggtggctgcaggccttgggcccggagggaaggccactgccggccacttggggcagacacagacacctcaaggatctgtcacggaaggcgtcctttttccttgtagctaacgttaggcctgagtagctcccctccatccttgtagacgctccagtccctactactgtgacggcatttccatccctcccctgcccgggaagggaccttgcagggacctctccctccaaaaaaagaaaaaaagaaaaagaaagaaaaaataaatgaggaaacgtgttgca

SEQ ID NO: 982 - DNA, 2985 bp, Homo sapiens
  source 1..2985: mol_type = genomic DNA
ggaaggcgctgggacggttacccagcgggccgccggcggtcgtgggcaagcttcgccatgcagagcactgacctaggcaacaaggagagcggcaagatatggcaccgcaagccgtccccggccacgcgggacggaattatagtgaacattattcacaacacttccgattaccatccaaaagttttgcgatttttgaatgtggcttttgatggcacaggcgactgcttaattgctggggaccaccaaggaaatatttatgtttttgacttacatggaaacaggttcaatcttgttcagcgaacagcacaagcttgcacagctctggcctttaatcttcgtaggaaatctgaattccttgtggcattagctgattattctattaaatgttttgatacagtcaccaaggagctagttagctggatgagaggacatgaatcatcagtattttcgatctctgtgcatgcatcagggaaatatgccatcacaacttcttctgatacagcacaattatgggacttggatacctttcagagaaaaagaaagctgaatattcgccagtctgtgggtatacagaaggttttctttctaccattaagtaataccatcctcagctgttttaaagataattccatttttgcctgggaatgtgacacacttttttgcaaatatcaattgccagctccacctgaaagctctagtatattatacaaagtgtttgctgtaaccagagatggccgaatcctggctgctggaggcaagtcaaatcatcttcatttgtggtgcttggaagctaggcagctctttagaattatccagatgcccactaaagttcgagccattcgccatctggaatttcttcctgatagttttgatgctggttctaatcaggttcttggagtactaagtcaagatggtattatgagatttatcaatatgcagacttgtaaacttctctttgagattgggagcctcgatgaaggaattagctcatcagcaattagcccacatggacggtacattgcatctattatggaaaatggaagtctaaacatatattcagttcaggctttaacacaagaaataaataagccacctccgcctttagtgaaagttattgaagatttgcccaagaataaactgagttccagtgatcttaagatgaaagtaacatcagggagagtacagcagccagcaaaatctagggaaagcaaaatgcaaactagaatattaaaacaagacctgactggtgattttgaaagtaaaaagaatgaattaccagatggattaaacaaaaagcgtttacaaatcttattaaaaggctatggtgaatatccaacaaaatacagaatgttcatttggcgctctctgctacaactgcctgaaaatcatactgcgtttagtaccctcatagataaggggactcatgtggcatttctcaaccttcagaagaaataccccatcaaaagtaggaagctactcagagtattacagagaaccttatctgcattagctcactggtctgtcatttttagtgacacaccatatcttccactcttggcatttccatttgtaaaattattccagaacaaccaactcatctgttttgaagttattgctactctcataatcaattggtgtcaacactggtttgaatattttcctaatcctcctatcaatattcttagcatgatagaaaatgttttggcatttcatgacaaggaactgctgcaacacttcatagatcatgatataacctcccagctatatgcatggcctcttcttgaaactgtgttctcagaagtgctgacaagagaggagtggctgaaattgttcgataatatcttttccaaccatccttccttccttctgatgactgttgtagcctacaacatatgttctagaacgcctctgctcagctgtaatcttaaagatgactttgagtttttttttcaccatcggaataacctggatataaatgttgtgattagacaagtttatcatctcatggagaccacgcctactgacattcatccagacagcatgcttaatgtttttgttgcactgacaaaagggcagtatccagtatttaatcaatatccaaagtttattgtggactatcaaacacaggaacgagaaagaataaggaatgatgaattggattacttaagagagaggcagacagttgaagatatgcaagctaaagtcgaccagcaaagagttgaagatgaagcttggtaccagaaacaggagctgcttcgtaaagctgaagaaacaagaagagaaatgctcttacaagaggaggagaaaatgatacaacaaagacagaggctagctgctgtgaaaagagagctgaaagtaaaggaaatgcacttacaagatgctgcaagaaggcgttttctgaagcttcagcaagatcaacaggaaatggaactaagaagactggatgatgaaattgggagaaagaatcttactgaaaatcaagaagctcttgcaaaagaaatgcgagcagatgcagatgcctatagacgaaaagtggatcttgaagaacacatgtttcataagctgatagaagcaggtgaaacccagagccagaaaactcagaagtggaaggaagctgaaggaaaagagttccgtttgagatcagcaaagaaagcttctgctctttcagatgcgtctagaaagtggtttttaaagcaagagataaatgcggctgtagaacatgctgaaaatccatgtcataaagaagaacccaggttccaaaatgaacaggactcaagctgtttgcctagaacctcacaattaaatgactcttctgaaatggatccctcaacacagatttctttaaatagaagagcagtagaatgggacaccacgggacagaatcttattaagaaagtgagaaatcttcgccagagactcactgcccgggctcgtcacagatgtcaaacccctcatcttttggctgcatagaatgcatgtcacctt

SEQ ID NO: 983 - DNA, 2790 bp, Homo sapiens
  source 1..2790: mol_type = genomic DNA
cggcggaggtgtctaccccgccggtgatggcgttgaacgccactggcttcccggccttccgtccgctgcctccgtccgattctgcgtctgcttgctgaggaggcggattaggggggcgcggagtctcttcccttgagtgcataggtcccggttggtagagggtttgagtccgcatcgccacagctgaaggctgcgagggactaagagcagaatatatctttagaaatgagttgcacaattgagaaggcacttgccgacgctaaagctcttgttgaaagattaagagatcatgacgatgcagcagaatctctgattgagcaaaccacagctctcaacaagcgagtagaagccatgaaacagtatcaggaagaaattcaagaacttaatgaagtcgcgagacatcggccacggtccacgttagttatgggaatccagcaagaaaacagacaaatcagagagttgcaacaagaaaacaaagaattacgtacatctctggaagaacatcagtcggccttggaacttataatgagcaagtaccgagaacaaatgtttagattgctaatggctagcaaaaaagatgatccgggtataataatgaagttaaaagagcagcactccaaggaactgcaagcacatgttgaccagataactgaaatggcagcagtaatgaggaaagccattgaaattgacgagcaacagggttgcaaggaacaagaacgaatatttcaacttgaacaagaaaacaaaggcttgagagagatccttcaaataactcgagaatcatttttgaacctaaggaaagatgatgcgtcggaaagtacttctttgtcagcattagtgaccaacagtgatttgagtctgaggaagagctgaagagtttctgagtctgtgagcttcttacatggctccaaatggtcaaataagtgaatgaatgaatggacagaaaattcaatcctttatttttttctctgtaaatatgtacagtgcacgggctatgagatagcaacaaaaaatgcatagttaatggtcatagactttattccaaaacataattggaaaatagaaactgagccattgccaaatggtaaagaaatgaaaagttttcacagtgactactgaatataccaagagcttttggcagtactgctggctttctgggtgattaattaggtaaacttgaatattcccagtaaatgtttgagaatgcataaaattataccaatttaaaaatataaatttttgccactgttttgtgaacggaggatttgtacgctaaatttcatccttatttggcgtcaaagttgatgcaaagtttatgtaccatgagacttctagtgattgcctactttcacatttatttaaatttttgtgaaagaaaatacagttttaaaggctataggaatgtgttatatgtaccttaaacagataatttaattttagcaatttatcataactgatacttagctaacaattgtccataacttgtttaagtgtaagaaataccatttcaggaatgaaaaagaaggaatactactttctaagaaagaagatcttataatagacatatttagtaggttaaactactcctttgaaagaataagttttggttcaaagtcaataatgaagacgagatttgtttttctcttctctggctgatttttaaggatattatgtagttcatttagttaacagaattgaaatgtttgatatggcaagataggtatggtaatttcaaagtgaattgggaattcctctggctcatagaacccttttttttttcctttaagtattcttgagatacaaaaaaaaaaagtaaatacaatttcaaaaaaaaagttccggatctgtttttaagctccatctggtcctcataacctgcaagatttttcttaaaacctttcagctgaaagtgggggtaaaggtggagtaatctgtggatttgtttctgttgtcttttaaaatgtcaaatatataatatgtaatttttttaaaaaccaccagatacagaaatgtgctttaacatcagttgaaacctaaattttcttatgttgtggtgattgtattaaaaagggataaaagaagagtgtcaaacatggttaaatatattgtactcatttatgttgaatacgtattaaaattaagacaaatggaaaattatactttgagtatataatttgttaaatattactttatatggtaattttatgtataatttcatatattggtaaaattcaaaactacacttgagaatttttttatcttaagtttggggtgaatggggtggatgagactgattgaatagaaaagggctaatggcccaaacattatatagatttctttttttcagtcagaggccttatttgatattttataaataaatgacagtttttatttttaaactttttattgtttttgggaaagtattccttaatttaatgacacattcattcagatacttcttatccctgctaataaaggaaatctatttcaagctacaccattgagattaagtctgaggcagttcattgaggcagctctactataaaagcttacttgataaataattatttttgtaaacaagttgggttaacttattcttcgtctttttgcttggatatgaatttaaggtcttcatgtttaaagacatttactttgttatttagtgacacatttccatcctattttttttttttttttggttgttgttaaacagaaccttaagtttatgtttgaggtatgtactgcataggaacctattttattattaaagatgaatgattaaaattggta

SEQ ID NO: 984 - DNA, 7720 bp, Homo sapiens
  source 1..7720: mol_type = genomic DNA
gacggttgcctggtattattagcaagcagcaaatatggcggtggcgcgcgtggacgcggctttgcctcccggagaaggatcagtggtcaattggtcaggacagggactacagaaattaggtccaaatttaccctgtgaagctgatattcacactttgattctggataaaaatcagattattaaattggaaaatctggagaaatgcaaacgattaatacagttatcagtagctaataatcggctggttcggatgatgggtgtggccaagctgacgttgcttcgtgtattaaatttgcctcataatagcattggctgtgtggaagggctaaaggaactagtacatctggaatggctgaatttggcaggaaataatcttaaggccatggaacagatcaatagctgcacagctctacagcatctcgatttatcagacaataatatatcccagataggtgatctatctaaattggtatccctgaaaaccctgcttttacatggaaacatcatcacctctcttagaatggcacctgcttacctacccagaagtcttgctatactttctttggcagaaaatgaaatccgagacttaaatgagatctcttttttggcatccttaactgaattggaacagttgtcgattatgaacaatccttgtgtgatggcaacaccatccatcccaggatttgactatcggccgtacatcgtcagctggtgcctaaacctcagagtcctagatggatatgtgatttctcagaaggaaagtttgaaagctgaatggctctatagtcaaggcaaggggagagcatatcggcctggccagcacatccagcttgtccaatatctggctacagtctgccccctcacttctacactaggtcttcaaactgcagaggatgccaaactagagaagattttgagcaaacagaggtttcaccagaggcagttgatgaaccaaagccaaaatgaagagttgtctcctcttgttcctgttgaaacaagggcatcccttattcctgagcattcaagccctgttcaagattgccagatatcccaggaaagtgaacccgtcattcaagtgaattcttgggttgggataaacagtaatgatgatcagttatttgcggttaagaataattttccagcctctgtacacactacgagatattctcgaaatgatctgcacctggaagacatacagacggatgaggacaagttaaactgtagtcttctctcttcagagtctacttttatgccagttgcatcaggactgtctccactatcacctacagttgagctgaggctgcagggcattaacttgggcctagaagatgatggtgttgcagatgaatctgtgaaagggctggaaagccaggtgttggataaggaagaggaacagcctttatgggctgcaaatgagaattctgttcaaatgatgagaagtgaaatcaatacagaggtaaatgagaaagctggactattaccttgtcctgagccaacaataatcagtgctatcttgaaggatgataaccacagtcttacattttttcctgagtcaactgagcagaaacaatcagacataaagaaaccagaaaatacacaaccagaaaataaagaaaccatatctcaagcaacttcagagaaacttcccatgattttaacccagagatctgttgctttgggacaagacaaagttgcccttcagaaattaaatgatgcagccaccaagcttcaggcctgttggcggggattttatgccaggaactacaaccctcaagccaaagatgtgcgttacgaaatccggctacgcagaatgcaagagcacattgtctgcttaactgatgaaataaggagattacgaaaagaaagagatgaagaacgtattaaaaaatttgtacaagaagaagctttcagattcctttggaaccagaaatggggtcttgccatattgcccaggccggtctcaaacttctgggctcaagcagtcttccctcctcagcctcccaaagtaaggtctctacaggtttggcaacagacagtggaccagcgtctaagttcctggcatactgatgttcctcctatatcaagtactcttgtgccatcgaaacatccattatttacccaaagccaggagtcctcttgtgatcaaaatgctgattggtttattgcttctgatgtagctcctcaagagaaatcattaccagaatttccagactctggttttcattcctctctaacagaacaagttcattcattgcagcattctttggattttgagaaaagttccacagaaggcagtgaaagctccataatggggaattccattgacacagtcagatatggcaaagaatcagatttaggggatgttagtgaagaacatggtgaatggaataaggaaagctcaaataacgagcaggacaatagtctgcttgaacagtatttaacttcagttcaacagctggaagatgctgatgagaggaccaattttgatacagagacaagagatagcaaacttcacattgcttgtttcccagtacagttagatacattgtctgacggtgcttctgtagatgagagtcatggcatatctcctcctttgcaaggtgaaattagccagacacaagagaattctaaattaaatgcagaagttcaggggcagcagccagaatgtgattctacatttcagctattgcatgttggtgttactgtgtagcatgtcttttgggaggcagatatccacttaacttttcttaaaaatactttcagttgcctttgcttttttttggagggaaatactccctacccctaattttgttactacttatatagaatttgtattcatgtcttatatttttcagattctagatattgagctgagttttcattttgattttgttagctttttacttagctgtaaggtaccaaactatttatattgaaagctatatgcactttatttcttaactgaattgcatcaacaatgttcctgtttctttcatgtactcatttactttcaaaaataagctagaatatattaaagaaaatagaaaaaattaccttaaatatataaataagagaattttggcccttctgtgtctgagaaaattaattatatagcaaggaatgaaatttgataaagcaaatataaatgagaaatatgaggattgtgaattattgaaatttgccagtctccctggtgtaaaatgtttttttaaagccttttttcctcctttcggagtcaaggaaagcctttctataagcaaattaaggaagaaaaggtaggattataagatttctcaatggggatgattaaattgtctcatggaaaacttcagttaatgtcatgcatcagttttaacatatgaagtaaagtgttctatccaggattaaagtcaagtttacttaggcaacacaagaatatttcacttagatatgaagaaaggaaacactagtctccattcacttgaaatactctcatggcaaatatttatcctctcattaagtgctttttcaccctataggtaagcatttttgtgccaacatgttgtcagaaattaatgtatgttcatctcctctgttcctgcttatttttacttatatatttcagcagaaggtccgtggccattcacttcaattttgacctctgtcccatagtgaagaacatttaaagtaatactactggtcgaatatgaatgactttttaggaactactttttgtctaacctgaaaaagttccacatttggaagacaatttaatgatggtgaagaaataataaacctcactttacttgttaaaagggatatatatatatatatatatgtctgcaacttcagggagaaataagattgtgtttgaatattgtaggtagatgcatttgtaattaaggataatatcgtttaacaacatgtatttggtttccctcaacttacagacatacagctatttaaaactatggcaatacttaagcatctctaaatttaggtgctaaatatctattattctgttgtagtcattaggtgcccttctctgaagttatgtaaaataaaagcatctgatccttcaaggataaagttgaggatcacatggtacgtggcatttgttgttattgttttttaaagagatggaggctggctctgttggtgcggtgccatgatcatagttcactataacctcgaactcctggctcaagtgatctcccacttcagcctcccgagtatctgggattataagcaagagccactgctcccagctcatggtatttgttgatagtcataacatttttcctgtatggtaagacgtatttttctcagtttataaatacgtagcactcaggttgagacgacttggattttattcttagaaatccagaatcccttgaaaaggaaatattttctgtttcttataaataaaagagtaatcttactttcagaaggattttccttagtgaaacatgtgtaacattgaatgcatgttaaataaaaatggaatttctaactttttttcaatagtgctaattatcttttctgaatgattttgaatgtcttcttaaatataccctatttttctattttaaagttaagtgcctcacttgctgtccatagttagacaaagaaaaaccaatttccactgcactagtaccaaaatactactttatacattagtttttcataaaagctgctggaatgtcatgattcagtattacctaaatagatttctgctaaaatcctctccctcctgtcttttttaagttatggaaaaacacaactaaattcatttgatcatcagcacttgttagcaggatttccttttttacctttgccttgtttctttagcccacaaatagtactcagcatactttcattaaaaatttggcacaatatgataattgttaatattctgttcttcgtctgtgttttatttaacttttactagtgtttagaagtgcaagaatattaaatagccccttccttaactgtacatattatcttgaatgtagataaaatgaaaatactgtaaattagagtgtaggaaaactggcatagagttaatatattttaatgggtttacattatactttaaaagtaatttatataattaaaatatttggttttaactctatgggctattctttggttggctgaagagggaatgggtctagtaaggtttggaaagttaagctttgaacatggtctttgtgtttttttcctaacaaggaaaggtttagttcagctgtgctattttagtacacatcagttctcttgatttatggaagattcagtttatcaattaagaattcctgcagaagcacagaatcataccatgtaagagttggaaggaagcttaagagatttctgttcgaatctctttgtttcaaagatgaaactaaagcacagcatgttaaatgacttgtctaagttatagctagttagtagtaaataaactgaaaacctatatgctactgtagtccaaaattttattatgtcctcttaatctttacatttagtgagtcagtaaggaaatctctgcatatttctcattctctttgaaagaggaaaaaaacttctaagagagctacaactctatcactcatgacagagttgcttgtagaaaataactaattccttcagaaccctgagtgaattttttctaagaaatgtgacttgattaaaatggtttcaaaagagcaatagtggaaattaaagttttagaaaagagacctggcgtggtggttgacaactgtaatcccagtgctttgggaggctgaggccagaggatcacttgaggccaggagttcaagaccagcctggacaacatagcaagacccccctctctacaaaaaaaatttttttctgaaaagaataagtacattttagagtccatttatttgacgacaggcagtatgacaggttgctgaggtatataaaattttctagagaaatgctgagtttgatgacattttatcttcagttttgtagaacagatgttaaaatgttaactctcctggtgtgcagaaagctgtaatcatgacagttgataatatgcaatttagtttgattttataggtttaattataaaaggcttcacaatatgcatgttttaggaaaatgttcatttatttagtcatataatcgtttgtatatatgtaaataactttattctggaataatgtgggtgccatcttgagcgtgtgtttttatctgttttggattattttttgtatacaaacaccataatactgtattttcctgttatctacttaagtctagttctactttttcccaataatttcaggaaaatacaagcttgagatattatactatctcccttggtattttttgtgtgcaaagtcttagaattggatttataacattgataataaaaatataaaacgtttttcctcgggagttaagatggtaaaaagaaaaaaatagaatgaatatgatcatttctccatcataaaggaaagaagagacttcattgtgtgtgtgttttttttttttttttcgagatagagtttcactgttgtcacccaggctggtctcagctcactgcaacctccacttcctgggtacaagcgattctcctgcctcagcttcctgtgtagctgggattacaggtgtgcaaccacaaggctcggctaatttttttgtatttttagtagagatggggtttcaccatgttggccaggctggtctcgaactcctgacctcaagtgatccacccacctcggcctcgcaaagtgctgagattacaggtgtgagccactgtgcccagccgagacttcattgtttaatgtatatttttattttttccaaacaccagctcgaatcagagtatatttttattttgccacatacctttaaaaggtatttattgtgtcataatgttttaaatgttaaatatatgataccctcattcatgaagtgaagcagaaagggtctgtaaggaacattctaaacatttttaatgatattgcttttactgatcaagcttgttgtgccatattaaaattaaaagtcaaataaacaaagcagtcctcacagccttggaaagaaatagataattgtcttcttaagatgaggtgctttttatctgtggatgaatggaaatcacactgaattttaattcttatttattttagtggatagcaggaatcactctgtagtagttgtgttcattttcttttctttttcttttcttttttttgagagagtctcgctctgtcaccaggctggagtgcagtggcgtgatctcggctcactgcaacctccatctcctgggttcaagtgattctcctgcctcatcctcccgagtagctaagactacaggcacacgccaccatgcccagctaatttttatatttttagtagagatggggtttcaccatgttggccaggatggtctcaatctcttgacctcgtgatccacccagtttggcctcccaaagtgctgggattacaggcgtgagccactacacctggccttgttcatcttctaattaaatatctttgaatgttttgtaataattttaatgttgacaataagagtttaaaaataatttgattttggactgtatttagatttctctttaattttgctgtagaaatagtaaatgatttaaagtggttatgatgtgttttatgaaggcttactattttatattgtacttatttaatttgtatttgagtctgtctaattttaaataaaaggtttatacatttg

SEQ ID NO: 985 - DNA, 1568 bp, Homo sapiens
  source 1..1568: mol_type = genomic DNA
ggtggagcccgcgatggccgaacctgcgtctgtcgcggctgaatctctcgcgggcagcagggcgcgcgctgcacgcacagtactaggtcaggtggtgctcccgggtgaggagctgctcctgccggaacaggaggacgcggaaggccctgggggtgcagtggagcgaccgttgagcctgaatgctagagcgtgctcgcgggtgcgcgttgtatgcggtccgggccttcggcgctgtggggaccgcctgctggtcaccaagtgcggccgcctccgtcacaaggagcccggcagtggcagcggcggcggtgtttactgggtggactctcagcagaagcggtatgttccagtaaaaggagaccatgtgattggcatagtgacagctaaatctggagatatattcaaagttgatgttggagggagtgagccagcttctttgtcttacttgtcatttgaaggtgcaactaaaagaaacagaccaaatgtgcaggttggagatctcatctatggccagtttgtggttgctaataaagacatggaaccagagatggtctgtattgacagctgtggacgagccaatggaatgggtgtcattggacaggatggtctgctttttaaagtgactctgggcttaattagaaagctattagctccagattgtgaaatcatacaggaagtgggaaaactctatccactggagatagtatttggaatgaatggaagaatatgggttaaggcaaaaaccatccagcagactttaattttggcaaacattttagaagcttgtgaacacatgacgtcagatcaaagaaaacagatcttctccagattggcagaaagttgatataggtggacttttttacaggtcagttgaggcaaaaaactatgggttttttcaggtgaacctcccccatttaaatactcagaagataaggtgtgaatgtatgtattattagagtccgaaagtatttttataagttactggttttcacccacgcttttgtgggagagaaaatcattgcaaaatcattttttttgttcggtacaataaagtttactaaaaaacagtattagggtttatttggagttaactcccttagtaattgctacagcttccataattaactggaggtcagcagtaaaataattttgtgattataacagtaagccaggttcaccagaggaaatgtggaatacctaagtataaagcagcaaagaaatgtcacctgtagtcccattattcagcgggtgagtatataacaacgaaatactttttcatttaccaagtattgtgttttgcatggattaactcctttattctaactgcagaagacacttatcctcataattgaaactgaggcacagaatttaacttggcctacattctctatattcatcaaattgaaattatagttattatagcttatatgccactttgtaatatacttttgtctacttcaaacagcatgatacatttcacaactttagtcacatatttcatgttacaggatatttttgagttttatcattatataaataacactatgaggatttctgaatccaaatctggc

SEQ ID NO: 986 - DNA, 3478 bp, Homo sapiens
  source 1..3478: mol_type = genomic DNA
aacagaccgccgtgagagaggaggggtgccggccgggattcgcggcccggagctcgggaccggagtcaggaatggagagaagggtaatggttttacctcttattgtggaaacctgttgagatcacagagaatatactgacggcataaaagggcagaaccatagcagggtgcggttgcttcattccagcctcgcagtcacctctgtgccctgctggttgtcttcccagcgctgctgtagttgccttccatggatctataggagagcaagtcctccaggagctggtggtgtctgtcgattgactgagtgctggagctggcagccctgtgcaggctgccacctttgcccctttactgtgcttgctcctgactctatgtcgcgtcttcaaggagaagaagtcctcaccagtgaacggagacctctctgaactaaggataccatggccacgtcagccccactacggagcctggaagaggaggtgacctgctccatctgtcttgattacctgcgggaccctgtgaccattgactgtggccacgtcttctgccgcagctgcaccacagacgtccgccccatctcagggagccgccccgtctgcccactctgcaagaagccttttaagaaggagaacatccgacccgtgtggcaactggccagcctggtggagaacattgagcggctgaaggtggacaagggcaggcagccgggagaggtgacccgggagcagcaggatgcaaagttgtgcgagcgacaccgagagaagctgcactactactgtgaggacgacgggaagctgctgtgcgtgatgtgccgggagtcccgggagcacaggccccacacggccgtcctcatggagaaggccgcccagccccacagggaaaaaatcctgaaccacctgagtaccctaaggagggacagagacaaaattcagggcttccaggcaaagggagaagctgatatcctggccgcgctgaagaagctccaggaccagaggcagtacattgtggctgagtttgagcagggtcatcagttcctgagggagcgggaggaacacctgctggaacagctggcgaagctggagcaggagctcacggagggcagggagaagttcaagagccggggcgtcggggagcttgcccggctggccctggtcatctccgaactggagggcaaggcgcagcagccagctgcagagctcatgcaggacacgagagacttcctaaacaggtatccacggaagaagttctgggttgggaaacccattgctcgagtggttaaaaaaaagaccggagaattctcagataaactcctctctctgcaacgaggcctgagggaattccaggggaagctgctgagagacttggaatataagacagtgagcgtcaccctggacccacagtcggccagtgggtacctgcagctgtcagaggactggaagtgcgtgacctacaccagcctgtacaagagtgcctacctgcacccccagcagtttgactgtgagcctggggtgctaggcagcaagggcttcacctggggcaaggtctactgggaagtggaagtggagagggagggctggtctgaggatgaagaagagggggatgaggaggaagagggagaagaggaggaggaggaagaggaggccggctatggggatggatatgacgactgggaaacggacgaagatgaggaatcgttgggcgatgaagaggaagaagaggaggaggaagaggaggaagttctggaaagctgcatggtgggggtggctagagactctgtgaagaggaagggagacctctccctgcggccagaggatggcgtgtgggcgctgcgcctctcctcctccggcatctgggccaacaccagccccgaggctgagcttttcccagcactgcggccccggagagtgggcatcgccctggattatgaagggggcaccgtgactttcaccaacgcagagtcacaggaactcatctacaccttcactgccaccttcacccggcgcctggtccccttcctgtggctcaagtggccaggaacacgcctcctgctaagaccctgagccctgacatctgcccccagccccaaccctcagatgcttcacttctttggaattccaggactctcaatggggggacgggatgcctggcctaagcacctggagcaggggaccccatatccactggtagccacctccccattgctgtggccccctgaaatctcactcagtgctgttgctccatctactgccctaatggggctcttttcccacctcctgctggtttcccgagggaacttctgaccctggagtccatgagggctcctttcctttttgaccacgaccttggccccagctctgcactctctggaataagggcccgatgcagcattttcttgcccagtgtggcaagacctcagaaaaaccagtcaattacgcctaagatcattttgctgtccttaaaccccccaggttccttcttgcacaaatccactctgctgcccaccttccctggcattttaaacagacctaccccaccccaactcagagttaagcatacatggcaatgctgaaaataaacaaaatccactgaggcttcccaggccatttaaagcctggagtaccagcgcatatcatctcatggggtccagagtggagtccaggcttctctgaaaccagggctgagcatatttccatagccaaggaggtgggactccctggagctatctgtggtcttagggaaggatccagacatacacggctttggggtacaagctgtgatcactgatcaataaattatctctagattggtccttgtgaggggagttttaagaatccagaacatcttgctcttgatcagcacatccaaaaacaccaagacaaacatccagtggagcagaacctctcctgcctcgggagttctgaccgggttccccagcagggtgttaagcctctgtctctggccctaccagcatccaggttccactttcctaggagagagtggagatgggaagacagggaaaggaaggcagcaggaggccacaagcccaccaggtcttcatgtcaagagagggagtaacatgtcttctcattgcccacggacccaacctctgtccaggtgcccctcatcatcacagtttaacacaagctcccctgctccagccaaattgatctcccagtcttgtccttacccattccaagtgctctgccagcccctgttcatccaagttttaagtcctccaccctgttctaagagactgttccaacggctctgggcctcagtggtcacttgaccaccattgtctcagagctgcccactttgtgtgtgtcacatgctgcctgagtcacatgtacatcttatttctgcctctagttttgtaagctcctggagggcggataacatcttatactactcttgtattctcatggcacctagtgcagtgctgggcacagagtaggtgctcaataaagacttgttgaatgaa

SEQ ID NO: 987 - DNA, 1963 bp, Homo sapiens
  source 1..1963: mol_type = genomic DNA
gcagagccgctcccgaggccccggcgcggcgcgagggcgcggggcgcggcgtccacaggcgccgaggctgcccccgccgccccgcccgcgaagatggcggcggaactctacgctcccgccagcgccgcggccgcggacctagccaacagcaacgccggcgccgccgtgggcaggaaggccgggccgcgcagcccgcccagcgcccccgcgccagcgccgccgccgcccgcgcccgcgccgcccacactcggcaacaaccaccaggagagccccggctggcggtgctgccgccccacgctgcgcgagaggaacgcgctcatgttcaacaacgagctcatggccgacgtgcacttcgtcgtggggcccccgggggcgaccaggacggtgcccgcccacaagtacgtcttggctgtcggcagctccgtcttctatgccatgttctacggagacctggcggaagtcaaatctgaaattcacattccagacgtggagcccgcagcctttctgatcctcttaaagtacatgtacagtgatgagatcgatctggaagccgacacggtgctggccactctgtacgctgctaagaagtacatcgtcccagcattggcaaaagcctgtgtcaactttctggagacaagtttggaagccaagaacgcctgcgtcctgctgtcccagagccggctgtttgaggagcccgagctgacgcagcgctgctgggaggtcattgacgcacaggccgagatggccctacggtccgaaggcttctgtgagatagaccggcagacgctggagatcattgtcactcgggaggccctcaacaccaaagaggcggtggtcttcgaggccgtcctgaactgggccgaggcggagtgcaagaggcaggggctgccaatcaccccacgaaacaagaggcatgttctggggcgagccctctatctggtccgaattccaaccatgaccctagaggagtttgccaacggcgctgcccagtcagacatcctgactctggaggagacccacagcatcttcctgtggtacacggccaccaacaagccccgcctggactttcccctgaccaagaggaagggcctcgccccgcagaggtgccaccgattccagtcttctgcctaccgcagcaaccagtggcggtaccgcgggcgctgcgacagcatccagtttgcagtggacagaagggtatttattgcagggctgggcctgtatggctccagctctgggaaggctgagtacagcgtgaagattgagctcaagcggctcggggtggttctggctcagaacttgaccaagttcatgtcagacggatccagtaacaccttcccggtctggtttgaacacccggtccaggttgaacaagacaccttctacacggccagtgccgtcctggacggcagcgaactcagctactttgggcaggaggggatgacggaagtgcagtgtggaaaggtggccttccagttccagtgctcctcggacagcaccaacgggactggggtccagggtgggcagatccctgagctcattttctatgcctgaggtgcccggggaggctgcagcaggtcagcgagtgagtggaggggaagtcaagatgctaactgcttcttgacaccatgaaaggctgctcttaactttgtctctctttgacatgtagtcagctgaagcttgactgtgtagagacattttccacacagccagaacccagggattggagtcttaggcatctctggtacagtggggtgcacgtctcaggtggaggaagatttacggctcaagacaggccccagatcccctcccagtggcacccatgccacctgctttgaggggttggatcttcctgctaccctcttggattctaagtggttccaagcttaacttgagaccttcccttcaaatctaaaattggcaaaaagtcacttaaaatagtggacttctgtaataaaggttgcct

SEQ ID NO: 988 - DNA, 3760 bp, Homo sapiens
  source 1..3760: mol_type = genomic DNA
atgcgcgccctggcggccctgagcgcgcccccgaacgagcggctccttccccgggaccccgcggctacccgggaccccgacgccgcgcggccggcgcgcaggagcgcagtggagaggctggcggcggatcgcgccaagtatgtgcggggtcggccggggactggccggggcgtcgcttccgagggcagcggcccgggggcgatcaagtgcccggggaacgaccctgggcccccggcccgcgccccggccccggtggcgcgcagggctattgcgcggaagccgttgagaccggactcgctgatcatctaccggcagaaatgcgaattcgtgcgaggatcgggcgccgacggccccagggcaagcctggtgaagaagctcttccaggggccgggtaaggacaaggcgccggtgccccggacgggagacgagggcaaggccgggaacccggagacggtcccgaccactcctggccccgcggcggaccccgcaatccccgagaccccagccccagccgcgcggtccgcggcgccctccagtgtcccggccgcgccccctgggccagagccgcgggtggtgaggcgtcgggggctgcagcgctcacagtcggacctcagctcccgctattccgctgccttggccgagtctgacaccttcttccagtactgcggcctggaccccgaggtggtggaggccctggggagggagaacttcaccgcggggtcggactgtgtgaccctcaaggtgcgcagcgtgagcgtcgccacctccggcagcggcttctcccggcacagcggcggcgacgacgaggggctgcaggaggaggagctgatagagcaggtgcccagcaccacttcggtcatcgagaggaacgcccgcatcatcaagtggctgtacacctgtaagaaggccaaggagacccccagccaggagcagagccggacccgaggaagcaaaccttcccgatgatgaagacttcttgaaggatttcatgggtgatttgggatcccaggaccatttggctagtgtgcctaggtgaccacatgattgctgttttaccaggaatgcagcatcccattgacaaaacaagtgctctgagaaggtttaaaatactacagagaatatgggaacacagaccttgaaatttagctgagttgtaacagctgaaactccaagaggtgtcttccttgtttgaggtgaaactagtgttgcttccagagggcagctggaaaccgtaaagctgtttggaaatctttttgactgacttgctgacaaagaggtactgtgatgcattttaacaatatctaagttgatttttttttaaatcaaggaaaataaaaaccaagcatgaatgctatggtatgtgccccttttgaccatcctgggctgattaacatcatttaaatcaaagtaatcataaaaaggcatattctacttcaattatgtggtcaaataagagtaaacacacacactcacacatgctgaccccaattgccagagcattactgcactataaattacggttaattcccaaattatactactgtttatcttatttaacaagtcagaaagcacttttaaaataacttgagggctacaaggtcattctattaatgtcattctccattcgggttgtaggcatgtggaagtacccattaaaagataagttagagtttaaatactgataaacaaaaccttttattgcaactggacagtttctggagagttagcggaagaatcttggagtttcctttggtcagatgaatacaacatttcacttttgcagcactatttagaatgtactccatggttctcttgttcccaacttccaaaaagaacagaaaactttggtttacacagaacacgggcatctgaggcaggacctcttccctgccctttgatctgactcacacctccacatatgacgtaatcaacccaaatttgacaccaattcactcttttctgcaaagggcatattttgaaacaagggacagcctgagggcggctataatgagaatgttcatgggggttactgggtccctaattctgaacttgcttatgacacccagagtgaatagattcagattcagaaccttctgagaaataacccaaagaaaatttgttacccagccaattcttcgaaagcttaatatcaaaatatatcttttcaagaagaaaatcgttagagagaagaatgtggaggggagagaaatgggtttctcattgatatgatattttgttaaccatttcattttgaattattcaagttttggttaatattgtattcttttttcgtaactattttaccgtgagagtaggtcattgggttacttagatatttatttttacacagttattagtcttcagatagttttattttacttcatatgattttagtttttgtcagtataattttaaatcatgtttttcttggtcatctctttgtgtatattgtgtaattggattttcattgactgcaagtggagtgtttgccactcaattcagtactcagtactatggtgacttgttttcaaataagtctcagatacacatttagggagcctttgctggccgaatatagactctgtcaggacagcaggtcccctgatctaagaattttccccaatggttgctctaaaaatgctgctattttgctgttcactgtattgcacttagttaaaaagaagataatgtgaaagatgagagcagttttttaaaggatcttttcatatacccaattcccttattttcagatgtcccatcaattttagatatgaaagctttaagtaaaagtgtgtatgcctttctactgtcagaacaggatggatgcagcctgggtcagatttatttaagataaaaatcatgcagactcatcattcatatcataggtgaaaaatgtaaaaaccaaatggtttccactaaagccaccaagatcttttagaaatgtttgcacctttggtggtggcacaggaaaagagaagaattcagctggagtgaattctagaagtagatatcagaaacggggcatgaagaacaggggaactgggtggcatcagactcctaaagaagtgagttaattttccttcccttccattcagattcatgccacagctccatatcttgagtatgtgtaagaggtgagttccttcttcagccaggggcggtggctcatgcctttaatcccaatgctttgggaggccaaggtgggaggatcacttgtgccttggggttcaaggttgcagtgaaccatgattgcaccactgcactccagcctgagtgacagagcaagaccctgtctctaaaaatatatataaaaagtaaaactaaagaacttcttgcctaaacctgaattaccgcaatttgctgagtgactttgagaaaaatcagactgtttagttcagtcgggatgaaaagcttgcgattgcttcccacaagaatgggcaatagtgacggctgcaaggtacttttatttgttcatgaaagaacgacaatttttcaaaatgtaattaaacataatagaatgttttaaactactgggcactgaaactggaagaaaaaggaggctttattgaacattcccctttttcagttggttcaaagttcagcactgtggttatcattggtgatgccagaaaacattagtagacttagacaattgctatggcagtttctaaacagagctttttctatacactatttgcaactggagtgcaatattgtatattctgtgttaaagaaataaagtatttttatcatttattaa

SEQ ID NO: 989 - DNA, 1374 bp, Homo sapiens
  source 1..1374: mol_type = genomic DNA
ggacagcttggagatagggcccggaattgcgggcgtcactctgctcctgcgacctagccaggcgtgagggagtgacagcagcgcattcgcgggacgagagcgatgagtgagaacgccgcaccaggtctgatctcagagctgaagctggctgtgccctggggccacatcgcagccaaagcctggggctccctgcagggccctccagttctctgcctgcacggctggctggacaatgccagctccttcgacagactcatccctcttctcccgcaagacttttattacgttgccatggatttcggaggtcatgggctctcgtcccattacagcccaggtgtcccatattacctccagacttttgtgagtgagatccgaagagttgtggcagccttgaaatggaatcgattctccattctgggccacagcttcggtggcgtcgtgggcggaatgtttttctgtaccttccccgagatggtggataaacttatcttgctggacacgccgctctttctcctggaatcagatgaaatggagaacttgctgacctacaagcggagagccatagagcacgtgctgcaggtagaggcctcccaggagccctcgcacgtgttcagcctgaagcagctgctgcagaggttactgaagagcaatagccacttgagtgaggagtgcggggagcttctcctgcaaagaggaaccacgaaggtggccacaggtctggttctgaacagagaccagaggctcgcctgggcagagaacagcattgacttcatcagcagggagctgtgtgcgcattccatcaggaagctgcaggcccatgtcctgttgatcaaagcagtccacggatattttgattcaagacagaattactctgagaaggagtccctgtcgttcatgatagacacgatgaaatccaccctcaaagagcagttccagtttgtggaagtcccaggcaatcactgtgtccacatgagcgaaccccagcacgtggccagtatcatcagctccttcttacagtgcacacacatgctcccagcccagctgtagctctgggcctggaactatgaagacctagtgctcccagactcaacactgggactctgagttcctgagccccacaacaaggccagggatggtggggacaggcctcactagtcttgaggcccagcctaggatggtagtcaggggaaggagcgagattccaacttcaacatctgtgacctcaagggggagacagagtctgggttccagggctgctttctcctggctaataataaatatccagccagctggaggaaggaagggcaggctgggcccacctagcctttccctgctgcccaactggatggaaaataaaaggttcttgtattctca

SEQ ID NO: 990 - DNA, 4311 bp, Homo sapiens
  source 1..4311: mol_type = genomic DNA
gctggaggctcagcgcgcaagcgtgcgcgtgatttggccctgaacggacgccgtagccaagaggttgggcggatgttgtgagccgggtcgctgcggccgaggctccggcccccaggaccactggctgcccatgagagatgaaggatggcatccaagggggccggcatgtctttctcccgcaagagctataggctgacctcagatgctgagaaatccagggtcacaggcattgtgcaggagaagctgctgaatgactacctgaaccgcatcttttcctcttctgaacatgcacccccagcagccaccagcaggaaacccctgaacttccagaacctgccagaacatttggaccagttgctacaggtggacaatgaggaggaggaaagccagggacaggttgaagggcggcttggcccatccactgtggtcctggaccacacaggcggctttgaggggcttctcctggtggatgatgacctgctgggggtgattggacacagcaactttggcaccatccgctctaccacatgcgtgtacaaagggaaatggctctacgaggtcctcatctcctcccaggggctcatgcagatcggctggtgcaccatcagctgccgcttcaaccaggaggagggggttggagatacacacaactcctatgcctatgatggcaaccgcgtgcgcaagtggaatgtgaccacaacgaattatggcaaggcgtgggcagcgggggacatcgtgagctgcctgattgacctggatgatggcactctgtccttctgcctgaacggtgtatcactgggcactgcctttgagaacctgtccaggggcctgggtatggcctacttcccagccatcagcctctctttcaaggagtccgtggccttcaactttggcagccgtcctctgcgctacccagtggcaggctaccggcccctgcaggacccaccgagtgctgacctggtgcgggcacagaggttgctgggctgcttccgggcagtgctgagtgtggagctggaccctgtggaggggcggctgttggacaaggagagctccaagtggcggttgcggggccagcccaccgtcctcctcacactggcccacatcttccatcactttgcaccgcttctgcgcaaggtgtatctggtggaggctgtgctcatgagcttcttgctgggcatcgtggagaagggcacacccacacaggcacagtccgtggtgcaccaggtcctggacctcttgtggctcttcatggaggactacgaggtacaagattgcctcaagcagttgatgatgtctctgcttcggctgtaccgattctcacccattgtcccagacctgggcctacagatccattacctgcggctcactatcgccatcctgaggcatgagaagtcccgcaagtttctgcttagcaatgtcctcttcgacgtgctccgctccgtcgtcttcttttacatcaagagccccctgcgtgtggaggaggccggcctgcaggagctcattcccaccacctggtggccccactgctccagtagggagggcaaagagagcacggagatgaaggaggagaccgcagaggagcggctgcggcggcgagcctacgaacggggctgtcagcggctcaggaagcgcatcgaagtggtggaagaactacaggtccagatcctgaagctgctgctggacaataaagatgacaatgggggtgaagcttctaggtatatcttcctgaccaagtttcgcaagtttctgcaggagaacgccagtggccgggggaacatgcccatgctctgcccccctgagtacatggtctgcttcttacaccggctgatctctgccctgcgctactattgggatgaatacaaggcttccaatcctcatgcttccttcagtgaggaggcctacatcccgccccaggtcttctataatggcaaggtggactactttgacctgcagcgcctggggggcctcctctcgcacctgcggaagaccctcaaagatgaccttgcttccaaagccaacattgtgatcgacccactggagctccagtcaaccgccatggatgacctagatgaggatgaggagccagccccagctatggcccagcgccccatgcaggccctggctgttggggggccactgcccctgccccggcccggctggctcagttctccaactttgggccgagccaaccgcttcctcagcacagcggctgtgagcctcatgaccccacggcggcctctgagcacctcggagaaagtgaaggtccgcacgctgagcgtggagcagaggacccgtgaggacattgaaggcagccactggaatgagggcttgctgctggggcggccccccgaggagcctgagcagcccctcaccgagaactcgctgctggaagtcctggatggggcggtcatgatgtacaacctcagcgtacaccagcagctgggcaagatggtgggtgtctccgatgatgtcaatgaatacgctatggctctgagggacacagaggacaagctccgccggtgccccaagaggaggaaggacatccttgcagagttgaccaagagccagaaggttttctcagaaaagctggaccacctgagccgccgtcttgcctgggtccatgccactgtctactcccaggagaagatgctggacatctactggctgctgcgcgtctgcctgcggaccattgagcacggtgatcgcacagggtctctctttgccttcatgcccgagttctacctgagcgtggccatcaacagctacagtgctctcaagaattactttggtcccgtgcacagcatggaggagctcccaggctatgaagagaccctgacccgcctggctgccattctcgccaaacactttgccgacgcacgcattgtgggcactgacatccgagactcactgatgcaggccctggccagctacgtgtgctacccacactccctgcgggctgtggagcgaatccccgaggagcagcgtatcgccatggtgaggaacctcctggcgccctatgagcagcggccctgggcccagaccaactggatcctggtgcggctctggaggggctgtggcttcgggtaccgctatacacggctgccacatctgctgaaaaccaaacttgaggacgccaatttgcccagcctccagaagccctgcccttccaccctgctgcagcagcacatggcggacctcctacagcagggtcctgatgtggcacccagcttcctcaacagcgtcctcaatcagctcaactgggccttctctgaattcattggcatgatccaagagatccagcaggctgctgagcgcctggagcggaactttgtggacagccggcagctcaaggtatgtgccacctgctttgacctctcggtcagcctgctgcgtgtcttggagatgactatcacactggtgcctgagatattccttgactggacccggcctacctctgagatgctgctgcggcgtcttgcacagctgctaaaccaggtgctgaaccgggtgacagctgagaggaacctgtttgatcgtgtggtcaccctacggctgcctggcctagagagcgtggaccactatcccattctggtggcagtgacgggcatcctggtgcagctcctggtgcgtggcccagcctcagagagagagcaagccacatcagtgctcctggcagatccctgcttccagctacgctcaatatgctatctcctgggacagccagagcccccagcacctggcactgctctgccagcccctgaccggaagcgcttctccctgcagagctatgcggattatatcagtgccgatgagctggcccaagtggaacagatgctggcgcacctgacctctgcatctgcccaggcagcagctgcctccctgcccaccagtgaggaggacctctgccccatctgctatgcccaccccatctctgctgtgttccagccctgtggccacaagtcctgcaaagcctgtatcaaccagcacctgatgaacaacaaggactgcttcttctgcaaaaccaccatcgtgtctgtagaggactgggagaagggagccaatacgagtactacctcctcagctgcctagccctcacagcctgtgccatcctggaacctccacctttgaacccagagccaggctgggccctatttatgagctccctttgcccttctcctgtatcccacaccaccacatccaacctccttgcctgcctgtatcctcattggtgggagcccagccatggccctaattgtgcctgagcttgactttcagtcagggccacagtgagcattaaattattattccata

SEQ ID NO: 991 - DNA, 3627 bp, Homo sapiens
  source 1..3627: mol_type = genomic DNA
gccgccgcgcggccggggcttctcactctgacgggcccgcgcgcacgatggccggcgccgcgccgcgggtccgctacctggcgggcttctgctgccctctcgggggcctggcggcgggcaagccccgcgtgctgtgccatgaggcagaggtcttcctgtccaccgggagcgagctcgtctacgtgtacgaccaggagggcgggctgctgaccgcggcgttccggttccccgaccaggtgtggcacctggagctgctggcgccgcgcaggttgctgtacgcgctgtgcgcccggaggggcctctactgcctgtcgctggaccacccgggcaggagcaggtctacgagccaggatgacagggacagcgaggacggtgaccagccttcccccgtgatccctgtggaccccgatgcctgcatccttcccgatgctgcgctgtgcgcgttcaccttgctggacagtgtgctggtcaccctggtgcagggccctgcccgatggaagatgcagctgtttgagcagccctgtcctggggaggacccccggccaggaggccagatcggtgaggtggagctgtcctcctacacgcccccagccggggtcccaggaaagcctgcagccccccacttccttccagtgctgtgctctgtgtcaccatcaggctccagggtcccgcacgacctcctcgggggctccgggggcttcacgctggaggacgccctcttcgggctcctctttggagctgatgccaccctcctgcagtcacctgtggtcctctgtggtctccctgatggccagctctgctgtgtgatcctgaaggccctggtcacctccaggtcagcccctggtgacccaaatgcccttgtcaagatcctccatcacctggaggagcccgtcatcttcataggggccttgaagacagagccacaggctgcagaagctgcagagaattttctgcctgacgaggatgtgcactgtgactgcctggtggcctttggtcaccacggccggatgctggccatcaaggccagctgggatgagtccgggaagctggtgcccgagctgcgggagtactgcctcccaggccctgtgctctgcgctgcctgtggcgggggtggccgcgtgtaccacagcaccccttctgacctctgtgtggtggatctgtctcggggaagcaccccgctgggccctgagcagcccgaagaaggcccgggaggcctgccccccatgctgtgcccagccagcctgaacatctgcagtgtcgtctcgctgtccgcgtctcccaggacgcatgaaggtggcaccaagctcctggccctgtccgccaaaggccgcctgatgacctgcagcctggacctggactctgagatgcctggcccagccaggatgaccacagagagtgcaggtcagaaaataaaggagctgctgtctggaattggcaacatctctgagagagtgtcttttctaaagaaggcggttgaccagcggaacaaggcactgacaagcctcaacgaggccatgaacgtgagctgtgcactgctgtcaagcggcacgggccccagacccatctcctgcaccaccagcaccacctggagccgcctgcagacacaggatgtgctcatggccacctgcgtgctagagaacagcagcagcttcagcctggaccaggggtggaccctgtgcatccaggtgctcaccagctcctgtgctctcgacctggactcggcctgctccgccatcacctacaccatccccgtggaccagctcggccccggtgctcggcgggaggtgacgctacccctgggccctggtgagaacggcgggctcgacctgcccgtgaccgtgtcctgcacgctgttctacagtctcagggaggtggtgggcggggcccttgccccctcagactctgaggacccctttctggatgagtgcccctccgacgtcctgcccgagcaagagggtgtttgcctgcccctgagcaggcacacagtggacatgctgcagtgtctgcgcttccctggcctggccccgccacacacacgggccccctccccactcggccccacccgagaccctgtggccacttttctggaaacttgtcgggagcctggcagccagccagcaggacccgcctccctgcgggccgagtacctgcccccatctgtggcttccatcaaggtgtcggcggagctgctcagagctgccttgaaggacggccactcaggcgtgcccctgtgctgtgccaccctgcagtggctccttgctgagaatgctgctgtggacgtcgtgagggcccgagcactatcttccatccagggagtggcccctgatggcgccaacgttcacctcatcgtccgagaggtggccatgactgacctgtgcccagcagggcccatccaggccgtggagattcaagtggaaagctcctctctggccgacatttgcagggcgcaccatgccgttgtcgggcgcatgcagacgatggtgacagagcaggccacccagggctccagcgctcctgatctccgtgtgcagtacctccgccagatccacgccaaccacgagacactgctgcgggaggtgcagaccctgcgcgaccggctctgcacggaggatgaggccagctcctgtgccaccgcccagaggctgctacaggtgtaccggcagctgcgccaccccagcctcatcctgctgtgaccaggcgggcctgcccctgggctctggccacgcttccagcctctgtcacagcccccccaggcctcatgggttagagggaaaccgagctggcctggccagagccgtcagggaaggtaggacctggccacgtaggagcagaacgctcatgaaagtgcttggaggccgtggagcacaaagcagattctgattgggagcaaccgaggcgggctctgaacctggccggtccagcttcgcgtcctctgctggtgtctctccttctctgaccgcggccgcagcccctgcactcgccttcctcactgctgggcagccttcccaccaccgcagcagcccctgaggccaggaggcagtgcagggcattctggacccggagggccagagaaacaggatttctggggtttggacttggggtgagtttgtaactgttgctgccacaccaccaggagcaccggctgcccctctgggtggcactaccaggtgccccacggtacccttgtcacactgttcacacctgcccggctgcccactctgggaccccgaggtaggagggtgctccctgagaccaaagcacaaaacagcatgcagggagctcctgcaagtgcccgtggtctcgtgccacaccaaggaagggccagcgggtggcctgtggccggaatgctcaacaactaggtgcctccagccggggcagtacccagcactgtgcactattttcagggccactcagggtggcgctgtggcccgggggggggccctgagccccagcccccagcctcctccctcagcctgggctacggcccacctcctggtgctggtgttttcatctggggagggtgctcgcgccgctcccgctgcaggcactgtccgcgatgagtgcgggtaggagccgtgaggtgcttctctgctgtgacaaacgaccctgtctgtccgtgaaccttca

SEQ ID NO: 992 - DNA, 4024 bp, Homo sapiens
  source 1..4024: mol_type = genomic DNA
attatcctccttattgacaaacagagcggtcgcggcggcgactctcggcgtgcggtgatagccaagccatgggagacaagaagagccccaccaggccgaagcggcagccgaagccgtcctcggatgagggttactgggactgtagcgtctgcaccttccggaacagcgccgaggccttcaagtgcatgatgtgcgatgtgcggaagggcacctccacccgtaaagagaaaaaagataaagtagaaaaagaaaaaagtgaaaaggaaacaactagcaaaaagaatagccataagaaaaccaggccaagattgaaaaatgtggatcggagtagtgctcagcatttggaagttactgttggagatctgacagtcattattacagactttaaggagaaaacaaagtcaccgcctgcatctagtgctgcttctgcagatcaacacagtcaaagcggctctagctctgataacacagagagaggaatgtccaggtcatcttcacccagaggagaagcctcatcattgaatggagaatctcattaaagtttattttctccaatttcttagtcacttctgtcctaccatgcaaatacacagattatgccaagaggtaccacattttcatgacagatacattcatgcacaatccataatttgagttttacataaaatagaaatttgttagaatttgttagattttattgcaatgatgcctaccaaacatttccagacttaacattttggtctctgcagttaagtgccatgaaaatgtggttgaattattcattatgcagtgttattggtaagtgtattttcacttttagtttagtgaattctaacacataattcttgaattctctactattggcatgtaacgaatttaaattttttataacatagtgcaagctgcctaaatatgtattatttgagaattgtgaaacagatagttatatgtatacaagtcaaagaacaacttaactattgctgcaacaggtttttcttaatggttatcctcttaaatacacctgctggtacttggtgtggttaaataggaaaattgttattaaataaagaatttgtatgaacctttgccaatgtttttgacacgttttactaattattgttcctgaattatgtttctggttttatctattttttgaggtttttttgtttgcttatttttcaaaacattcatttattgtaatgtttactagcggactagtaaacaataaaacattgattatttagctttataattcaggtttagtgctattgtcattgaacactggtattttctgtatcatataaaacattaaaattcaaataattataagcatttggcaaaaacaagagaaaagaaacttgccatattttacaagctgcaattttagaaaagctttaacttaatgatagttttatcattgttttcttgtcccaaacttatccagggccatagaagtatgaatctaattaaaacagaaatgggaattattgcacagaaatgggaaataactaattttaaatcagtcaaattggcttcttattaaatacaataattcttatgaaaatcatagtaccctattttcagacacagctgccagtttacacatttctcagtatcctgaaaggaaaaaagtatagccccacttatactatgtaaaattaccaataaaatatttttatgactacagattttgcatttttgtttacaactatttaaagagttttatgttgtatttagaatttcaacctagaaaccacacagtacttaaattctcctggggtctcctgctttctcttaaccatttgcttaatatatatctacctaaaggagacttctgaattgtaaatgaacttaaaaatagaatgtggatgcaaaatatcacataagacatcatgataacatttgaagaaaaaataaaactgtagaccctaacagttgtgatatttggtggtttcatgtggtaatgtaattttctgtttaattacagtactttttacaggcacagtggtactgtcttttttgtaagatgctagttgtgaaatacaattaattgcatacagtaaaagtctgtgattaaaacatttatatacctcattctttagtgttgttaaatgaaaaattaaaatttgtgtttattataagatactttcaatggaataccagctaaccagatatgttcctttaaaacatgaatttttttgtcttattctgtttttaacatgtttcaaatgttttatacatttttggagatagtaaaaatttaaaaatgtaatagggaaaatatttaatttttaagtcaaaaactatgctttaaaggaattacatcttatgatcaaataactttcaggatgtattttaaatgagctgcaagagagaaaaatctgacaggagatgggattttacctgaatggagcatactcatatttctacataggtgggaagatactcatctttctacatagacgggaacacggtgtagcatggagattaagcgtgctaactgacacctcatgtttgaatcctgttgtagaatggaaatgagcttaaattacccaagcttactttccatctataaaacagggctaataatggtaatcacatctaatttatagggtttttgggaggattaagtcaatccgtgtaaaattcttaattatctgacacatactggtcactcagtaaatgtgagcttttaccattgttataggtaaaatcccattacaaaaatacaaaaatattttttgtaacagttattttcctgccctcttggatgacctaaagtaatagtgttttatagatttcactaaattttcagtgtaatatcagatgttttctctggatgcagaaagaccatctttccataattaaagaacctggtgggtgtgcactatgagattggagaaatgaattaagttgacttgaaattattttacttttattaatcacaggtatctcaacctgcctttgtttcaccctacttcaagtacacttccacaccaggaaaacagacccaaattccataaacagaactgacgttaaaatatgcgaaagattcagaacctaggtttagggtacatgtttttctctgtttcatgaacttacagtgtggtttgagcactgggttcttttagccaaattccatacaaaaagaatttggatgttttccagcatttattaccttactttgctataagtaagagtgaagataggccgggtgtgatggctcatgccagtaatcccagcactttgggctgaagcaggcagatattttgagcccaggaccagcctgggcaacatggtgaaagctcatctctatgaaaaaatttgaatatacatatatatatatatgtatatttaaaaagtgaatataatttgaggcacagaagaatattcttaaaaccttttgtattatacaatagaaataaaggttttatttttattaaatgctttcctaaaatgatagtggataatagacaaagtgaaaacatttaaaaaggaagagaaacttcagcctttctaagttgatagcatgtttattaacttttagataaagatccttatagactgaaagaatgtagcctctgcattaatggtaaatggtctagaagttttcgtttccactgaggcttccgccactcgcttttttaaacttcctgctatggtttggatatggtttgtcctcaccaaaactcatgctgaggcctgagtccccagtttgattgtgttggtaggtggtgcctttaagaggtgattaggtcattgagatggattaaaggctttctcatgaggctcagttagttctggaatggattcgctcttgcaggaatggatgaattctcacaagagtgggttgttatgaagtgaggatgcttcttgtgttctgttctctttgccctcctcagttcaccatctgctttccaccatgagttgaagcagcatgaggccctcatcagatgggctccctgatcttggactcctcagcctttggactcataagccaaaataaatctgttttctttataaa

SEQ ID NO: 993 - DNA, 3490 bp, Homo sapiens
  source 1..3490: mol_type = genomic DNA
cagagagagaaggtaaaccaagggaacatgccagggcttcagagcaccttcctagccatggacacggaggagggggtagaggtggtgtggaacgagctccacttcggagacaggaaggccttcgcggcgcacgaggagaagatccagaccgtgttcgagcagctggtgctggtggaccacccgaacatcgtgaagttgcacaagtactggctggatacctctgaggcctgcgcgagggtcatcttcatcacagagtacgtgtcatcaggcagcctcaagcaattcctcaaaaagaccaagaagaaccacaaggccatgaacgcccgggtatggggagcgggctggggcagccacggggacaggacggggttggggcagcctcggggactgggatggtgagggggtgcccggcggcctcggacaggggctgggcgaggatgcggggcgggctccgcaggcccagccgcctctcctgcgcccacccgaccgacggagtcgtgcgtccgccgccaggcctggaagcgctggtgcacgcagatcctgtctgcgctcagcttcctgcacgcctgcagccccccaatcatccacgggaacctgaccagcgacaccatcttcattcagcacaacggcctcatcaagatcggctccgtgtggcaccgaatcttctccaatgcacttccagatgatctccgaagccccatccgcgctgagcgagaggaacttcggaacctgcacttcttccccccagagtatggagaggtggccgatgggaccgctgtggacatcttctcctttgggatgtgtgcgctggagatggctgtactggaaatccagaccaatggggacacccgggtcacagaggaggccattgctcgcgccaggcactcgctgagtgaccccaacatgcgggagttcatcctttgctgcctggcccgggaccctgcccgccggccctctgcccacagcctcctcttccaccgcgtgctcttcgaggtgcactcgctgaagctcctggcagcccactgcttcatccagcaccagtacctcatgcctgagaatgtggtggaggagaagaccaaggccatggacctgcacgcggtcttggcggagcttccccggccccgcaggcccccgctgcagtggcggtactcggaagtctccttcatggagctggacaaattcctggaggatgtcaggaatggaatctacccactgatgaactttgcagccactcgacccctggggctgccccgtgtgctggccccacccccggaggaggtccaaaaggccaagaccccgacgccagagccctttgactctgagaccagaaaggtcatccagatgcagtgcaacctggagagaagcgaggacaaggcgcgctggcatctcactctgcttctggtgctggaagaccggctgcaccggcagctgacctacgacctgctcccaacggacagcgcccaggacctcgcctcggagctcgtgcactatggcttcctccacgaggacgaccggatgaagctggccgccttcctggagagcaccttcctcaagtaccgtgggacccaggcctgacccggagccccagccccaggggaccatgccggggtgctgcctgggcaggccatgttggggagactccagcaccgtggggctgccctcctccatgcgcctgggagcacaaaggccccggtagtgaaggaaccccccgtctcctgagagtggggctgaccctgccttgggcgccgaggggttggggggtgggtgtgggggagccgttaggcctcccaggtccttaggatcagggttgcccccagaaccccttcccatatcctccattctccgccctgagttcctacccaggctgcctggccggggccactgcctcctcagcatgcaggaggctgccctgtagggaaccccagctctggggcttgggggtgagggtcagccctggacagacctctgcccagggaactgctccatggggtctgggagagcagccatcccctgctggcaccatagacccacacaaggagcctgcacagcaagccagcggtgacacacctgcaggtgtcaggcatggcactgggcacaacagggacctggcaggagaaacagaccacagagaggtctggagttgaggctgttgtcagcaaagcccctggtcccacacagctctgccctagagccacctctttgaccctttacccaccctgagaccagaacttgcagcccctctgcagatctcctctggccactgcagcccctccaatgggctttttctctcatgcattccctggcctggaggcgtcagggaccccacatcctccctgctcctcagactcacagcccctccatgttacctcccgcacctcctccctggggcagctgctccctgggcctctgaggatgtcagctcctggctccctgcctctctcccactccactcctggctcagtcttagagatttctatgccctcatggattctacccctgccttcctggcctcttgattcttggcttgcctctcctccaattccaaacttagtgaaatggccttaagcattttaaactgtatgtatacattagcgcattcatgcctttctaaacgcatttcaaatgtcaaccaggaaggcacaccactgtattagttttatactgccgctgtaaaatttaccacaaacttagtgacttaacacaaatttattgcaattctgtaggctggaagtctgactatgggtctcactggactagaatcaaggctggcaggctgccttccttcctggaggttctaggggagactctgtctcctgctccttcaggctgctggcagaatccacatcctttcggtggcagggccaaggtccccactttcttgctgactgtaaactaaggccacttccagcttgtagaggctgcctacattccttggctcttggccccctcctccatcttcagagctagcaggttcagtctgtgtcacgaaccatttctctggttccctgcagacaggaaaggttgtccctaaggactcatgagattaggttgggcccagccagataatacatgataatctccctcctcaaggtttttaatattaaacacatctgcaggacacattttgccatgtaaactaacattcactggttccagggattaaggaatgaacctcttttgttggggaagggtggcattctgctgaccacagcactccaaccaaaagccaaaaaccaaagcaagacttactaacgcatatcaaataaattaaaggtacaaaatcgtgaatctcagttatcttaaatattccaatactatttacaaaattattcaaattctcacgccttccaactcaaaattagcaatctaaagtaatttccatatcctagatggaaaccctcatgctaaactgtctgattatgcatggttctaaatggtttcagtggcaaatacataacattgtactactgattaaactgaacttaaaagc

SEQ ID NO: 994 - DNA, 915 bp, Homo sapiens
  source 1..915: mol_type = genomic DNA
gtggtttggggaaagtgtaggggcaaccaaagatcatcggcttgactaggccctttgccctgaacctcatgaagaaatgataggaggcagacatatgtgcctaaaaagagcgttgagctcagagaagagcaactcggagttttgggggtgtgctttgatttgtgtacatcaatggcagaatcatccagcgaatcagatcacttccgctgtcgtgaccgattgagtccatgggctgccagatcaacgcacaggggaactcgaagtcttcctacagtagaagttaccgagaaggtcaacactataacaagtactttacaggataccagtcggaacctgcgacaagtggaccagatgcttggacgataccgagaatacagtaatggacaggcgggtgcgatagaacatttaaaagaaagcttggaacaatcaatcgaccaactccggagtcaacgtttattgagaaactcaggagggagaagtatttctgttacaagtttgagtgcaagtgaccttgatggtggcactgggtcagagctccatcattttccacctacctcacctctcaaggactatggggatccacagggtattaaacgaatgagatcaagaactggtgtccggtttgttcaagagactgatgatatgactcagcttcatggttttcatcagtctcttcgagacctcagcagtgaacaaattcgccttggagatgatttcaacagggagctttccagaaggagccggtcagatgccgaaacaaaaagggctttggaagaattgactgaaaaacttaatgaagcccagaaacaagaagtgttttttgtgaagagccttggaaaggtgaagatacaatgcctgtcttctgctgaagtagacaacgtctttccaattaatgtgtggcaatgtggtatctaa

SEQ ID NO: 995 - DNA, 1700 bp, Homo sapiens
  source 1..1700: mol_type = genomic DNA
gtagacgccatgatggatgtgtctggtgtgggtttcccaagcaaggttccttggaagaagatgtctgcagaggagctggagaatcagtactgtcccagccgatgggttgtccgactgggagcagaggaagccttgaggacctactcacagataggaattgaagccaccacaagggcccgggccaccaggaagagcctgctgcatgtcccctatggagacggcgaaggggagaaagtggacatttacttccccgacgagtcgtctgaagccttgcctttcttcctgttctttcacggaggatactggcagagcggaagtaaggatgagtctgccttcatggtccacccgctgacggcacagggagtggccgtggtaatagtggcttacggcatcgcccccaaaggcaccctggaccacatggtagaccaggtgacccgcagcgttgcgtttgtccagaagcggtatccaagcaacaagggaatttacctgtgtggacactcagccggggcccacctggctgccatgatgctcctggccgactggaccaagcatggggtcacgcccaacctcagaggctttttcctggtgagtggggtctttgacctggagcccatcgtgtatacttcacagaacgttgctctccagctgaccctggaggacgctcagaggaatagcccccagctgaaggtggcccaggcacagccggtggaccccacctgccgtgtgctggtggtcgtgggccagttcgactcccccgaattccaccgacagtcctgggagttttaccaggtactcccagtgcagaccctgtgtcaaggagagtggaaagcctcatttgaagagctccacgatgtggaccactttgaaattgttgagaatctgacccagaaggacaacgtgctcacccagattatcttgaaaacaatcttccagtagttctgacgatacttggagcctggtccacgtgcatcccaccttgggaagcctctccaaagagctttcggagctgacactgacagcttcagtttcccccagcacccaggagagccttgctgtgtctgtctgcccggcaagagtccattctcactgctgggacactcatgaaaatctccacgtcctccctcttcccagcctggatggagctccagggctggggaacgtccgcaagtcaatgctcagagatgcccggagctgcctcttagactcgtctggcccatctacctgctgacagagcatgacaaagatgacgctcaaaagtaatgccattacttcttttttttttttttttttttttttttttgagatggagtcttactctgtcacccaggctggagtgcagtggcgtgatcttggctcactgcaacctccacctcccgggttcaagcaattctcctgcctcagcctcctgagcagctgggactacaggcgcctgccatcatgcctggctaatttttgtatttttagtagagacggggtttcaacatattggccaggctggtctcaaactcctaaccttgtgattcgcccgccttggcctcccaaagtgctgggattccaggcgtgagccactgcgcccggccagaatggcattatatttaaatagttcataaagaagcacaaaagaatattatttcataacatgtaaaaattatataaaacgtaaatttccatgttgataaataaagttgtattggaacacg

SEQ ID NO: 996 - DNA, 1461 bp, Homo sapiens
  source 1..1461: mol_type = genomic DNA
atgtcaggttccactccatttcagatgagattagttcatttagaccttaaaggagctccaccaaaggtctcgtacctctcagagatttttcctctgttccgtgcgctaggtgcaaacggcctcctcattgagtatgaagacatgtttccctacgagggccctctgaggctgctgagggccaagtacgcctacagcccctctgaaatcaaagagatcttgcatctggctggactcaatgagctggaggtgattcccttggtgcagacatttggacacatggagtttgtgctgaagcacacggccttcgcccacctgcgggaggtgggctccttcccctgcaccctgaacccccacgaggcagagtccctggcgctggtgggcgccatgattgaccaggtcctggagctacacccaggcgcccagcggctgcacatcgggtgtgatgaggtctattacctcggagagggggaggcctcgcgccggtggctacagcaagagcagaacagcacggggaagttgtgcctgtcacacatgcgggcggtggccagcggcgtgaaggcccggcgccccagcgtgacacccctggtgtgggacgacatgctccgagacctgcctgaggaccagctcgcagcgtccggggtgccgcagctggtggagccggtgctctgggactacacggccgacctggatgtgcacggcaaggtcctcctcatgcagaagtaccggcggtgcggctttccgcagctgtgggcagccagtgccttcaagggtgccacggggcccagccaggccgtgccccctgttgagcaccacctcaggaaccacgtgcagtggctgcaggtggcgggcagcgggcccacggactcactgcagggcatcatcctgaccggctggcagaggtacgaccactactctgtgctgtgcgagctgctgcccgcaggagtcccgtccctggccgcctgcctgcagttgcttctacgcggaggatttgatgaagatgttaaagcgaaagtggagaaccttctcgggatttccagcctggaaaaaacggaccctgttagggagggggccggctccttccctggcagcaacatccttgcccttgtcacacaagtcagcctccatctgcgcagctctgtggatgcgctgctggagggcaacaggtatgtcactggctggttcagcccctaccaccgccagcggaagctcatccacccggtcatggttcagcacatccagcccgcagcgctcagcctcctggcacagtggagcaccctcgtgcaggagctggaggctgccctgcagctggctttctacccggatgccgtggaggagtggctggaggaaaacgtgcaccccagcctgcagcggctgcaagctctgctgcaggacctcagcgaggtgtctgcccccccgctgccacccaccagccctggcagggacgttgctcaggacccctga

SEQ ID NO: 997 - DNA, 733 bp, Homo sapiens
  source 1..733: mol_type = genomic DNA
ctctcctggggtccagcttgtcgcctctggctcacctgttcctagagcaatgtcttcccagcagcagcagcggcagcagcagcagtgcccaccccagagggcccagcagcagcaagtgaagcagccttgtcagccaccccctgttaaatgtcaagagacatgtgcacccaaaaccaaggatccatgtgctccccaggtcaagaagcaatgcccaccgaaaggcaccatcattccagcccagcagaagtgtccctcagcccagcaagcctccaagagcaaacagaagtaaggatggactggatattaccatcatccaccatcctggctaccagatggaaccttctcttcttccttctcctcttccctccagctcttgagcctaccctcctctcacatctcctcctgcccaagatgtaaggaagcattgtaaggatttcttcccatcgtacccttccccacacataccaccttggcttcttctatatcccaccccgatgctctcccaggtgggtgtgagagagacctcattctctgcaggctccagcgtggccacagctaaggcccatccatttcccaaagtgaggaaagtgtctgggcttcttctggggttccaccctgacaagtagggtcacagaggctggtgcacagtttctgcctcattcctctccatgatgccccctgctctgggcttctctcctgttttccccaataaatatgtgcctcatgtaataaa

SEQ ID NO: 998 - DNA, 3120 bp, Homo sapiens
  source 1..3120: mol_type = genomic DNA
gctttttctcctccgcacagaagtcgcgctcgggcagcctgcgcgctcgcagcaggaaccaggctccaggcgccggcgccggggccggggccgcggggaggaggcgacttcgctccctgcggcgggcgcggcccgggcgcccgagcctcctcggccttggagagcagcggcggcggcggcaccccgggcgcggcaatactgaacactgcgcagcttgcagaggtctcctggcagccctcattaggaattctgtctggccccgatcagaatactggagacgagaccacgagattgatgagtttgccttgggagtcggtaagaaggtgaagccaggggcgaacatgggtcagaaggtcactggagggatcaagactgtggacatgagggaccccacgtacaggcccctgaagcaggagctccagggtctggattactgcaagcccacccggctggatctgctactggacatgccccctgtgtcctatgatgtccagctgctgcattcatggaacaacaacgaccgatcgctcaatgtctttgtgaaggaggacgacaagctcatctttcaccggcatccggtggcccagagcacggacgctatcaggggcaaagtcgggtatacccgtgggctgcacgtgtggcagatcacgtgggccatgagacagcggggcacacacgccgtggtgggggtggcgacggcagacgcccccctgcactctgtcgggtacacaaccctcgtggggaataaccacgagtcctggggctgggacttggggcgcaaccggctctaccacgatggcaagaaccagccaagcaaaacatacccagcctttctggaaccagatgagacattcattgtccctgactccttcctggtagccctggacatggacgacgggactctgagcttcattgtggatggacagtacatgggagtggcttttcggggactcaagggcaaaaaactgtatcctgtagtgagtgccgtctggggccactgtgagatccgaatgcgctacttgaacggactcgatcccgagccgctgccgctcatggatttgtgccgtcgctcggtgcgcctggccctggggagggagcgcctgggggagatccacacgctgccgctgccggcttccctcaaggcctacctcctctaccagtgacgttcgccatcataccgccagcgcgacagccacctggtgccaactcactgagccgcctgccgctggggccgccgcaccctgcaccttggaccggcatccgtagccatggacagaggtccctggtcttccctcatcctccgtggctgcctccatgggacaaggaccgattccaacacaggctcctctttcccccttcccgacatcagcagaaggcagcatccctgcatgccgtccgtatacaacccctctttgaaaaaagacacagagaataaactcctacgaaagccctacattgagctccaatctgctcggggtgggacgggtgcttcccacacctctgggagaaggctgcagccacctgggggtcccagggtggtgggggtggcaggtggtaccacagctctgagagcagataccaggggtactaagaggtgcttagacaagggctggtgcccggcccagggtgcccagcggggccatgccatggcagataaagctcaggacgtcaaaaactcaccatggaccccaaggcagaaaccaagaactgtctgcaggcaaataagcacccagcacccatcctggctgccggtgccccgtaccctgtatttattcttttaacaataacaaaagccatttatttattccatctagaaaggaaaccctgtttcagtcccctctctctggctgttctgttactttccttccacctgtgccctccctgggatatgtatgcctcgcccgccctccctgggcacatgtgcacacgtgcccaggcacaagtatgtctctgggtcccttgccctgcagtttccagggggctctgctccaagttccctagcgggcccctcagggagaaatagcctcacgtgcaatctgggtgtcttcgggggcccgtctggaagggctgcagcaattcccctgtgtctccaggtaaccagctaactcttgggctcaggcacccttgcacagggttgcatttctttagtcttctgtgggtcttttgatgtgggtttgattttgcttttgcttttctagctgagatttcccaagtgcatcctcagaagctctgggtgtgccagaggacccccagaactaagaagggagggcgagtgggtctccattccccgagaagccgggggcagggtgggatggggaagaccaggagcagagtcgagcctcacagaagccagcgcgggtctctgctcagcaccccagccggggctctggacccagggtaacagccccagttcatcccaacccctctcagagcctcaagaggggtagctcggctgccggaagagaggggtgccctatccctggcaacccctccacgtagcgtaccccagcacctgccaccgcctttgccatttctttgagcttgaagttaactctcttagagtctaactttggttcatttctgcacaggtacaatagatgactttatttgtttaaaatgtttaatatatatacatacatatatatatatttgtctgtaagaattatgttttaaacagctgctgtagagtacctttttttaagtaaatcttacagtggagtatattttttaaagcacaaaattggtgccaagactgggtgagaaatgtacattacccccttattattttgacggttttttttttcggggcaggggaccttacctgtaagacttttaaagattttcctccctcctgtttcaggtgggtcacattctgatgaatgtttcccttgtacagatcccagcttatggccttgacccagccgtcctcacagatgccgggtgaccctctagctctctctgcatctcccaccccccgacaccctgggaccctcgaccccacccttctttcctaccagcccagagccttgtggcttgtacagttttgaaactcccgttctattttatgatggttgataatagtcagtaacctaataaaggaacgtttgttaaaatatcaaa

SEQ ID NO: 999 - DNA, 3859 bp, Homo sapiens
  source 1..3859: mol_type = genomic DNA
cggacggggccgccccgatgggacgccgcgctccggcccctgcgcgccgctgagccgagcgccccccgctgccgagacccccgccgccaccgccagccgctgccccctcgcccccgcccgggccgggagcctcgtccccgtcccccggaaagctggatttccgaggctggaggcgcctggccggctgggtggggaccaccatgggcaacgcggccggcagcgccgagcagcccgcgggccccgccgcgccgccccccaagcagcccgcgcctcccaagcagccgatgcccgcggccggagagctggaggagaggttcaaccgcgccctgaactgcatgaacttgcccccagacaaggtccagctgctgagccagtatgacaacgagaagaagtgggagctcatctgtgatcaggagcggtttcaagtcaagaatccccccgcagcctacatccagaagctgaagagctatgtggatactggtggggtcagccgaaaggtagcagctgattggatgtccaacctggggtttaagaggcgagttcaggagtccacgcaggtgctacgggagctggagacctccctgaggaccaaccacattgggtgggtgcaggagttcctcaatgaagagaaccgtggcctggatgtgctgctcgagtacctggcctttgcccagtgctctgtcacgtatgacatggagagcacagacaacggggcttccaactcagagaaaaacaagcccctggagcagtctgtggaagacctcagcaagggtccaccctcctccgtgcccaaaagccgccacctgaccatcaagctgaccccagcccacagcaggaaggccctgcggaattcccgcatcgtcagccagaaggacgacgtccacgtctgtattatgtgcctacgcgccatcatgaactaccagtctggcttcagccttgtcatgaaccacccagcctgtgtcaatgagattgctctgagcctcaacaacaagaaccccagaaccaaggctctggtgctggagctgctggcggccgtgtgcttggtgcggggaggacatgacatcatccttgcagcctttgacaacttcaaggaggtgtgtggggagcagcaccgctttgaaaagctgatggaatatttccggaatgaggacagcaacatcgacttcatggtggcctgcatgcagttcatcaacattgtggtacattcggtggagaacatgaacttccgtgtcttcctgcaatatgagttcacccacttgggcctggacctgtacttggagaggcttcggctcaccgagagtgacaagctgcaggtgcagatccaggcgtacctggacaatatttttgatgtgggggcgctgctggaggacacagagaccaagaacgctgtgctggagcacatggaggaactgcaggagcaagtggcgctgctgacagagcggcttcgggacgcggagaacgaatccatggccaagattgcagaactggaaaaacagctaagccaggcgcgcaaggagttggagaccctgcgggagcgcttcagcgaatcgaccgccatggggccctccaggcgtcccccagagcctgagaaagcgcctcccgctgccccgacgcggccctcggccctggagctgaaggtggaggagctggaggagaaggggttaatccgtattctgcgggggccgggggatgctgtctccatcgagatcctccccgtcgctgtggcaactccgagcggcggtgatgctccgactccgggggtgccgaccggctcccccagcccagatctcgcacctgcagcagagccggctcccggagcagcgccaccgccgccgcccccactgcccggcctcccctccccgcaggaagccccgccctctgcgcccccacaggccccgcctctccctggcagcccggagcccccgcctgcgccgccgctgcccggagacctgccgcccccacccccgccaccgccaccacctccgggcactgacgggccggtgcctccgccgccgccgccgccgccgccgcctcccggaggtcctcctgatgccctaggaagacgcgactcagaattgggcccaggagtgaaggccaagaagcccatccagactaagttccgaatgccactcttgaactgggtggcactgaaacccagccagatcaccggcactgtcttcacagagctcaatgatgagaaggtgctgcaggagctagacatgagtgattttgaggaacagttcaagaccaagtcccaaggccccagcctggacctcagcgctctcaagagtaaggcagcccagaaggcccccagcaaggcgacactcattgaggccaaccgggccaagaacttggccatcaccctgcggaagggcaacctgggggccgagcgcatctgccaagccattgaggcgtacgacctgcaggctctgggcctggacttcctggagctgctgatgcgcttcctgcccacagagtatgagcgcagcctcatcacccgctttgagcgggagcagcggccaatggaggagctgtcagaggaggaccgcttcatgctatgcttcagccgcatcccgcgcctgccggagcgcatgaccacactcaccttcctgggcaacttcccggacacagcccagctgctcatgccgcaactgaatgccatcattgcagcctcaatgtccatcaagtcctctgacaaactccgccagatcctggagattgtcctggcctttggcaactacatgaacagtagcaagcgtggggcagcctatggcttccggctccagagcctggatgcgctgttggagatgaagtcgactgatcgcaagcagacgctgctgcactacctggtgaaggtcattgctgagaagtacccgcaactcacaggcttccacagcgacctgcacttcctggacaaggcgggctcagtgtccctggacagtgtcctggcggacgtgcgctccctgcagcgaggcctagagttgacacagagagagtttgtgcggcaggatgactgcatggtgctcaaggagttcctgagggccaactcgcccaccatggacaagctgctggcagacagcaagacggctcaggaggcctttgagtctgtggtggagtacttcggagagaaccccaagaccacatccccaggcctgttcttctccctctttagccgcttcattaaggcctacaagaaagctgagcaggaggtggaacagtggaaaaaagaagccgctgcccaggaggcaggcgctgataccccgggcaaaggggagcccccagcacccaagtcaccgccaaaggcccggcggccacagatggacctcatctctgagctgaaacggaggcagcagaaggagccactcatttatgagagcgaccgtgatggggccattgaagacatcatcacagatctgcggaaccagccctacatccgcgcagacacaggccgccgcagtgcccgtcggcgtcccccgggccccccactgcaggtcacctccgacctctcgctgtagccgctatttctgcaggtggattctgcaggggtgtggggccgtggacaggctgaggctcaaggaaggtggtcctcagctcggctggccgggcagcccctcctccgctgtggcccgcctcaaacgggctggtgcatcctcctcttggccacagagggcagcatcgcccgccccttcccccaaatgctgcttgcagcacccaccctaaagccccctccaaatagccatacttagcctcagcaggagcctggcctgtaacttataaagtgcacctcgcccccgcaagccccagccccgaggaccgtccatggaccttatttttatatgagattaataaagatgtttgc

SEQ ID NO: 1000 - DNA, 743 bp, Homo sapiens
  source 1..743: mol_type = genomic DNA
gggtccgttggggcagaaccatggaggaaaagccttcgaaagtgtcgctcaagtcttccgaccgccaaggctcggacgaggagagcgtgcatagcgacactcgggacctgtggaccacgaccacgctgtcccaggcacagctgaacatgccgctgtccgaggtctgcgagggcttcgacgaggagggccgcaacattagcaagacccgcgggtggcacagcccggggcggggctcgttggacgaggggtacaaggccagccacaagccggaggaactggacgagcacgcgctggtggagctggagttgcaccgcggcagctccatggaaatcaatctgggggagaaggacactgcatcccagatcgaggccgaaaagtcttcctcaatgtcatcactcaatattgcgaagcacatgccccatcgagcctactgggcagagcagcagagcaggctgccactgcccctgatggaactcatggagaatgaagctctggaaatcctcaccaaagccctccggagctaccagttagggatcggcagggaccacttcctgactaaggagctgcagcgatacatcgaagggctcaagaagcgccggagcaagaggctgtacgtgaattaaaaacgccaccttgggctcgagcagcgacccgaaccagccccgtgccagcccggtccccagacccaagcctgaccccatccgagtggaatttgagtcctaaagaaataaaagagtcgatgc

SEQ ID NO: 1001 - DNA, 5157 bp, Homo sapiens
  source 1..5157: mol_type = genomic DNA
gcatcatggaatgatataaaaatgcagctttccaatcacactaagggtctctctatttcttctcttgaccaccaatcaggaacctttgctggaagcttgtttctgattggtgaaagtaagccataacagtggaatgccaaggagtaaatacaaaagtgtagcaacaactgagtttgctgtctcactaccctcagcctaggccaacctggactccttcaccccaaatgaggtgaccgctacattttatatgaagacactgatttaccattcaactgtgatccatcttataacatggcaatccaatacagacaggaagataaaactcaacaacagctaaaataaagtgtattcccaggtaaaatagacaagtgctttaatttgaaatggattcgtccgatgagtgtcagttacaagggcagagaaggtaccagtgcagaagagctctgactgtgggcagtgtcaccaggtcccactaagtggcaacacttgtgctgggtgacttgacccatcttgatgtataaacccatagccagacaggacgtgcaaacaggtctcatggtgaatgcgatgctgtggaaaatgacatggagaatggctgtctctcagctagggaggagggtcttggtgtcctagtaaagaatgttcacgtcctggagttggtggttggtgttctatctaggcgatgagagaaggatgcttttcctaatgagcacctggtgggaatagagtctctctttgcacttcgctggaggaagaaatttctaccacttattttttcttcttgcttatagaatacacattgcagaaaaaggatgaagttgaccagtgaaaagttgcccaagaaccccttttatgcctctgtatctcagtatgctgctaaaaaccaaaaatttttccagtggaaaaaggaaaagactgattacacccatgctaatttggtggataaggcattgcagctcttgaaggaaagaatactgaaaggagacactctggcatatttcctacgaggtcaactatattttgaagagggatggtatgaagaagcattagaacagtttgaagaaatcaaggagaaagaccatcaagcaacttaccagctaggagtgatgtactatgatgggctggggaccactctagacgctgagaaaggggtggactatatgaagaaaattcttgattctccatgtcccaaagcaagacacttaaaatttgcagctgcttacaacctcggaagagcttattatgaaggaaaaggtgttaaacgatcaaatgaggaagctgaaagactgtggcttatcgcagcagacaatggaaatcccaaagctagtgtgaaggctcaaagtatgctcgggctgtattactcaaccaaggagcccaaggagttagaaaaggcattttactggcattccgaagcatgtggcaatgggaatctggagtcccagggtgcacttgggctcatgtacttgtatggacaaggcatccggcaggatacggaagctgccctgcagtgcttaagagaagcagcagaacgcggaaacgtctatgctcaagggaatctcgtggagtattactataagatgaaattttttacaaagtgtgttgcattttccaaaaggatcgctgactatgatgaggttcacgacatccccatgatcgcccaggtcacagactgtctcccggagttcatcggcagaggcatggcaatggcatccttctaccacgcaaggtgtcttcagcttggcttgggcatcaccagggatgaaacaaccgctaaacactattattctaaagcttgtcgtctgaatcccgcattggcagatgaacttcactccttacttattcgtcaaagaatttagaccacaatgtatttcaacaaagatcatcaatgctaacacctcacaatgtgtgtatttttacagtagctatgtttggttattttgcacatcacaaattacactatcctgggtattttacaggtgacatgttacttcgttcttgaattcgtacgctgttaagttttgcaacttgaaacctagacacaaggtcaaattgctggaagagtcctcagaggtccacctcttaccctacagactggccgagaccatatcaagtattaaaaccattctatacagcaagtatcgtttatcctttcttaaacaccgagtctccaaaaatacttagtttagctttagtttagtaagttcagaagtagaaacaaacttatttaaaaccatcatttgaaagtttaattctttaaatttgtctcttagttttgtgaattttgaataataatgtttaaattttgtttcagtcatttaaaatttaaattttcagtcatttaaaattttaaaaatttaaaatttcacaaaactaagggtaaaagacatttaaagaattaaacttaaataagtgtgtgcagcatttctacttctgaagttattaaagctaaaactgcactaagccttttgagacatcctttattcttaaaaagctcataaataattggcttattacatataaacttcaaaaaagtgggttataagacattgctttagaatcttgcccctccaaatcttccctcaaagatcttaatgagtaaaacaactgctacatacatatgcagaatgtgtaataaaacaaaaagcaattgctatatgaaaatattcgtaagaaaagtaaagcaaattgtttctttgtgcttcagctcattttccatatttttaaaaccctgtggtaaaagcctcaatgaaatcatttacaagaactacaattaaatattgttaaaattagcaaaaggctttccgtatatagatgacatctatgaaggcaaaaggtgacagtaaaaacagtaagatccatatgcataagattgtacaaggctattcatttgtgaaacaaatatacatatcgaagacaggtctcagagataccttaactattcctttttttataaacatattaaaggatgtggctttattttataaatcacaaccatcccaacagtggatttaaacaagatttctttttagtaatgggaaaatgcaattaatatggaggtgatagtcactaagaactgttgaatggcagaaaagtatttgctctcgttttatgttctggcttgtctgtattgcctgaacttcattttgtctttgtgtaagggaagaaatttcaacagactcgggtttgagatatcctcaaatggtcatgtatttctgtctcaaatctcttaataccacccatgtaacattccttcaaccacttgaagatccaaattcccaactagtattctcttctccacacttaatccagttcctaaagattattattattattattattattatttttttttttttgagacggagtctcctgacctaatcttagcccggcgcagtggctcacgtctgtaatcccagcactttgggaggctgaggcgggcagatcatgaggtcaggagtttgagaccaggctggccaacgtggtgaaaccccgtctctactaaaaatacaaaaattagccgggcgtgatggcggacgcctgtagtcccagctactcgggaggctgagacagaagaactgcttgaaaccaggaggcagaggttgcagtgagctgagatcgcgcaaattgcactccagcctcggtgacaagagcgagactccatctcaaaaaaaaataaaaagaatcttaaaataggaacataataaaagatcggccctaagtaaagagcactttttaaactgccattaaagatgggtttcagaaatcataaactttgacgtgtgccatacatggtaacatgctatgcttatatgtcttctataaatccaatgcagaatttaaaatttcagtttactctagttaccataaagctaatgctctggcacaagcgagtccctgcaaactaccactgctgaggacagtagtaaaccccttgacctgagactgcggtgagtctgtaactcgagtgcattgagacttccagatcattactcttacacacacacacacacacacacatacacacacacacactccttctctaagattccttgtagctgatatctcatggaaaaatgacattttatcataaataaatatagagacaaaataatagtgatctttctcattcgcaatgtaaacttaacagctacagtttaaatgatagcatagaattatgcctaaaatagacatttcccataattgtattgtgataagttcttcaggcttgacaacttcacattgcctctcttccttgaatgtattttatctggtcttttctatatagtcttttgaaggataatttttatcaatagccaactttgggtatttttttaagtgtcaaatatcatcatggtttgaaaaaaggataaaaaagctataactaaaaaaatcttaaggataacatttggtttactaatttttaatcatttatctttcagaacttgtttcttatcaagaagttagcaggtatgatatgtatatcatacgtatataaactggcataggttacatcctagggcatgaggggagtatctttcagggattcaaatggaatttttacctgttacttgtttaattgttttgttttcaatattcttggggattagacaggggaaggtattttattactgcataatagatggtgaaacccaggaaaattaagtacttgtgcatggccccactatcaataacacaaagtctgtactctggatctcccctaatgtccctgtggtctaaacggcttgataatacaaccgagcccctgaagtagctgccctcctctttccgctcccccatctcggccctgcccatactccaagggtcagctcccatctctcctccctaatgcctcacttcaagcactaatttggctctttctgctcactaaaaatcatatattttacagatttattttgtttctggagaaggcagcaaacttttacttccctgcagaagtagttaagtacatagtgttttctctaaaaaggcatttgataaatatttgaacagcctgtagagtttcaacctctttgagatataagtatcttaaatatcatagagcactgtgattcatttttatattttattgctttgaatgctcaaactatgggaaatctttggtaaaaataaagacaataaaatcttcacaataacttt

SEQ ID NO: 1002 - DNA, 6089 bp, Homo sapiens
  source 1..6089: mol_type = genomic DNA
cagcgctggcgtcaatgctcccttcctcgggccattggagactccgttgctttttaatggcggcagcggctgctgggtgagcagctggaggccggacagtgttcgtcccatccggagaggatcgctttctcctggcgtcaccagcgctgggttggtgggggtagcttttccctctttgctcctccattcttgaagaaagaagaagatgccactgccatttgggttgaaactgaaacgcacccggcgctacacggtgtccagcaagagttgcctggttgcccggatccaactgcttaataacgagtttgtggagttcaccctgtccgtggagagcactggccaggaaagcctcgaggccgtggcccagaggctggagctgcgggaggtcacttacttcagcctctggtactacaacaagcaaaatcagcgccggtgggtagatttggaaaaacctttgaagaagcagctggataaatatgcattggaacctaccgtctattttggagtggtgttttatgtgccttcagtttctcagctgcagcaggagattaccaggtatcagtattatctgcaactgaagaaagatatcttggaaggaagtattccttgtaccttagaacaagcaattcagctagcaggcttagctgttcaagcggattttggtgactttgatcagtatgaatcccaggactttcttcagaaatttgccttgtttcctgtgggatggttacaagatgaaaaagtattggaagaagcaacccaaaaagtggccttactacatcagaaatacagagggctcacagctcctgatgctgaaatgctgtacatgcaggaggtagagagaatggatggctatggagaagagagctaccctgctaaggatagccaaggaagtgacatatccattggagcgtgtcttgaaggtatctttgtgaaacacaagaatggaaggcatcctgtggtatttaggtggcatgacattgccaacatgtcccacaacaagtccttttttgcattagagctggcaaataaagaggagaccattcaatttcaaactgaagacatggaaacagcaaaatacatttggagactctgtgttgcgcgacacaagttttacagactaaaccagtgtaacctgcaaactcagactgtcacagtgaacccaatcaggaggaggtcttcttcaaggatgtctctgcctaaaccccagccctacgtgatgcctcccccaccgcagttgcactataatggacattatacagaaccatatgcttcttcccaagataacctctttgtgcccaaccagaacggatactactgtcactctcagacaagcttggatagagcccagattgacctcaacggtcggatccgtaatggcagtgtctacagtgcacacagcaccaactccttaaataatcctcagccctacttgcagccctcgccgatgtcgtccaaccctagcatcaccgggagtgacgtcatgaggcctgactacctcccgtcccatcggcacagcgccgtgatacccccgtcctaccgccccaccccagactatgagactgtgatgaagcagctcaacaggggcctggtgcatgcggaacggcagagccactcgctgcgaaacctcaacatcggcagctcgtacgcctacagcaggcccgcggcgctggtctacagccagcccgagatccgcgagcacgcacagctcccctcgccagcggccgcacactgcccgttcagcctgagctacagcttccacagcccgtctccctacccctaccctgccgagcggcggcccgtggtgggcgcggtcagcgtgccggagctgaccaatgcgcagctgcaggcgcaggactacccgtctcccaacatcatgcggacgcaggtgtaccggccacccccaccctacccgccccccaggcccgccaacagcacgccagacctgtcccgccacctttacatcagcagcagcaaccccgacctcatcacgcggcgcgtgcaccactcggtgcaaacgttccaggaggacagcctgcccgtggcgcactcgctgcaggaggtcagcgagcccctcaccgccgcgcgccacgcgcagctgcacaaacggaacagcatcgaggtggccgggctcagccacggcctggagggcctgcggctcaaggagcgcaccctatccgcgtcggcggcagaggtggcgccgcgagccgtctcggtgggctcccagcccagcgttttcaccgagaggacacagcgagaagggccggaggaggcggagggcttgaggtacggccataagaagtccctgtcggacgccaccatgctaatccacagcagcgaggaggaggaggacgaggacttcgaggaggagagcggggcccgggcgcctcctgcacgtgcgcgcgagcctcggcccggcctggcccaggacccacctggctgccctcgcgtcctgctcgccgggcccctgcacatcctggagcccaaggcccacgtcccagacgcggagaagaggatgatggacagcagccccgtccgcacgaccgcagaggcccagcggccctggagagacgggctgctgatgccctccatgtcggagtccgacctcaccacgtcaggccgctaccgagcccggagggactctctgaagaaaaggccggtgtcggaccttctctctgggaagaagaacatcgtggaagggctcccgcctctagggggaatgaaaaagactcgagtagatgcaaaaaaaattggtcctcttaaactggctgccctaaatggactctccctatctcgagtgcctctgcctgatgaaggaaaggaagtggctaccagagcaacgaatgatgaaaggtgtaaaattctggaacaacgattagaacaaggaatggtattcacagaatatgaaagaattcttaagaaacggctagttgatggggagtgctcaacagcacgactccctgaaaatgcagaaagaaatcgattccaagatgttcttccttatgatgatgtgagagtggagttggtcccaactaaagaaaacaacactggttacatcaacgcatcacatattaaggtctctgtcagtggaatcgaatgggattatattgccacacagggaccattacagaatacctgtcaagatttttggcagatggtatgggaacagggaattgcaattatagcaatggtgacagcagaagaggagggtggaagggagaagagctttaggtactggccacgacttggttccaggcacaacactgtcacctatggaaggtttaagatcacgacccggttccgcacagactctggctgctatgccaccacaggcctgaagatgaagcacctccttactgggcaagagaggaccgtctggcacctccaatacacagactggcctgaacatggctgtccagaagacctcaagggatttttatcatatcttgaagagatccagtctgttcgacgccatacaaatagcacaagtgatccccaaagccccaaccctccgttgttggtccactgcagtgctggggtaggaaggactggcgtggtgattttgtcggagatcatgatcgcctgcctggaacacaatgaggtgctggacatcccgagagtgctggacatgctgaggcaacagagaatgatgctggtgcagactctctgccagtacacatttgtgtacagagtcctcatccagttcctgaaaagctccaggctcatctaagctcccacaatttcttacggggccagtcatgtgaagcgtttacagcttaaaaaaaaagcgcttgcctaactcatactttcccgttgacacttgatccacgcagcgtggcactgggacgtaagtggcgcagtctgaatggcggcacgctgaaggaaacgtgcgaagcacaggctgaagaggggtttctaacctgggaaaggtgctcaaggaggacttggtttcaagggccttgccctgccccggtctgtccggtttgcagtacttgcacacattttggagattgtattttctagacaattctctattttactgaagctatgctgggcaattctggcaatcattaaagtgcatagatttctatcttaaactaatttttgataatggagtttttattttatgacaaatatttagggatttttctagtgagaaacaactttgtgtaaggatgatccacagatatgagttgctcctatataactttgtatttaaaaatcatgttattatcttttgttattttttaaaaaccttgggtacttaataatggtttagttgccaaactgaaaactatactgagaatctgtgttattttgaaacatcaaaaggatttttctatccagaacattttttatcctaaaaattctatatagttgtaccttctgtttttcaaatgagagctcaattcatttagatactgaaatgagtcagttaatgtaaagttgaggatgaaggcacattatttaaaatgtaagagaataagcattattttttcagtattattcatagatctaaatgaatttgattttattggttgaaaatgaagtgaaaaacaattgcctagggtggttttaagcacttttttgttaaaaacaaatctgagttttaatatatgtgttgctttgtagatgacacaataacaatgggcgctgagaagcgttttgggagagattaaggactaagagtatgtaagatgactaggacaagagtaggtggagtgtgatggtaaatgcaggatgccttcgtctttacaaaaatgcagtattatctatactcagactgaggtgctgggatggcgagcaggggaccccacagcactgtccccagggaattcaagtcctgtgaccgccagtgacttactccgtttccttggggcttttcccacctcaacctgtattgtttctttttcataaataaattcagcattatagtatcattaaaagaagccttaaagaggcgtatttttccttttggttgaaggaagggaatagttaataatagttttcacctcttctcccaaaaagtacagtccaaatttgtgcacagagattgctgtggtattcaagaggtacttgcattttagctccttaataattccctggccagtgttagctgtttagtgccccctcacccatcccatttaggcacatcccaatagacagagccaggctgagttacagggggagagtgtcatctctggccccgattaagatggccttgtcacagtgaccgctgagtaggcatggatgagtgggatatttagctgaggaaccctttcccttttccttctttttggggtctcttcttacagtgaacttccaaaatgtcaaatctagggctgtttcccaaattacactattctaggcatcattttgattcccatgtcactccttaactcacttccttgagcactacatgtatgttgtcagccacgagacaggacttcctaaatagtgtgtgcaccagcctaactctgccttacccagaaaccaaccacctaagaggaaaactcagaagatattaatgaaaactaattgaaagtacgcacacttctcatgtaggaacaaaattaaaattttacatttttattttacaaaattaaaaaattacattttgtaggaacaaaatgtaaattttgtaaatacaaaattctttttaaagtcctgtttaaagaacagtagaactaagtgaaaatattcagaacgagctccttagaagaaaggaataagaactttttactggaactattttccatctctagaaaaagtgcttcttcccctccccctccctctccatggtacgtttttgtgaaaatgcttttctgtcaggtttaaacaaacagtttgacatagctcgttgacaagaacatattgtaaaacaaatctaattaaagagtaatatgtggtctatttgtgttcctgttgtaataatttgataagtaaacttctgagggcaaaattactgtttaatattactcttaaaatgttgcatgtttggcgtcattcctaagagccatgtaattttaaacttttaattgcagttagtgaatatgaaaggatttctgaataaaaatctatccacatta

SEQ ID NO: 1003 - DNA, 2815 bp, Homo sapiens
  source 1..2815: mol_type = genomic DNA
cacgccggcgctccaggcgcggcaggctgccgcccccggaagtagtgggtaccgggacgccgtgaggcggaagctgtgtatggcgggaggctgtggcggtcccttggtggggaagctgttgctgttgctagacgacgggaactagctctcgtcacttcctcagcccgccgtctgcccactcctctagccggaacctgggggcccggagccggggtaggcacagagttgtcctcggaggtccaggacagcggccagcccggcggcgggagtcagggccacgccacctgcagggaagaacccgagtcgaagcgggaagatggctgcagacaagcctgcagatcagggagcagagaaacatgaaggcacaggtcagtcctctgggatcactgatcaagagaaggagttatccaccaatgctttccaagctttcacatctggaaattatgatgcctgtctacaacaccttgcctgtctacaagatataaacaaagatgattataaaataattttgaatacagcagtagctgagttttttaaaagtaaccaaacaacaacagataatttgagacaaacacttaaccagctgaagaatcaggtccactcagctgttgaagaaatggatggattagatgatgttgaaaacagcatgttgtactataatcaagcagtcattctttatcatctgcggcagtatacagaagccatatcagttggtgaaaaactttatcagttcatagagccttttgaagaaaaatttgcccaagcagtgtgttttttgcttgtagacctgtatatattaacctaccaagctgagaaagctttgcatcttcttgctgtcctagaaaaaatgatttcacagggtaacaataacaaaaatggaaagaatgagactggtaataacaacaacaaagatggatctaatcataaagctgaaagtggagctctaatagaagctgcaaaatcaaagatacatcagtacaaagtacgagcttatatccaaatgaagtctctgaaagcatgtaaaagggaaatcaagtcagtcatgaatacagctggaaattccgcaccctctctctttcttaaaagcaattttgagtacttaagaggtaattatcgaaaagccgtgaagctattaaatagttcaaacattgctgagcatccaggattcatgaaaacaggtgaatgcttgagatgcatgttctggaataaccttggttgcatccattttgccatgagcaagcacaatttgggaatattctactttaaaaaggctctgcaagagaatgacaatgtctgtgcacagctcagtgcaggtagcactgatccaggtaaaaaattttcaggaagacccatgtgtacgttactaaccaataagagatatgagttgctgtataactgtggaattcagcttcttcacattggaaggcctcttgctgccttcgaatgtctgattgaagctgttcaggtttatcatgcaaatcctcgcctctggctacggctggctgaatgctgcattgctgccaataaggggacttctgaacaagaaactaaaggccttcccagcaaaaaaggaattgtacagtctattgttggtcaaggctatcatcgtaaaatagttttggcatcacagtctatacagaatactgtttataatgatgggcagtcttcggccattcctgtagccagtatggagtttgcagccatatgtctcagaaatgccttgttgctgctacctgaagaacagcaagatccaaagcaggaaaatggggctaaaaatagtaatcaattaggtgggaacacagagagcagcgaaagcagtgaaacttgcagcagtaaaagccatgatggagataaattcattccagctccaccttcttctccattgagaaaacaggaattagaaaacttaaagtgctccatacttgcttgcagtgcctacgtggctctggctttgggtgataacctcatggctttgaatcatgcagataaacttcttcagcagcccaagctgtcaggatctcttaagtttttgggacatttatatgctgcagaagccctcatctctctcgacagaatatctgatgccattactcacttgaacccggagaatgtcactgatgtctccttagggatctcttcaaatgagcaggaccaaggatcagacaaaggtgaaaatgaagcaatggaatcctctggtaagcgggcccctcagtgctaccccagttccgtcaactctgccaggactgtgatgctgttcaaccttggcagcgcttactgcctgaggagcgaatatgacaaagcccgaaagtgtctccaccaggcggcttcaatgatccatcctaaagaggtgccccctgaggccatcttgctggcagtctaccttgaactgcagaatggtaatactcagctggccttacagatcatcaaaaggaatcagctgctccctgcagtgaaaacacactctgaagtgagaaagaagccagtgtttcagcctgtccacccgatccagcccatccaaatgccggctttcaccactgtgcagagaaagtgatacttcacttttggaaaactgttacctgagacccaggggagaatttactggccattttagttgtatcacagcagaatgaataaaagatggtgaaggctgttaattttgagtcaattctacccctgacatttggccaaaagcttacttaaaattaaggatttactaagtcatcatcagctgtttttcttaatttcagccagactattaattttgagccattatgtaatatatgccataggcaattaaaacataattttatcagaa

SEQ ID NO: 1004 - DNA, 876 bp, Homo sapiens
  source 1..876: mol_type = genomic DNA
ggcagcctcacgctcggctccagcggccaagagccggagaaagtcctgctggtgggcggccgcggggctgagggcgtccggcatcccggggccgctccggcccgggcggcgagagtgcccggcggtccatgcatccgccgccgcccgccgccgcgatggatttcagtcagaacagcctgttcggttacatggaggacctgcaggagctcaccatcatcgagaggccggtccgccggagcctcaagacaccggaagaaatagaaagattgacagtcgatgaagacctcagtgatattgaaagggctgtttatctgctcagtgctggtcaagatgtccaaggaacaagtgtgattgcaaatctcccatttttgatgcgacagaatcccactgagacgcttcggagagtgttgccaaaagtcagagtccatgaggatgcacacttatttatccagagagtatggatctcacatatgtttgtccagagggtgtgactctgtggaggagaacacttactgtggacagtcccagatgttgaagtcagcacaacaagagaaaaacccaaatcctgataagacttgaggatttttcgaaaattaaatgcaaaatagttggggcaaatgttgctgcgggagtcaagactaagtaatacagtaagaagatatgaagttggagagcttctcatgttcttcctttgtataaagtttgcatacgtacaaaacccaggactttaatgactttaagagggggcagaattgcatctcttggaagttaacagactcatgtgaactggaatgtacgttgtggccctcacaattgattttaatatttatttgcaaagtcctttctgtttctaaataaaagctgtgccttctgaaa

SEQ ID NO: 1005 - DNA, 1790 bp, Homo sapiens
  source 1..1790: mol_type = genomic DNA
atggaaacaagagtcttcccctcccacatgggaggaaaattcagtttcagctcagctagggatttagtcttactaaagacgcgggaggaagttctccagcgagcagctttccccaacgtggaaaggaccacgcaaggacacctgagctttccaacagatgttcagcgccaggggatccacaggtgggtgcacctgtgtggaagtaaagctgttgcttattctgggagccgaatccgaggcggagggaggtgggcgcggggctatttaaacgttggcggagggcgggctgggtcgctgcgcgtctgctcctccttctcacgtttctcctgccgtcctaatcccgccttggccatgagggagatcgtgctcacgcagatcgggcagtgcgggaatcagatcggcgccaagttctgggaggtgatctctgatgaacatgccatcgactccgctggcacctaccacggggacagccacctgcagctggagcgcatcaacgtgtactacaacgaggccagcggtggcaggtacgtgccccgcgctgtgctcgtggatctggagccgggcaccatggactctgtgcgctcggggcccttcgggcaggtcttcaggccagacaacttcatcttcggtcagtgtggggccggaaacaactgggccaagggacactacaccgaaggcgcggagctgatggagtcagtgatggacgttgtcagaaaggaggctgagagctgtgactgcctgcagggtttccagctgacccactccctgggtggggggactgggtctgggatgggtacccttctgctcagtaagatccgggaggagtacccagacaggatcataaacacattcagcatcctgccctcgcccaaggtgtcggacaccgtggtggagccctacaacgccaccctctcagtccaccagctcatagaaaacgcagatgagaccttttgcatagataacgaagctctgtatgacatatgttccaagaccctaaaactgcccacacccacctatggtgacctgaaccacctggtgtctgctaccatgagtggggtcaccacgtgcctgcgcttcccgggccagctgaatgctgacctgcggaagctggccgtgaacatggtcccgtttccccggctgcatttcttcatgcccggctttgccccactgaccagccggggcagccagcagtaccgggccttgactgtggctgagcttacccagcagatgtttgatgctaagaacatgatggctgcctgtgacccccgtcacggccgctacctaacggcggctgccattttcaggggtcgcatgcccatgagggaggtggatgaacaaatgttcaacattcaagataagaacagcagttactttgctgactggctccccaacaacgtaaaaacagccgtctgtgacatcccaccccgggggctaaaaatgtcagccaccttcattgggaataatacggccatccaggaactcttcaagcgtgtctcagagcagtttacagcaatgttcaggcgcaaggccttcctccactggtacacgggcgagggcatggatgagatggaattcaccgaggccgagagcaacatgaacgacctggtgtctgaatatcagcaatatcaggatgccacggccgaggaggaggaggatgaggagtatgccgaggaggaggtggcctagaactctccttttctaggtaaaggggggaagcagtgtggattctttactgtgttctgacagccatgtgtcactatacgcttgttaatttgtgtcttcacatctcc

SEQ ID NO: 1006 - DNA, 915 bp, Homo sapiens
  source 1..915: mol_type = genomic DNA
atggcgaagattgagaaaaacgctcccacgatggaaaaaaagccagaactgtttaacatcatggaagtagatggagtccctacgttgatattatcaaaagaatggtgggaaaaagtatgtaatttccaagccaagcctgatgatcttattctggcaacttacccaaagtcaggtacaacatggatgcatgaaattttagacatgattctaaatgatggtgatgtggagaaatgcaaaagagcccagactctagatagacacgctttccttgaactgaaatttccccataaagaaaaaccagatttggagttcgttcttgaaatgtcctcaccacaactgataaaaacacatctcccttcacatctgattccaccatctatctggaaagaaaactgcaagattgtctatgtggccagaaatcccaaggattgcctggtgtcctactaccactttcacaggatggcttcctttatgcctgatcctcagaacttagaggaattttatgagaaattcatgtccggaaaagttgttggcgggtcctggtttgaccatgtgaaaggatggtgggctgcaaaagacatgcaccggatcctctacctcttctacgaggatattaaaaaagacccaaagcgggaaattgagaagatactgaagttcctggaaaaagacatatcagaggaaattctgaataaaatcatctatcacacctcctttgatgtaatgaagcaaaacccaatgaccaactataccactttgcccaccagcattatggaccactccatctccccttttatgaggaaagggatgcctggagactggaagaactattttactgtggcccaaaatgaagaatttgacaaggactaccagaagaagatggcaggaagcaccctaaccttccgcacagagatctga

SEQ ID NO: 1007 - DNA, 500 bp, Homo sapiens
  source 1..500: mol_type = genomic DNA
caaggacaacctccacaaccaacaccatgtgtggcagctactacggaaactactatggcacccctggctatgggttctgtggctatggaggcctgggctatggctatggaggcctgggctgtggctatggctcctgctgtggctgtggcttccgcagactgggctgtggctatggctatggctcccgctccctctgtggctatggctatggatgcggctctggctctggctactattattgaggatgccatgggagactctcaccctctatcctgtgatactgagattcactaattctgaagcccacatgttctgagattttcccttgagtgatgatatcctgcaatggaagtctaatatggtctgttgttgagctaccatctaacctacaaatatcttgaatttccatcatgaaacgggataaggtaaaattcacctgtcagttctcctttcatcagaatgatggtgtcacatcatctgccttgatgacttttatgatg

SEQ ID NO: 1008 - DNA, 3087 bp, Homo sapiens
  source 1..3087: mol_type = genomic DNA
tgccagtcatcccaatggctattttgttttgcagaccacggtgtgaacacatgaacagaagacgaaaatttcttctagcctcagtacttgctctccagaattcaagttttatatatccatcatgtcagaagtgcttctctaggataatcctggtctccaaaagaattttgaaaaccaacctggacaaggttcagatgccagtaacttcttacagcaatgctctgaccacaaaagaaaagccaaagcactagtggcttgccagattgttctaccagacccaggtattgcaggctttactgtcattgactacttccatcaacttttgcagacttttaatttcaggaaacttcagtgtgactctcaggcacctaacaatcacttacttgctttagatcactcaaatagtgatctcagcagcatatatacttctgacagcacttctgattttttcaagtcctgcagcaaggatactttttcaaaattctggcagccatcacttgaattcacttgcattgtttcacaactaacagataatgatgatttttcagcttcagaacaaagtaaggcctttggtactcttcagcagaacagaaagtccatctccattgcagaggccactggttccagtagctgccatgatcccattcaggattcatggagccttgtttcatatatggataaaaagagtacagcagaaaagttgggtaaagaacttggcttacaagctaaggagctgagtgcagttcacagcagtcatcatgaaattggagttaatgactctaatttattctctttggaaatgcgagagccccttgagtcaagtaatacaaaatccttccacagtgcagtggaaattaaaaataggtcccagcatgagctaccatgttttcagcatcatggtatagataccccaactagccttcagaagagatctgcatgttgtccaccttcgttactcagacttgaagagacagccagcagttcccaggatggtgaccctcaaatttgggatgatctgccattctctgaaagcctgaacaagtttctggcagttcttgaaagtgagattgctgtaacccaggcagatgtcagtagtaggaaacatcatgtagataatgacattgataaatttcatgcagaccacagcaggttatctgtgactccccagagaactactggagccctgcatacaccacctatagctttaagatcatcacaagtaatagtcaaagcaaactgtagcaaagatgacttccttttcaactgtaaaggaaatctaagtcctagtgttgaaaaggagtcacaaccagataacaaagtagaggctgtctctgtaaatcataatggaagagatatgtcagaatattttttaccgaatccttacctgtcagctctgtcttcatcttcaaaagatttagaaacaatagttactcttaagaagactatcagaatctcaccacacagggagagtgaccattctagtctaaataacaaatatttgaatggatgtggagaaatatcagtttcagaaatgaatgaaaagttgacaactctgtgttataggaagtataatgatgtctctgatctttgcaaattagaaaataaacaatattgtaggtggtccaagaaccaagatgacagttttacaatttgcaggaaacttacatatcctttagaaactctttgcaatagtccaaatagaagtacaaatacattgaaagaaatgccttggggacatatcaataacaacgtaacacagagctattctattggttatgaaggtagctatgatgcctctgctgatctctttgatgatattgctaaagaaatggacattgcaactgagattaccaaaaaatcacaggatattttgttaaaatggggaacatctttggcagaaagtcacccttcagagtctgatttttcactgagatcactttctgaagacttcatccagccttcacaaaaattatccttgcaaagcctatctgactctaggcattcaagaacatgctctccaacacctcattttcaatcagattcagaatataattttgaaaatagtcaagactttgttccatgttcacagtcaactccaatttcagggttccaccaaacaagaattcatgggataaacagagctttcaaaaaacctgtattttattcagatcttgatggtaactatgaaaaaataaggattttccctgaaaatgacaaacagcaagccagcccaagctgtccaaaaaatataaaaacacctagccagaaaatcagaagccctattgtatctggtgtttcacaaccagacgttttcaatcactacccttttgctgagtgccatgaaactgatagtgatgaatgggtccctcctaccacacaaaaaatatttccttcagatatgcttggattccaaggcataggtctagggaaatgccttgctgcctatcatttccctgatcaacaagagttaccaagaaagaaactgaaacatattagacaaggaaccaataaaggtttaattaagaagaaattaaagaatatgcttgcagcagttgttacgaaaaagaaaactcataaatataactgtaaaagttcaggctggatttccaaatgtccagacattcaagtcttagcagcacctcagctgcaccctattcttggacctgattcttgttcagaagtcaaatgttgccttccattttcagaaaaaggcccaccttcagtgtgtgaaactcgaagtgcttggtcacctgaattgttttcataaaaagtcacctgaacccaattcctgaacttttaaatctgtttggaaatgtttgccttcaggggtacggaaagcattctttacattttgaacacttggagagaagcaaattgaaaacaggactctgctgggagctactgtgccttttaaaatataaagccattgttttccccagggttttatctagaatactatgattaggtagttgagcactttatcttatactgtttattgtactttaataatattgttaagattgtttttgaaagtattaatgtttgttaaaatcacatatacatccagaaataaagactttgcaaacc

SEQ ID NO: 1009 - DNA, 491 bp, Homo sapiens
  source 1..491: mol_type = genomic DNA
caagttccttctgctccatcttagggctgtttttactctgtcctcagccctccttctaacacccccacatagagaccttaattcaaactaaggtaagaaatgattgtctttatttcctgaaggctttttgaaagcaaagatgagcaacactcaagctgagaggtccataataggcatgatcgacatgtttcacaaatacaccggacgtgatggcaagattgagaagccaagcctgctgacgatgatgaaggagaacttccccaatttcctcagtgcctgtgacaaaaagggcatacattacctcgccactgtctttgagaaaaaggacaagaatgaggataagaagattgatttttctgagtttctgtccttgctgggagacatagccgcagactaccacaagcagagccatggagcggcgccctgttctgggggaagccagtgatccagccccaccaaggggcctccagagaccccaggaacaataagtg

SEQ ID NO: 1010 - DNA, 4089 bp, Homo sapiens
  source 1..4089: mol_type = genomic DNA
tgtccggaagtcctgagagggaaacgcccgcaaaggctggtttttaagcgggagcatctcttcactcgcagcaagtgcgcgtgcgctgcctctcagcccaaattggaaacatggccgtacggtcgctgtgggcgggccggctgcgggtgcagcgcctactggcctggagtgccgcgtgggagagcaagggatggccgcttccattcagcactgccacccagagaactgctggtgaggactgccgttctgaggaccctcctgatgagcttgggccccctcttgctgaacgagccttaagggtaaaagctgttaaactggagaaagaagtccaagatttaacagtgagataccagagagctatagctgattgtgaaaacataaggaggcgaacccagagatgtgtggaagacgccaagatatttggaatccagagtttctgtaaggacttggtggaggtggctgacattttggagaagactacagagtgcatttctgaagaatcggagcctgaggaccaaaagctcactctggagaaggtcttccgagggttgttgcttttagaagcaaagctgaaaagtgtgtttgccaagcatggcctggagaaactgacacccattggtgacaaatatgacccccatgagcatgaactcatctgtcatgtgccagctggtgttggggtgcagcctggcaccgtggcattagtaagacaagatggctacaaacttcatggccgcaccattaggcttgcccgagtggaagtggcagtggagtctcagagaagactgtgaagaggccatcaggaactggatgttctcccagagcgcagtcacctatgtttcttttatttattaaactaggtttgtattgtacatgaggtacttcatgtgatatgttttggatttagtcatattggctttatttctaagatattctattgatttaatgtgacctgtttggtctcatcagaagtcttaccattgggcatttgaacagtgtgacaggtgttccaatggcctttatcaaaacatgtttaggaaaattggtactgtgataaatttgaatccaaaatccttttaactatgggttttcaactacatgtttcttcctagcggtctctataacaggaattgtgtagtatcttgtattttgtggaaaaaggagatggtagggattggttcaacatttgggtacttagaggataaagcttcgtggtcgtataaatttagatcatttggattgatttttatacacatagattttcaggactttaccttttgttttgtttttttccttttagccatcttttgttcttgtaatcccaactagataggctttatgctcacatcattgtcccatacccacccctttctcatccccatttgcaggggctaaaggtctagatgagacttggaaggcaaggagcatcgaaatttgagatacccaggaccctttcaagcaagaatggccaaaaagccttgtgctgtctttgctcttcaaattattttcagcctccttgtcatataatcatttcaggcaaactgaggcaacactaacagctaatgacccagatggctctatttgggtaatttacctacaacttattccaccagcctttactcctctgcccttttgtcaattttaccttataatcctttattaaatgatgggaggtggtgatcaggacaaaagtgttaggttcccatgatttctcatttcatttattaatagttaatgctgaatttttttttaagtttcctctggctctatttatgttactttttgcgataagaacacttaacataagtattctctcctcttggcaattttttttttttttcctgtgttgcccaggctgacctccaactcctgggcccaagcaatcctgcctcagcctgccaagtagctaggactacaggcgttcaccactgcgcccgcaaagtttttttgttgtttttttttttaagttggtactcacaaatcactacctctgttatattgacaagctctatttcctattctttgtatctgttaagtcacatctgtgtaaacattgagctcaccttttatatattaacctctagaattaatgggcctatgtggttttttttcagtcttatagctggtgttctgtaaaagatttgtccaataaacgacttaatgaatgatacatcagtcagattttaggaaggcagtcaattatggatattttaatgttggaagaggccttaatgatcaaatctcaccctttctgcttctgaagtatgaaaatctagtctttttaggactggacacaaggaaaataatctctaaactattgactaaattccagtgagagtatgaatgaagaacaactagatattaatgtcaatcatttaagattaatgggcatgcaattaagtctccatttaagattaatgggcatgcaatgaagtctccagcagacaatcagatgttgttggatgtctagattatataggtttaggttgaagttataaaataaaataaaattcattttccactggaactctatgacattcagtggagtggtggaaagttaacctcttatacattatagataattctaagacagcacacaaacttatcaataaagccatctccttgtgggccttaccatcttcatcagatttagacccttaaaaaacaagtaaatatgcacttttaaaatgcaatcaaaagactggtggttaagcttgtaaaaccagaacatcttttggcattccactaagtatatattgtaaatttaatgaacaatcaaggttcacaataggaagttgtctttttttgccttccattctgtgagatttgacagatggtgacaataagaaaatgagctgattgtaattactctctgtgtgtttttttattgctagctatcattaccagttagaattaacattaattacaattaacaataattttaggtatggaatgttatgattacctaaagagatgtctctacctaatgagctcaagtgatcctcccacctcagcctaccaagtagccaggaccacaggcaagtgcaccaccatgactggctagttttgttttttggtttttggtttttggtttttggttttttttttttggttggttggttgttttttacaggcggggtctcactatattgtccaggctagaagaattttctaatggtctattacacctcccgttttggcaagtaaattcagaataattttaggttcttttgttattcagtagttttgcagacttaaaagtgtaaatttagaattagaagatgaagctatagtagtaagaatctcaagctgaagggctttggggagccaaagcagcatattagagcataggcttgaacttaaatctcagctcagtcacctgcaggactttaggcaccagtgatttcacccttctgagcctgtttctttattcgtaaaatgattataataattctttcacagcgttgtgaggattaagtgaaatgtgttaaatgcctactacagtaggtgctcagatatttatttttatttttttattatgcacattgtttttcctgcctttttatggctgtctaaagtctagggaaaagggaagactggttaatgatgagtagaaaaaacttgtaagctaatcattcactgacttattttccttccattttctggtttttaaaattagccacaccacaggaaacccacatttttagatggaaagagcaagaaaattgtgtcagtgctcttagttattttcatcttaatggtatagtgaaaagacattgacttgagatgatactaaggaagctttggctcactctcacttgaagaggggatcttggtgttgtagtacttggactgtacaaatgttttactgacttttcttactgctgtaaaggaatcaggcagttgggtattgatatgttatttggtgctctcattcatggcaaaggatttgataaataaaagttctttaaacactaaagcaaaatcaaatgagcaaaactaaggatgaaatgtaatattcatcagaacaaggatcactgagaaaaaatattcagaaacaactttaataaaacctgaattgaaataactgca

SEQ ID NO: 1011 - DNA, 2300 bp, Homo sapiens
  source 1..2300: mol_type = genomic DNA
ttgtttaacagctggcccggaagtttaagtgaatatgcggcttgggctccaaaagttgctgtacggtattttattttaaagtagaaatctgtccgcttttcacttacggaggccttacagtgtgtgttctgtgttacttgagtttatacgcactgcagaatttgtttaccctgctcttttggaaacgtattccggaagcgaaaccctgagtaatcggaagtggttaggagtgagagagctgctggatatgcggagggactgggcgggtcggcttccgaatggaagaggtctgtgagaagttaacctggtgataccgatccgaagagcctatcaagtgaagccccctgaaatacggagaataagaatcttagaggttgttcagcagaagtcttggagtgcattttcagtggttaaggtgaaaaaatgactactaaaaatttagaaaccaaagtcaccgttacttcatccccaatccgaggagcaggagatggaatggaaactgaggaaccacctaaatctgttgaagttacctccggagtccaatctagaaagcatcatagtcttcagagtccatggaagaaagcagttccatcagagagcccaggagttcttcagctagggaaaatgctcactgaaaaagcaatggaagttaaagctgtaagaatattagttcccaaagctgctataactcatgatatccccaacaaaaatacaaaggttaagtctctgggacatcataaaggagaattccttggtcagtcagagggagttatagaacctaataaggaactctcagaggtaaagaatgtattggaaaagctcaagaattctgaaagaaggttactacaggacaaagaaggtctttcaaaccagctccgtgtacagacagaggtaaatcgtgagttaaaaaagttactggtggcttctgttggggatgatcttcagtatcactttgaacgtctagcccgtgagaaaaatcagcttattttagaaaatgaagccctaggtcgaaacacagctcagctttctgaacagttagaacgtatgtcaatacagtgtgatgtatggcgaagtaaattccttgcaagcagggtaatggcagatgagttaaccaactcaagagcagctttacagcgtcaaaaccgtgatgcacacggggctatacaagatctcctaagtgaacgggaacagtttcgtcaagaaatgatagctacccagaaattattggaggagctcttagtttccttgcaatggggaagagagcaaacttactcccctagtgtacaaccccacagcacagcagagctagcattaacaaatcacaagttggcaaaagcagtaaattctcatcttctgggaaatgttggcattaacaatcaaaaaaagattccatcaacagttgaattctgcagcaccccagctgagaaaatggctgaaacggttctaagaattttagatccagttacctgcaaagagagttcacctgataatccattttttgagtcttcaccaaccaccttacttgctacaaagaaaaatattggacgatttcatccctatactagatatgaaaatataactttcaattgctgcaatcactgccggggagaactgattgccctttaacagtcaatatgttggaggcatgctaagaataaacaactaaataactgtattagaaaaaaaagaaacttactaaatatcataatctgatgatatgtggtcctgaattggctactagtttaagcaaataaactgtaagtcatttatgggttagttggggaataaatggatatgggctggatattcggtaatatcattaatgaaaagcagattgcagaaatacagtatgatctcagtattttgaaattgtaaatacatgtacagacaaatacttagacagtatgcatactggtgttaacagtcacaatttctgggtgatgaaaatgtaacttgaaaccgctccatttctacaatgcacatttactgtttctgttataataaaagggtatgttagaaaaacaaaaaggaggctgggcatggtggctcatgcctctaatctcagcactttgggaggccaaggtgggcggatcacttgaggtctggagtttgagaccagcctgagcaacatggtgagaccccatctctacaaaaaaaatataaaaattagccaggtgtggtggtgcacacctgtggtcccagctacttgggaggctgaggtgggaaaatcacttgaacctgggagggtgaggttgcagtgagctgagatcatgccactgcactccagcctgggtgacagg

SEQ ID NO: 1012 - DNA, 2138 bp, Homo sapiens
  source 1..2138: mol_type = genomic DNA
gctgccgctactgcggagtagctgcttcccttcctcctctcccggcggcggcggcggcagcggcggaggaggaggaggaggggacccgggcgcagagagccggccggcggcgcagttgcagcgcggagcccacgggccgccggggccgctccagcgggcggaagccgagcccggggccgaccccccgcgcgcggcggaggccgagggggcgccggggcccggggcgcgcagccggggggcgggcggcggcgggcggcgggccgagcgggagccgcatgcgtgtatggatccgggcgccgcgctgcagaggcgggccgggggcggcggcggtctgggcgcgggctccccggcgctgtcgggcggccagggccgccggaggaagcagccccccaggccggccgacttcaagttgcaggtcatcattatcggctcccgcggcgtgggcaagaccagcctgatggagcgcttcaccgacgacaccttctgcgaggcctgcaagtccaccgtgggtgttgacttcaaaatcaaaactgtagagctaagaggaaagaaaattagattacagatctgggacacagcaggtcaggagagattcaacagcattacctcagcttattacagaagtgccaaggggatcatattagtatatgatatcactaagaaggagacatttgatgatttgccgaaatggatgaagatgattgataagtatgcttcagaagatgcagagcttctcttagttggaaataagttggactgtgaaacggacagagaaatcaccaggcagcagggggaaaagtttgcacagcagatcactgggatgcggttctgtgaagcaagtgccaaggataacttcaatgtggacgagatatttttgaaacttgtcgatgacattctgaaaaagatgcctctggatattttaaggaatgagttgtccaatagtatcctgtcgttacaaccagagcctgagataccgccagaactgcctccaccaagaccacatgtccgatgctgttgatttcctactttggagacaaagtggaaatgattcctggaaaggggaaaaaacgttctattctgcactacaatcattttgacaatttcctttcgcactttgtaatccaagtcagagctatacactaacttgtaaatatgcatatatgcaatcctgggtaagttttggttataagttacctatttccctccaaattattatatttcattcattaccccagtgtctagtgtacatacactgggaaacctagtacttctaatatgaagaatgggagaaatgaaaggtataatgtttcttgaaataaataatataattgtccttattaattatattatgaggacagaagatattctgataagagagaacgtggtgctttgcttaccgttttaaagaaaatttgtaaaactaaagactttttgaaaaaaagctatcttaagtgctttttctttatttacaagacatttcccccagtggtagcatctgaagtattggagtgtttctgccacgaagcaaagctccattcatggccgtcatggaaggttatttattaatgttacataatggtagaatattactagttagagggttggatttgacttggtcctaaggccacagaatctctctcatggcttcctaagggatgtacctttatgcttttaagaactacaaagattcaataaagaaagaaatgtttttgaaactatagaaaaagattttaaaacacgctgctgtcctaaacaaatcctgtttaaaggaattttaaagagatgcattttactatatcaaagaacatacgtgtatttgcctaaacactctgtacctttgtaatgataaaacttcccccttctttacggtgaagcttattctgattaagcctagactgtgttctttttttttttttttttttttttttttttttttttttttttttttggtctgatgatgaatttgtgaactctatctttggtatatcttttattaaactgcactgttttgtttagtcaaggtaattaagtaattatgtatttgaataacttggtgtgtcttgagtgttgtggtatgaaaagcattgtggtctttctacactaatgaagtgcaaataaaattttgtatttatgaatga

SEQ ID NO: 1013 - DNA, 1158 bp, Homo sapiens
  source 1..1158: mol_type = genomic DNA
atggctcttccacatgattcaaacgaaacttcctatttgctgcctcccaacaatgaggactggggcaggcaaaccattcctgactttgtttatgggcagaaggatctcatggcagaagggattcagtggccaaggaatgcacctggcatcccagatgctctgccacaatctccctttgatgctgcactctgctctgcctggaagcagcgggtggagctggggctgtttcgctaccgtctacgggagctacagacccaaatcctccctggtgctgtgggtttcgtggctcagctgaatgtggagcgtggtgtgcagaggaggcccccgcagaccatcaagagtgtgaggcaggcatttgaccctgtacagttcaacttcaacaagatccggcccggagaagtcctcttccgtttgcaccgggagcctgatctccctgggactctgctgcaagaagacatcctggtggtgatcaacgtcagccccctggagtggggccacgtgctgctggtgcctgagcctgcccgccagctcccccagcgcctgctgccgggtgcactgagggcagggattgaggctgtgctgctgagcttacacccgggcttccgtgtcggcttcaacagcctgggaggcttggcctcggtgaaccacctccacctgcatggctattacctggcccacagactgcccgtggagcaggcgccaagcgagcccctggaccctggaggccatttgcatctgctccaggacctcccagctcctggcttcctcttttacactcgtgggccagggcctgacttggagtccttgataagcagggtatgtcgggccactgattatctgactgaccatgagattgctcataacttgtttgtcacccggggagctccgccgggaaagacatcaccttcctcagccctcacaggggtccgagtaattctgtgggcccggaagtccagctttgggataaaggacggtgaagctttcaatgttgccctctgtgagctggctgggcacctccctgtcaaaacatcccaggacttcagcagcctgacagaggcagctgctgtggccctcattcaggactgtcggctgcccccatcccaggcagaagacgtacaggcagcactggtggccctgatgtcccaggaagagcaataa

SEQ ID NO: 1014 - DNA, 555 bp, Homo sapiens
  source 1..555: mol_type = genomic DNA
tgttgctacctaagccctccactcccgacaccatgctctgcgacaacttccccggggctgtcttcccaggatgctactggggcagctatggctacccgctgggatatagcgttggctgtggctatggcagcacctactctccagtgggctatggcttcggctatggctacaacggctgtggggctttcggctacaggagatactcgccatttgctctctactgattggctgaaatccccgaggtgtagcatcttctctcccttgaaggctgagccccacatctccaggttccccccgtatccactccttcagtcctcatttgctcatcaacctcagagacactgctttccaacttacctcgagtcccaggggaggaaaatgaaaaagcagacgcttcctcaagctgcctcccctggctgatgttctctgggacattttcggaaatttgacctcccacttgtcatgagctacttttgaattttccatgacactcatgacttgtgatgaagtcatggatatgtctatcaaaatctcaataaatttgtctcagctggt

SEQ ID NO: 1015 - DNA, 2356 bp, Homo sapiens
  source 1..2356: mol_type = genomic DNA
gaaccctgaagtcggtgtctgctgcgttcacggcaggattcggttaggaggaacagcacagcatgctgggctctggatttaaagctgagcgcttaagagtgaatttgagattagtcataaatcgccttaaactattggagaaaaagaaaacggaactggcccagaaagcaaggaaggagattgctgactatctggctgctgggaaagatgaacgagctcggatccgtgtggagcacattatccgggaagactacctcgtggaggccatggagatcctggagctgtactgtgacctgctgctggctcggtttggccttatccagtctatgaaggaactagattctggtctggctgaatctgtgtctacattgatctgggctgctcctcgactccagtcagaagtggctgagttgaaaatagttgctgatcagctctgtgccaagtatagcaaggaatatggcaagctatgtaggaccaaccagattggaactgtgaatgacaggctaatgcacaagctgagtgtggaagccccacccaaaatcctggtggagagatacctgattgaaattgcaaagaattacaacgtaccctatgaacctgactctgtggtcatggcagaagctcctcctggggtagagacagatcttattgatgttggattcacagatgatgtgaagaaaggaggccctggaagaggagggagtggtggcttcacagcaccagttggtggacctgatggaacggtgccaatgcccatgcccatgcccatgcctatgccatctgcaaatacgcctttctcatatccactgccaaagggaccatcagatttcaatggactgccaatggggacttatcaggcctttcccaatattcatccacctcagataccagcaactcccccatcgtatgaatctatgacattaatgctgataagaatatctcttctgcacagattgttggtcctggacccaagccagaagcctctgcaaagcttccttccagacctgcagataactatgacaactttgtcctaccagagttgccatctgtgccagacacactaccaactgcatctgctggtgccagcacctcagcatctgaagacattgactttgatgatctttcccggaggtttgaagagctgaaaaagaaaacataggtctcttaaaccaggcaactttcacgttttgggagttgagactgagcaatttctccttgtaacaaagaatctccatgaaattctgtttcatctgttaaccgtcactcagcacaacactccctctgggctctcttcctgctcctccagattctgctgctttccagttctctgttgatcctgagactaacaattggagactgaggccagagcaactggctcctggcagctgtgcttgtccgtttcctgtcagagtgatcccaggtttcctcctggcccgtcccatggtccctccacaggagtgtgagaggatgggggaagcactgtgggaagaccaccaaagatggctggacagtgggagagagcacgttgtgaagcatcccagcctcgtgttgaggttccagacttagaaacagacccctctgtacagggggattgtggtgagtgagaatcaaggccaccttgtgtgttttctcactctcgaatgcaagtgggagagggaaaatgactcgggacgccattgtaacggttcctggaagctgggccctctcattggcatatacagtactcctcgctgcagggcactgtcccaccgggatccagttgcaaagtttgtcttgacagttgaaggcctcgcttagttgtactggattctcagggagccctctgtggccttttgctttgcgtgctgtttcccttgtaccagagggcggcaccgtggaaattctgttttccctgtagcatattgtgttggattgcattactggcagagaaaggacaaggtgccattcaagtcctagggtgggcttccagctgccttaatagaagtactcaagtcttttgggtagtgagctggaaagcctacaggaaaagaggggtacctgttttcatttgaaaactttgattcatggaacctttaaaactaatctcagaaaaatttttggtgcccatgcagctgtagttgttcactgctttcctggatggatgggactcttatgtcataacttctgttactcctttggcccatagctaaggtcatccttccccacaggggtggctttgggattggatgatacagcttttgcttctgtgtagtatacctgtacatacttgtttcaggcagcctttctttaatgttttcagttggtttgtattctgtagctcagtagctgctaataaagttaaagatcctgtgtcctg

SEQ ID NO: 1016 - DNA, 802 bp, Homo sapiens
  source 1..802: mol_type = genomic DNA
aaacccgctctcgcccgcggatgggcgcgcagctgtgacgtcacggcgtcgttggtaaggggctggcggccggggagctgcgtagctcccggccccgcggccatgcccaagcggagctgccccttcgcggacgtggccccgctacagctcaaggtccgcgtgagccagagggagttgagccgcggcgtgtgcgccgagcgctactcgcaggaggtcttcgagaagaccaagcgactcctgttcctcggggcccaggcctacctggaccacgtgtgggatgaaggctgtgccgtcgttcacctgccagagtccccaaagcctggccctacaggggccccgagggctgcacgtgggcagatgctgattggaccagacggccgcctgatcaggagccttgggcaggcctccgaagctgacccatctggggtagcgtccattgcctgttcctcatgcgtgcgagccgtggatgggaaggcggtctgcggtcagtgtgagcgagccctgtgcgggcagtgtgtgcgcacctgctggggctgcggctccgtggcctgtaccctgtgtggcctcgtggactgcagtgacatgtacgagaaagtgctgtgcaccagctgtgccatgttcgagacctgaggctggctcaagccggctgccttcaccgggagccacgccgtgcatggcagccttccctggacgagcgctcggtgttcacactgaactgtggggtcgacgggaggggtgccttttacatgttctattttgtatcctaatgacagaatgaataaacctctttatatttgcacaa

SEQ ID NO: 1017 - DNA, 2972 bp, Homo sapiens
  source 1..2972: mol_type = genomic DNA
aactacaaaattgaaagtagagaggagggggcagccaatggaaaaaaaaatttgcacagcagccaatcctcctgcggcgttttgtgcctttgcccaacaggaaaatgtgtctcatgcagaggggcgttacccagtctccaatgggcgggagccggtggaacggaggagccaatgagtgcgagatgttgagtgacagctgtccaatggaggccctccgtgctagtacggcttgcggcttaagcgccgccgcggtctgcggaatgtcaactattcaacatggaggcggaggtcgataagctggaactgatgttccagaaagctgagtctgatctggattacattcaatacaggctggaatatgaaatcaagactaatcatcctgattcagcaagtgagaaaaatccagttacactcttaaaggaattgtcagtgataaagtctcgatatcaaactttgtatgcccgctttaaaccagttgctgttgagcagaaagagagtaagagccgcatttgtgctactgtgaaaaagactatgaatatgatacaaaaactacagaagcaaacagacctggagctgtcaccactgactaaagaagagaaaactgcggcagagcaattcaaatttcacatgccagatttatgaagaaatggacttggaaaggaaattctaacagagaagagcttaattccggagaaatttaggaagatgtcttgttaacccttgatgtctagagattgggggctggtgaagggggtttggcttcaatgactggataatgatatctttcatgagagagattataagaagaagggcagataatatatgaataaagttcagccaaaaggatcaaatgagaataaaacgatttaaatatatgtacacacgcatgcacacacacacttagtcttgtaatttcaggccagaaattctcaacactattttgcatctgttttctttttctaagtcatgataatatagatgttctggtctatcataaaagaatgtttatgtacatttcagtcattcggtatgtggctttgtaaattaaagtataggcaaaacatttgtgttatacatgatatataatttcattttgtaaatgttgattgcacatgtggtcacattattgttgagactgcttttatgtgacctgtagtctcccacagaacctaaagtaataagctggcttttctgtgatagccacgtttgcgtatttctttccctatttcccttgcctgctaatgttgaacagcatgaacttgctttctgatgctgttttagactgtccctgttgtatctcaataatatctttgttttccttcagcctttattactataattgttcattctacatgaaagctaggaaactgaaattagaagagcacttatctgctacttgccagttttgcgtgagtgtgttatatgtatgtgtcaatttccctttaaaataactatttattttaaaataactattggcaataaggaaactgttcaaagtagaggcagatcttgatagaaagatgttaatcacagggttgtttataatagcaatatacatacacatttggctagtactaggtgaataggaaaataaatcatgctgtatgtatacaataagaggtcaagttgccaataaattattactgttaatgttctgggaaatgctgaaactatgctaagtgggggagagggaaagcaggtattgcagttttgtagtgaagattgggctttggagtcatatctgagatgtaagtagcagcttttaaattctagctatgaccctgtgcagatcacttaacttttgagtgtcaggatgtttggaaggacaagacaggaaagtgttttaatacagggttcagtatttagtaagccttcaataagtgatattacatacatgtaataaaaactaagcattgaaaggactaggaaaaatgcatcaaatgttagttctgcaggttatagaattatacttttatgtaattttaaaatttcagttatgaacatgtttgtccattaacaaacttataatagctgaaaaacagggttgtgagaacagcttcagttaaaattgtcctgtctagtttgaatatttcaagaacagaaagcctttttttttttttttttttttttgagacggagtctcactctgttgcccaggctggaatgcagtggtacgctctcagctcactgcaacctccacctcccaggttcaagcagttctctgccccaccctcccgagtagctgggattacaggcgcccgccaccacgcccggctatttttttgtatttttagtagagatggggcttcaccatcttgaccaggctggtctttaactcctgatggtgatccacccacctcggcctcccaaagtgctgggattacaggcatgagctaccgtgcctggcccccttttttttaattacagagaaataagttacaccttagtatcagatattaattttcttcagtgttcaggcaattagtatttagaaagctcttgtcatgagatggctctgggatgtgatgatgattgttgggattgaaaaaacggtagtatcatggagagatcataataaattcttagtattaaaagtggttttgctttcagttagggagaaaaattagattgtactatttttcctctatgatttccttcagttatcttccaaatgttgttttttccccacagcccccttaacattgttctctatgcacttctcaatacattttcatttgtttctcaagcctctttgtggatgactcctaaatataacttcttccactagctctagatccgtatttccaataaaatcccctacctgaatattcaagttaaacatgtccagaatacttactgattttattgttaatagccactattctgttgtctggaattaaaacctgtataactaatttgcatccctttatcttcttagtcaataaaacctacaatcctctttctaaaatggt

SEQ ID NO: 1018 - DNA, 7043 bp, Homo sapiens
  source 1..7043: mol_type = genomic DNA
gcgcagaggcgtcacgcactccatggtaacgacgctcggcccgaagatggcggccgaatggggcggaggagtgggttactcgggctcaggcccgggccggagccggtggcgctggagcgggtctgtgtgggtccgaagcgttttactcctgttgggcgggctccgggccagcgccacatctactcccgtctccttgggcagttcccctccctgccggcaccacgtcccctctgacactgaggtcataaataaagttcatcttaaggcaaatcatgtggtcaagagagatgttgatgagcatttaagaatcaagactgtctatgataaaagtgttgaagagttgctccctgagaaaaagaatcttgtaaagaacaagcttttcccacaagcgatttcttatttagagaagacttttcaggtccgtcgacctgcgggcactatcttacttagcagacaatgtgcaacaaaccaatacctccggaaggaaaacgatcctcacaggtactgcaccggggagtgtgccgcacacacaaagtgcggccccgttattgttcctgaggaacatctccagcaatgccgggtctaccgtgggggtaagtggcctcatggagcagtgggtgtgccagaccaagaaggcatctcagatgcagactttgttctttacgttggtgctctggccaccgagagatgcagccatgaaaacatcatctcttatgcagcctattgtcagcaggaagcaaacatggacaggccaatagcaggatatgctaacctgtgtccaaatatgatctctacccagcctcaggagtttgttgggatgctgtccacagtgaaacatgaggttattcatgccctgggtttctctgctgggctgtttgcattctaccatgataaagatggaaatcctctcacttcaagatttgcagatggcctcccaccttttaattatagtctgggattatatcaatggagtgataaagtagttcgaaaagtggagagattatgggatgttcgagataataagatagttcgtcacactgtgtatctcctggtaacgcctcgtgttgttgaggaagcacgaaaacattttgattgtccagttctagagggaatggaacttgaaaatcaaggtggtgtgggcactgagctcaaccattgggaaaaaaggttattagagaatgaagcgatgactggttctcacactcagaatcgagtactctctcgaatcactctggcattaatggaggacactgggagacagatgctgagcccttactgtgacacgctcagaagtaacccactgcagctaacttgcagacaggaccagagagcagttgccgtgtgtaatttgcagaagttccctaagcctttaccacaggaataccagtactttgatgaactcagtggaatacctgcagaagatttgccttattatggtggctccgtggaaattgctgactactgccctttcagtcaggaattcagttggcatttaagtggtgaatatcagcgcagctcagattgtagaatattggaaaatcaaccagaaatttttaagaactatggcgctgaaaagtatggacctcattccgtttgtctaattcagaaatcagcattcgttatggagaagtgtgagaggaagctgagttacccagactggggaagcggatgctatcaggtttcttgttctcctcaaggtctgaaagtttgggtccaagatacttcatatttgtgtagtcgggctgggcaggtcctccctgtcagtatccagatgaatggctggattcacgatggaaacctgctctgcccatcatgttgggacttctgtgagctctgtcctccagaaacagatcctccagccactaacctgacccgagctctgccacttgatctttgttcctgttcctcgagcctggtggtcaccctctggcttctgctaggcaatctgtttcctctgctggctggatttcttctgtgtatatggcactaggaatggaaaagtggatcttcaagatattcttttatgttatgttcttgtgaacaaagcacaaagtttgagtgagtgccaacctatgcagatggtagaagtggcattcctggctttggcttggaagaattgacgaccatcagaccttgaagcagaacttcacagcagcctgtcctcatcagcaacccaaccaccttcatcagcaacccaaccaccttcatcagcaacccaaccacctcgtcagcaacccaaccacctcgtcagcaacccaaccacctcgtcagcaacccagccaccttcatcagcaacccaaccacctcatcagcaacccagccaccttcatcagcaacccaaccacctcatcagcaaaccaaccactttcatctgcaacccaaccactttcatcagcaactcaacaccttcatctgcaacccaaccaccttcatcagcaaaccaaccaccttcttcagcaacccaaccacctcatcttggagaaggagaaggaactgcaagccaccaagtcttcatttttcagggtttgtaatcttcccaaagttttcctttgaaaataggataatgggtggaattttcagagtgattacatacctcaacatttttattaacatacaacaatgggaaagttcatcatccatatactgcagtcacttaaacaacagccaattattgcaagattagaattggagatcttgtcctcaaaagtataaattgtcctttgagttatagaaaataatggaattgggatttctacatatcattattatacctattttaaatttaatggcagccaggcatggttccagctacttgggaggctgaggcaggaggatcgcttgagcccaggagttcaaggctgcagtgagctatgattgcaccactgtattccagcctgcacgatagagttagaccctgtatcttaaaaaaaaaaaaattaatggctggtatatagtaaacttaattcactgttcccattgttctaaagaatttttttaaataatgtttcattaaatcttatgatttaaccgtgcttgccctttttgccagctatgtggcagtttacggcagaactgctgtcagtgtgctggtagccctctattcatccctcctcagagcccagcttccagaactgctatcactgtgctggtagccctctgtattcatccctcttcagagctcagcttctggttgtattctccatgagtttaataatgacatgaaaaaatgtggaagccgagagagtaaaatactctgccctgtaaaaacatggaagacatgcaaacagaaaaaaaataattgtattgttttagataatacttaagacaactgtgaaacaacaaaaacacaactattcctttgtgaccgatgaagataaaaagaaattctggtaaagacgggtatgcagttttttaaaatgggttaagaaattgttgcagaagaatttctaacatctgaaaatggttttatgtttaagaaggatggtctgaattgtgtactaatagcaaggtataagtttggtgtagagcctatccagtagcgtccactgtaccacttttaagtaagactcagtccacagaagctggaagattgccttcgctttaaatatcctttaccttctgcatttgacactcctcctgttactacatagattccggtccccagaagcaattttacactggtactagagcttaccagccccatttagtaatttttaatggctagatgaggtttaacaagaatatgaaaagaaaaaagaaaaaatatattcatgaatgataggcgatgcccattctttctctcaagctaatgaagtcctatggcattctaaccacaaccctcggacagactcctcctattcctccatggcattgtaaccacaaccctcggacagactcctcctattcctccatggcattgtaaccacaaccctcggacagactcctcctactcctccatggcattgtaaccacaaccctcggacagactcctcctactcctccatggcattgtaaccacaaccctcggacagactcctcctactcctccatggcattgtaaccacaaccctcggacagactcctcctattcctccatggcattgtaaccacaaccctcggacagactcctcctattcctccatggcattgtaaccacaaccctcggacagactcctcctattcctccatggcattgtaaccacaaccctcggacagactcctattcctccatggcattgtaaccacaaccctcggacagactcctcctattcctccatggcattgtaaccacaaccctcggacagactccttctgttcctcctttcctcgtccttccctgcttttcgtccattcagcatatagctattcagtactccattgaagaaattatgctaagtgagcaaagcaacataattactaagaattaattctgattatttggcactagagccaacagcaaccccagcacagaggaaagtcgcttttttttcaaatgcataaatttaaagtatgtatttgcatgcagttttaaatgggaggtatttgtcattgtgaaaagctgggaatctcaaacatagtcaacttaactaaaaagaagctaatacaggttgagcattcctaatccaaaaatccagaatccaaattgctccaaaatctgaaactttctgaatgctgacctgatactacaagtagaaaattccacatacaagtacttaacacaaactttgtttcatgcacaaactactaaaaatattgtataaaattaccttcaggcagtgtgtgtagttatatatgaaacatgaatttcatgtttagacttgggtccatgcccaagatacctcattaggtatctgtaaatatccgaaatccaaaaaaaagtctgaaatctgaaacacttctggtcccaagcatttcagtaagtgatgctcaacctgcgtaatggtctgcgggccagtgctcattttctgcctatgttgtacatactttaaattgtgtaaattaaaagtcaaagcaaagagtctatttttaaagaaacttacaataatctaaacatatacttcttatgattatgaatcatcctgcaaagctgaatgaagaattttaccaaaaatacaatgaattaatcatatatttgagagtcacagtgataggttcgactatattttgactgttgtgtagtggcaccgtttaggtagtattgtttctgagcatggtgctttttatacttgaaatatatttttgctttattttttattgatataattatatttgcactaatggctttctgaagaaaatattatagatgacattttttgtatatatatttattaagcttgggaacctggtcgcccagtgttttctctggacaaatgtgaaactggataaagtatggataaagtcttgagttcctcagggtaactgtgttgatgtctcccgtcctcttcagtaaggcttgaatatgattttactcatcattgattctgcatagtgtacccagcaagacttagaaggacactgaacctgtcagagattttaagaggcacattttagtcactttgaatatggtagtggtgggcgcggtgactgaagcctgtaatctcagcacttcgggaggccaaggcaagcagatcacgagatcaggagtttgaggttacagtgagctgatcgcaccactgcactgcagcctggatgacagagtgagactttcttgggaaaaaaaaaaatgacagtgaagcagacttttagaatccgagatgtcattgcagaattattggtataaaattcagctgcaaagtgaagaaattgaaatggcccacacgttgatatcctgtggcaggttatacccttcatgttagcaaagacgaagccacgtcgctgtgttaagagggacaggctgggccggctgcagctgtagtggaagtgagggacacagggaaggaatggggagcagcaatttggggacagtagactggagtcactttctgactcaaaaagggtcaagtacttattaaaaactatcttggttttctgttcagacttaggctcattttgatcattttaaggtcccagttgtcaaaaatatcaagtgaatttgtctcaggttttcagaaacaaaatttacaggaaggaagcaaaagccatgtcagtagccttgagctgacagctttaaagaaactggcaaacaggtaggttgtcctcatatagatccttccagtattctgaaaaacatccttttatttcttaaaaccagtaacccttacatttttcctataggatagttatttttgttgagatcaaatagacattctataaatgttataaattatgcttgcagttactcagcctatctaggcttaaggtttatcaatatttgaagttgaaacatcatcttatgaggtttagttttaggaagataaataaatatatcaaagtatttcataaagttgtatcaatgttccttctaacattagaagacttactgactgaggccatctgtgaacgactaggtgatctcagaatccttccagctctaataccctctgactaacactcacccagaattgctgtctgtgctggctgtgatctgcctccaggagcatacgccatcctgcgtgctgtgtccatcacagtgtctgtgctcggtgccttaccactgtccgtgtccttggacgctgactggacagagaggagcctgtctctcagggcacatgagtcgtcgtggcaggaggagacgggcctcagtcacagtgtcacagacccttgtcacagtggacactagtcattcctgccatgtccttgcagcccaggaggactaaaaagattttaatgaagtctgtgttactcattctgaagaaaagaacttacctgagaggagtaatatttttttaatatatattgggtcagggacagggatggagtggttgttttatgtttacatttttaataagtaaaatagaagatttaagaactaatatttatggtattgaactttaagtgtgatatattccttagaaaaacacaactttaataaaaatggaaactaa

SEQ ID NO: 1019 - DNA, 592 bp, Homo sapiens
  source 1..592: mol_type = genomic DNA
actccgccagggggcgctgtgtggctcccgagtaggctcagagcgaccgtggccgggcggaagcggctttctggcctaagctttaacaggcttcgcctgtgcttcctgtttcctcttttaccaaggacccgccaacatgggccgcgttcgcaccaaaaccgtgaagaaggcggcccgggtcatcatagaaaagtactacacgcgcctgggcaacgacttccacacgaacaagcgcgtgtgcgaggagatcgccattatccccagcaaaaagctccgcaacaagatagcaggttatgtcacgcatctgatgaagcgaattcagagaggcccagtaagaggtatctccatcaagctgcaggaggaggagagagaaaggagagacaattatgttcctgaggtctcagccttggatcaggagattattgaagtagatcctgacactaaggaaatgctgaagcttttggacttcggcagtctgtccaaccttcaggtcactcagcctacagttgggatgaatttcaaaacgcctcggggacctgtttgaattttttctgtagtgctgtattattttcaataaatctgggacaacagc

SEQ ID NO: 1020 - DNA, 2001 bp, Homo sapiens
  source 1..2001: mol_type = genomic DNA
agaattccgtggctttggaaaataaaactgctgttatagctcttctgggtatttgagaaatgcacttgtgaagggttagagttgaatcttttgatgcgaaagtcgggttttcctgatactgggattccgggattccaggtgttggggtggcccaattcctgcgagaagcaatagcgggcggtaacatgaggagcacggtgcgtccagcgagtccttccgcctggggccctgccgaccccctgcctgcgcccccaggactctggcctcacccggccgtgccggggcctctgtgacgcggcgttccaggcactcggccccggccgagcccgtagctagagcggctcagagacaggaggcggcggcagcagcggcggcatgaaccactgccagctaccggtggtgatcgacaacggctcgggaatgatcaaggcgggcgtggctgggtgccgggagccccagtttatctacccgaacattatcggccgcgccaagggccagagccgcgcggcccagggcgggctagaactctgcgtgggcgaccaagctcaggactggaggagctcgctgttcatcagttacccagtggagcgtggtctcattacttcatgggaggacatggagatcatgtggaagcatatctatgactataacctaaagctgaagccgtgtgatggcccagtcttgattactgagccagcgctgaacccactggccaaccggcaacagatcacggaaatgttttttgagcatctgggtgttcctgccttctatatgtccatccaggctgtgctggctctctttgctgctggcttcactactggccttgtgctgaattcaggtgctggggttacccagagtgtgcccatctttgagggttactgtctgcctcatggtgtgcagcaactggatctggcaggccttgacctcaccaactacctcatggtgctaatgaagaaccatggtatcatgttgctcagtgcttcagacagaaagattgttgaagacatcaaggagagcttttgttatgtggcaatgaactacgaagaggaaatggccaagaaacccgattgtctagagaaagtttaccaactacctgatgggaaggtcatccagctccatgaccagctcttttcttgtccagaggccctcttctctccgtgtcatatgaaccttgaggcccctggcattgataagatatgcttcagcagcataatgaaatgtgatacaggcctgaggaattccttcttttccaatattatccttgccgggggatcaacctctttccctggtttagacaagcggttagttaaggatatagcaaaggtggctcctgccaacaccgctgtgcaagttatagctcctccagaaaggaaaatatcagtgtggatgggaggttctattcttgcatccttgtctgccttccaggacatgtggatcactgctgcagaatttaaagaagttggacccaacatagtacaccaaagatgcttctgaaatacagataaaatggttggaagaaaatgttttgagtatatgtgacagaaaactttggatattatatgtttctgggagaagagaaaatacttcacctattgggatgccaatatttctgttgtatttctataatgggtttgggggataataatggtgaagctcaagaacagatgtctattgagtagaaccaagttaaaataatgtttcccatagtgtttcttctataacttgacgttggtgagcttatatttcccttggaagagagcatttgtggtacaatatgctatgtgccaaatgagtgataagatttaagcttattgaagtttagggaaagaaggttgctgtggtgaggaacgagactccatagcagaggtatgccatcatggaaggggtggcattgggatggagcgcagatatccaggcaagcatactaaaatgaacaagttgctaaagatgagaatgaacaaagcatattcagggcatgtttaatagactgattttgttttt

SEQ ID NO: 1021 - DNA, 3731 bp, Homo sapiens
  source 1..3731: mol_type = genomic DNA
agtccccgaggtcacaaggcagtggcaggtgtctgtagtcctcgggttgactgcagctcgcggtggtccctctccgagcccaggaagccactccagtgccgagggagaggcctgggagcgctcggagtgtgcgcggactggagaagggggaggtggcggagtgattcgtagagtaaattcggtaccgaggggcggggtcggggatttgaatcggtcggcgggcggaggaggcgggtggaggaggctgccgggcagagcgcaggccaggatcagcgcaggctgtgagtccaggtcagccgtcgggacctcgggctccgggttcgaagagcggctcccggctgcgggtgctttgccaggagagcccttccggacagaggagccggggtctggaaggagcggccgacgcgacgctcgcctgccacggggctctgggagtaagcctgtctgcctggcgggccttcaggtgcggcgtgagagatggatgccaattcaaaagacaagccccctgaaaccaaggagtctgcaatgaataatgctggaaatgcctctttcattttgggaactgggaagattgtgactcctcagaagcatgccgaattacctcctaatccttgcacaccagatacttttaaatcacctttgaacttttccacagtaaccgtagagcaattgggaattacacctgaaagctttgttaggaactctgcaggaaagtcatcatcctaccttaaaaaatgtagacgacgttctgcagtcggtgctcggggctctcctgaaacaaaccatctgattcgtttcattgctcggcagcaaaatataaagaatgctaggaaatctcctttggcacaagattctccttcccagggcagccctgcactgtatcgaaatgttaacactttaagagaacgaatatcagccttccagtcagcttttcactccataaaggaaaatgagaaaatgaccggctgtctggaattctcagaggcaggaaaagagtccgagatgacagacttgaccagaaaggaaggtctcagcgcttgccagcagtctgggttccctgcagtgttgtcctccaaacgtcggagaatatcctatcagagagactctgatgaaaatctgacggatgctgaaggaaaagtaattggtctccagatattcaatattgatacagacagagcatgtgcagttgaaacttctgtagatctttctgagatatcatctaaacttggttcaacacagtctggatttttagttgaagagtctcttcccctttcagagctcacagagacttcaaatgcactaaaggttgctgactgtgtagtgggcaaaggatcaagtgatgccgtttcgcctgacacgttcacagcagaagtgagctcagacgcagtccctgatgtcaggtcaccagctactccagcctgcaggagggaccttcccacccccaagacctttgtacttcgttctgtactgaagaaaccctctgttaagatgtgtctagagagcttacaggaacactgtaacaacctctatgatgatgatgggactcatccgagcttaatctcaaatctcccaaactgttgcaaagagaaagaagcagaagatgaagaaaattttgaagcacctgcctttctaaatatgaggaagaggaagagagttacttttggagaggacttaagcccggaagtgtttgatgaatctttgccagcaaatactccattgcgtaaaggaggaacacctgtttgtaaaaaagacttcagtggtctcagttccctgctgcttgagcagtcacctgttcctgagccattacctcaaccagattttgatgacaagggggagaatcttgaaaacatagaaccacttcaagtatcatttgccgttctcagttctcctaataaatcatcaatctctgagaccctttcaggcactgatacctttagttcttcaaataaccatgagaaaatatcctctcctaaagttggtagaataacaaggacttctaacagaagaaatcaattggtcagtgttgtagaagagagtgtttgcaacttattgaatacagaagttcagccttgtaaagaaaagaaaattaataggaggaagtctcaagaaacaaagtgtacaaagagagcacttcctaagaagagtcaggttttaaaaagttgcagaaagaagaaaggaaagggaaagaaaagtgttcagaaatctttatatggggaaagagacattgcttctaagaagcccctcctcagtcctattcccgagctgcctgaagtccctgagatgacaccttccattccgagcatccgaagactgggttcaggttatttcagttcaaatggcaaactggaagaagtgaagactcctaaaaatccagtgaaaagaaaggatcttttgcgtcatgacccagatttgcatatgcatcaaggctatgataaatatgatgtctctgaattctgctcttatataaaaagttcctcatcgcttggcaatgctacttctgatgaagatccaaatacaaatataatgaacattaatgaaaataaaaatattccaaaagcaaaaaataagtcagaaagtgaaaatgaaccaaaagctggaactgacagtcctgtttcttgtgcttctgtaactgaagaacgtgtggcatcagatagtcccaaacctgctctgaccctgcagcagggtcaagaattttctgctggtggtcaaaatgcagaaaacctttgtcagttctttaaaatttcaccagatttaaacataaagtgtgaaagaaaggatgacttcttaggagctgcagaaggaaaactgcaatgcaatcgtttaatgcctaattcacaaaaagactgtcattgtttaggagatgtcttaattgaaaatacgaaagaatctaaaagccagagtgaggatttgggaagaaaacccatggaaagtagcagtgttgtgagttgcagagacaggaaagatagaagacgttccatgtgttattctgatggtcgaagtttacatttggaaaaaaatggaaatcacacaccatcctccagtgtgggcagctctgtagaaattagtttagaaaattctgaactgtttaaagatttgtctgatgccattgagcaaacctttcagaggagaaatagtgaaaccaaagtgcgacgtagcacgaggctacagaaggatttagaaaacgaaggtcttgtatggatttcacttccacttccttccacttcccaaaaagccaaaagaagaacaatatgtacatttgacagcagtggatttgaaagtatgtctcccataaaagaaactgtgtcctccagacaaaaaccgcagatggcacctcccgtctcagatccagaaaacagccagggccctgctgctggttcttccgatgaacctggtaagaggaggaagagcttttgtatatctacacttgcaaatactaaagccacttcccagttcaaaggctaccggagaagatcctctcttaatgggaagggagagagctctctgactgccttggaaaggattgaacataatggagaaagaaagcagtaattgacatttcctgcagagtctgtggcaagagggaaagtaaccatctatgctgaaatgatctgtctagttcccattctctgttcaacctcagtgtttcaaaagttcctaataaataaactcatttgagttgaacctacttttatgtagaaataaataagtttcttcatcattcagatagaaaa

SEQ ID NO: 1022 - DNA, 1706 bp, Homo sapiens
  source 1..1706: mol_type = genomic DNA
cccgtggacgccgccgaagaagcatcgttaaagtctctcttcaccctgccgtcatgtctaagtcagagtctcctaaagagcccgaacagctgaggaagctcttcattggagggttgagctttgaaacaactgatgagagcctgaggagccattttgagcaatggggaacgctcacggactgtgtggtaatgagagatccaaacaccaagcgctccaggggctttgggtttgtcacatatgccactgtggaggaggtggatgcagctatgaatgcaaggccacacaaggtggatggaagagttgtggaaccaaagagagctgtctccagagaagattctcaaagaccaggtgcccacttaactgtgaaaaagatatttgttggtggcattaaagaagacactgaagaacatcacctaagagattattttgaacagtatggaaaaattgaagtgattgaaatcatgactgaccgaggcagtggcaagaaaaggggctttgcctttgtaacctttgacgaccatgactccgtggataagattgtcattcagaaataccatactgtgaatggccacaactgtgaagttagaaaagccctgtcaaagcaagagatggctagtgcttcatccagccaaagaggtcgaagtggttctggaaactttggtggtggtcgtggaggtggtttcggtgggaatgacaacttcggtcgtggaggaaacttcagtggtcgtggtggctttggtggcagccgtggtggtggtggatatggtggcagtggggatggctataatggatttggtaatgatggtaacaattttggaggtggtggaagctacaatgattttgggaattacaacaatcagtcttcaaattttggacccatgaagggaggaaattttggaggcagaagctctggcccctatggcggtggaggccaatactttgcaaaaccacgaaaccaaggtggctatggcggttccagcagcagcagtagctatggcagtggcagaagattttaattaggaaacaaagcttagcaggagaggagagccagagaagtgacagggaagctacaggttacaacagatttgtgaactcagccaagcacagtggtggcagggcctagctgctacaaagaagacatgttttagacaaatactcatgtgtatgggcaaaaaactcgaggactgtatttgtgactaattgtataacaggttattttagtttctgttctgtggaaagtgtaaagcattccaacaaagggttttaatgtagatttttttttttgcaccccatgctgttgattgctaaatgtaacagtctgatcgtgacgctgaataaatgtcttttttttaatgtgctgtgtaaagttagtctactcttaagccatcttggtaaatttccccaacagtgtgaagttagaattccttcagggtgatgccaggttctatttggaatttatatacaacctgcttgggtggagaagccattgtcttcggaaaccttggtgtagttgaactgatagttactgttgtgacctgaagttcaccattaaaagggattacccaagcaaaatcatggaatggttataaaagtgattgttggcacatcctatgcaatatatctaaattgaataatggtaccagataaaattatagatgggaatgaagcttgtgtatccattatcatgtgtaatcaataaacgattt

SEQ ID NO: 1023 - DNA, 2530 bp, Homo sapiens
  source 1..2530: mol_type = genomic DNA
gaagcgattgcgagccagcgcgcgcgcttcggcgttcccggcggtctgcgaagtttccggagcccgggtcccgccgcgggttcgcgcttgtgctcgcgctcgttcctggagtcggcggccgctgcgcgcgctcgttgcccaacccggtccccgcccccagacacgccgggctctcggggcaccacagccatgtgctcgttagcgtcaggcgctaccggttattcacatctgctgaagaaacattttcacactgtaagtctgagcatcagtttaatattgacagcatggttcataaacatggacttgaattttatggatacattaagctaataaattttattagacttaagaatcctacagttgagtacatgaattccatatacaacccagtgccttgggagaaagaagagtatttgaagccagtattagaagatgaccttttacttcaatttgatgtagaagatctttatgaaccggtgtcagtacccttctcataccccaatggactcagtgaaaatacatctgttgttgaaaaattgaaacatatggaagccagggcactgtctgctgaagccgcattggccagagcacgtgaggatctgcaaaaaatgaaacaatttgctcaggattttgtgatgcacacagatgtcagaacctgctcgtcatctactagtgtcattgcggacctccaggaggatgaggatggtgtttatttcagctcatacgggcattatgggatacatgaagaaatgctaaaggacaaaatacgaacagaaagctaccgagatttcatataccaaaatccacatatcttcaaagacaaggtagttttggatgttgggtgtggaactggaattctctctatgtttgctgctaaagctggggcgaagaaggttcttggagttgatcaatctgaaatactttaccaggcaatggatattataagactaaataaacttgaagatactattacactaattaaaggaaagattgaagaagttcatcttcctgtagaaaaagtagatgttatcatatctgagtggatgggctattttcttctgtttgagtctatgttagattctgtcctttatgcaaagaacaaatacttggcaaaaggaggctcggtctaccctgacatttgcactatcagccttgtagcagtgagtgatgtgaataaacatgctgatagaattgctttttgggatgatgtctatggcttcaagatgtcctgcatgaagaaagcagttattccagaagctgttgtggaagttttagatccgaagactcttatttcagaaccttgtggtattaagcatatagattgccatacgacgtctatctcagatttggaattttcatcagattttaccctgaaaatcacaaggacatccatgtgcacggcaattgctggctactttgatatatattttgagaagaattgccacaacagggtcgtgttctctacgggccctcagagcaccaaaacacactggaaacaaacagtatttctactggaaaaaccattttcagttaaagcaggtgaagccttgaaaggaaaggtcacagttcacaagagtaagaaagatccacgttctctcaccgtgaccctcacgttgaataattcaactcaaacttatggtctccagtgaaacagccataaaagcacactaccttgtagtttttaatgtgggggtagagtgggtcagcaggagggagctggttttatgtgagcagatggatggatgatggaccctttcctaatgagcctcctcaataagagagaagttctcattgtgggaatctgacatagttcagctgaggaagagaatcagctgatcctcatggtctgccacgtaatcattttcttagacgtttgctccaccagatttaaccaaatgtaactcccacattgagtttatctatattgaaaatcatttacattggcctatatttggaagagagatagtcttttgtttttaataagtttcttactataaattttaaacaaattggttagttatttggatattttattaaactagtaacacaggtactacacattttattatggactcctctgaggaggagtttttaattgtatttgctagaaaatcaggatgtaataaagatttgtataaaaaaactaaaatatggaaaagagcttcagccttcatatacaaatcatatatgcagacagcctagttgattatctagcatacttagggttctcattttgtagtttcttccctctttgtgactattccttagccttatagatttctagtactgcccaggaaatctaatttcaatacatttatcctaggtttcatgaaagtttttaaagattgggataaatatgtacttatttactaacgtattatctttttcaaaccagatttatgtgcaaaggttaaacatgtaactgttactaagcagtctataaagttgtcatttacaattactgattcaatttgaaatgtagaataaaattttaataaaatgtatcaacttataaaatattttaaaaata

SEQ ID NO: 1024 - DNA, 384 bp, Homo sapiens
  source 1..384: mol_type = genomic DNA
ctcaaccaaatcctccactcttgaaaccatgtgctactacagcaactactatggtggtctgcgttatggctatggagtcctgggcggtggctatggctgtggctgtggttatggccatggctatggaggcctgggctgtggctatggccgtggctatggtggctatggatatggctgctgccgcccatcttgctatggaagatactggtcctgtggcttctactgagaaatatctggcaactcaacctcgtggtctcttccacatggacttcctaaatttgccttcataattcttcatatgagtaattcatttttctgttgtaaaatgtcaacatcatccttaagtatctggaagaaaaaataggtcagatgctgcaagcctca

SEQ ID NO: 1025 - DNA, 7734 bp, Homo sapiens
  source 1..7734: mol_type = genomic DNA
agtagaggtgaccgaggcggtggcggcggaggcggcaccgattgctgtgtcggccccagtgcggccgaagtcgcggtagagcgtagccccacgcccctcccccgtccgcgccctccctctttccctggggatggagaaggcgacggttccggtggcggcggcgacggctgcagaaggagaagggagccccccggcggtggcggctgtggcgggcccccccgcggcggcggaggtcggcggcggcgttggcggcagcagcagagctcgctcggcctcgtctcctcgtgggatggtgcgagtctgcgacctgctcctgaagaagaagccgccgcagcagcagcaccacaaggccaagcgtaaccggacttgccgaccccccagcagcagcgaaagcagcagcgacagcgacaacagcggcggcggtggaggcggcggtggaggcggaggtggcggcggcggcaccagcagtaacaacagcgaggaagaagaggacgacgacgacgaggaagaggaggtttctgaggtggagtctttcattttggatcaggatgatttggaaaatccaatgctggaaacagcttccaagttgctcttatcaggtactgctgatggtgcagacctcaggacagtagatccagaaacacaggctagactggaagctttactagaagctgcaggaataggaaaattgtccacggctgatggtaaagcctttgcagatcctgaagtacttcggaggttgacatcgtctgttagttgtgcgttggatgaagctgctgctgcacttacccgtatgagagctgaaagcacagcaaatgcagggcagtcggacaaccgcagtttggcagaagcctgttcagaaggagatgtaaatgctgtgcgaaagttactcattgaagggcgaagtgtaaatgaacacacagaggaaggggagagcctcctttgtttagcttgttctgctggatactatgagcttgcacaggttttgttggcaatgcatgcaaatgtggaagataggggaatcaaaggtgacattacacctttaatggctgctgctaatggaggacatgtcaaaattgtgaagttgctgctagctcataaagcagatgttaatgcacagtcttcaacaggcaatacagcacttacatatgcttgtgctggaggctatgtagatgttgtaaaggtgctcttggaatccggtgctagtattgaggaccataatgaaaatggtcatacccctcttatggaagctggaagtgctggacatgtggaagtagccagattgctgctagaaaatggggctggcattaatacgcattctaatgaatttaaagagagtgcccttaccttagcttgttacaaaggacacttagagatggtgcgatttcttttggaagcaggcgcggatcaagagcataaaacagatgaaatgcacactgctctgatggaggcttgcatggatggccatgttgaagtagctaggttacttcttgacagcggtgcccaagtgaacatgcctgctgattcatttgagtcaccattaactttggctgcatgtggtgggcatgtggaacttgcggctttacttattgaaagaggagctagcctggaagaggtcaatgatgaaggttatacaccattgatggaagcagctcgagaaggacatgaagaaatggtggcattacttcttggtcaaggagcaaatatcaatgcacagacagaagaaactcaagaaactgccttgactctggcttgctgtggaggctttctggaagtggcagactttctaattaaggcaggagccgatatagaactagggtgttctacccctttaatggaagctgctcaagagggtcatttggagttagttaaatacttattagctgcaggagctaacgttcatgcaacaacagcaacaggggatacagcactaacatatgcctgtgaaaatggtcatactgatgtagcagatgtcttacttcaggcaggcgcagatctggaacatgaatctgaaggtggaagaactcctttaatgaaagctgcaagagctggtcatgtttgtactgttcagttcttaattagtaaaggagcgaatgtgaatagaaccacagctaataatgaccatactgtactgtccctggcttgtgcagggggtcatctggcagtggtggaactacttttggctcatggggcagatcctactcaccgtttgaaagatggctcaactatgttgatagaagcagcaaaaggtggccatacaagtgttgtttgctatctcttggattatcctaataacttgctttcagcccctccaccagatgtcactcagttaactcccccatcccacgatttaaatagggctcctcgtgtaccagttcaagcactgcccatggttgttccacctcaggagcctgacaaaccacctgccaatgttgccaccactcttcccatcaggaataaagcagtcagtggaagagcatctgcaatgtcaaacactcctacccacagtattgctgcatccatttcccaacctcagactccaactccaagtcctatcatctctccttcagccatgcttcctatctaccctgccattgatattgatgcacagactgagagtaatcatgacacggcactaacacttgcctgtgctggtggccacgaggaactggtacaaacactgctagagagaggagctagtatagagcaccgagacaagaaaggttttactccactcatcttggctgccacagctggtcatgttggtgttgtggaaatattgctggacaatggtgcagacattgaagcccagtctgaaagaaccaaggacacaccactctccttggcttgttctgggggaagacaggaggtggtggagctattgttagctcgaggggcaaataaagagcacaggaatgtttctgattacacacctctaagtctggctgcttctggtggctatgtgaacatcatcaaaatattactaaatgcaggagctgagattaactctagaactggtagcaaattgggcatctctcctctgatgttagcagctatgaatgggcatacagctgctgttaagctcctgttagacatgggctctgacataaatgctcagatagaaaccaatcggaacactgcccttactttagcctgcttccaaggaagaactgaagtggttagtcttctgcttgatagaaaagcaaatgttgaacacagagctaagactggtctcacaccactaatggaagctgcctctggtggatatgcggaggtgggccgagttcttttggataaaggtgctgatgttaatgcccctccagttccctcctcaagagatacagctttaaccatagcagcagataaagggcattacaaattctgtgagcttcttattggcaggggagctcatattgatgtacgtaacaagaaggggaacactccattgtggctagcagcaaatggtggacacctcgatgtggttcagttactggtgcaagcaggtgcagatgtggatgcagcagataaccgcaagataactcctcttatggcagcatttagaaagggtcatgtgaaggtggtgcgctacttagtcaaagaagtcaatcagtttccatcagattctgaatgtatgagatacatagcaaccatcactgataaggagatgctgaagaagtgtcatctttgtatggagtcaatagtacaagccaaagatagacaggctgctgaagcaaacaaaaacgccagcattttgttagaggagttagacttggaaaagttaagggaagaaagtcggaggctggctttggctgcgaaaagagaaaaaagaaaagagaagagaaggaagaaaaaggaagaacaaagaaggaaactagaagaaattgaagccaaaaataaagagaactttgaactccaagctgctcaagaaaaagaaaagcttaaagttgaagatgagcctgaagtcttgacagaacctccaagtgccacaaccactactaccataggtatatctgcaacctggacaactttggcaggttctcatggtaaaagaaataataccataactacaaccagttcaaagaggaaaaacaggaaaaataaaattactccagaaaacgttcaaattatatttgatgatccactaccaatttcatacagtcagccagagaaggtgaatggagagtccaagagcagcagtaccagcgagagtggggacagtgataacatgaggatttccagctgcagcgatgaaagtagtaacagcaacagcagtcgtaagagtgacaatcattcaccagctgtggtcactaccactgtgagcagcaaaaagcagccatcagttcttgttacatttccaaaggaagagagaaaatctgtttctggcaaggcttcaataaaattgtcagaaactatcagtgaagggaccagtaattctctatctacttgtacaaaatctggtccatctcccctttcttctccaaatgggaagttaacagtagcaagtcctaagcgtgggcaaaagagggaagaaggatggaaagaagttgtaagaaggtcaaagaaagtatctgttccatcaactgtgatatccagagtgattggaagaggaggctgtaatatcaatgctattcgggagtttactggtgcacacatagatattgataaacagaaagacaagactggagaccggataatcactataaggggtggcactgaatcaacaagacaagcaactcaattgattaatgctttgatcaaggatccagacaaagaaattgatgaacttattccaaagaatcgtttgaaaagctcctcagcaaattccaaaatagggtcatcagcacctaccaccactgctgctaacacttccttaatgggaattaaaatgacaactgtagctctgtcatcaacatctcaaactgccacagcactcactgtgcctgcaatttcttctgcatccactcacaaaaccattaagaacccagtgaataatgtgaggcctggttttccagtttctcttccattagcatatcctcctccacagtttgcacatgctttgcttgctgctcagactttccagcagatccgtccaccaaggttgcccatgacccactttggaggtacttttccaccagctcaatccacttggggtccgtttcctgtcaggcctttgagccctgccagagctactaactcgcctaagcctcacatggtgcctcgccatagcaatcagaatagcagtggttctcaggtgaattcagcaggttctttaacttcaagcccaacaactacaaccagttcatcagcttcaacggtgcctggtacatctacaaatggcagtccaagttcaccttctgtccgaaggcagctttttgtcacagttgtgaagacatccaatgccaccacaacaacagtcacaaccacggcaagcaacaacaacactgcacccacaaatgccacatatcctatgcctactgccaaagaacactatccagtatcatccccatcttccccatcaccaccagcccagccaggaggggtttctagaaacagccctttggattgtggatcagcatctccaaataaagtggcatcttcctccgaacaggaagcaggtagtccaccagtagtagaaacaacaaacactagacctccaaacagcagcagttcttctgggagttcatcagctcattctaatcagcaacaacctccgggatctgtttctcaggaaccaagaccacctcttcagcagtctcaggttcctcccccggaagttagaatgactgttcctcctttagcaacaagttctgctccagtggcggtgccttctactgccccagtgacttaccctatgcctcagacaccaatgggatgcccccagcctactcctaaaatggaaacccctgctattagaccaccccctcatggcacaactgcccctcacaagaattcagcttcagtgcaaaattcatctgttgcagtcctcagtgtcaatcacattaaaagacctcacagtgttccctcttctgtccagctaccttcgaccttaagtacacaaagtgcttgtcagaattcagtacatccagcaaataagcctattgctcccaatttcagtgcccccttaccatttgggccctttagcacattgtttgaaaacagccctacttctgctcatgccttctggggaggatctgttgtttcatctcagtcaacaccagaatctatgctatcaggaaaatcctcatatttgccaaattcagatcctttacatcagtctgatacttccaaagctccaggttttagaccaccattacagagacctgctccaagtccctcaggtattgtcaatatggactcgccatatggttctgtaacaccttcttcaacacatttgggaaactttgcttcaaacatttcaggaggtcagatgtacggacctggggcaccccttggaggagcacccgcagctgctaactttaacagacaacatttttccccgcttagtttgttgactccgtgttcatcagcatcaaatgattcttctgcacagtcagtatcctcgggagttcgtgcaccatctcctgccccatcatcagtaccgttagggtcagaaaagcccagcaatgtgtctcaggacaggaaagttccagtccctattgggactgaacgttctgcacgtatcaggcaaactggaacgtcagctccatctgttattgggagcaatttgtctacatcagtaggacatagtggcatctggtcctttgaagggattggtggcaatcaagacaaagtagactggtgtaaccctgggatgggaaatcctatgatccacagaccgatgtctgacccaggagtattttcacaacatcaagcaatggagcgagatagtacaggaattgtaactccttctggtacattccatcagcatgttcctgcaggctacatggactttcctaaagttgggggtatgcctttttctgtgtatgggaatgcaatgattcctccagtagcacctatccctgatggtgctggaggacccatatttaatggccctcatgctgcagacccttcttggaactcactgataaagatggtttccagctccacggaaaataatggccctcaaacggtgtggactggaccctgggcacctcacatgaacagtgtgcatatgaaccagcttggctgatgaggatcagcttgttagcctgcagattccttttcatttggaggaaatcacaagtggccgaaaaaaaaaattatgctcccaaatcattctactgatgtgcttgactgaagtgtgtaggctttttgcagaagatcttactaactgacctattttctgtgaacatttgtgactgcccattccccatcatcatccgttttaccttagttagcatttttcttatcatttttctttttttctttccctcttcccctttggacataactttctgttgaagctgttctttggctggttggttttagtactgtaaactgcttctgagcaaacacggaaatttagcaaaattatgtaaacttgatcctgaagttttagaatggcaaataaatgtacaattgtttacataacagaaaaggctaagcagaaagtaaatttcaatatgtcagtatagaggctctactttatgtagacttaaattaatgtgagatatgtaccttcatattcagaaatctggatgtttccttcatacattaaactattaataagcataa

SEQ ID NO: 1026 - DNA, 1766 bp, Homo sapiens
  source 1..1766: mol_type = genomic DNA
ccccggcccggctccatttaatggcgcggacgccggcggcggcgggctcctggccgggccagcgcagcggaagagccaagccagcatgtcggggacccgagcctccaacgaccggccccccggcgcaggcggcgtcaagcgggggcggctgcagcaggaggcggcggcgaccggctcccgcgtgacggtggtgctgggcgcgcagtggggggacgagggcaaaggcaaggtggtggacctgctggccacggacgccgacatcatcagccgctgccaggggggcaacaacgccggccacacggtggtggtggatgggaaagagtacgacttccacctgctgcccagcggcatcatcaacaccaaggccgtgtccttcattggcaacggggtggtcatccacttgccaggcttgtttgaggaagcagagaagaatgaaaagaaaggcctgaaggactgggagaagaggctcatcatctctgacagagcccaccttgtgtttgattttcaccaggctgtcgacggacttcaggaagtgcagcgccaggcacaagaggggaagaatataggcaccaccaagaagggaatcggaccaacctactcttccaaagctgcccggacaggcctccgcatctgcgacctcctgtcagattttgatgagttttcctccagattcaagaacctggcccaccagcaccagtcgatgttccccaccctggaaatagacattgaaggccaactcaaaaggctcaagggctttgctgagcggatcagacccatggtccgagatggtgtttactttatgtatgaggcactccacggcccccccaagaagatcctggtggagggtgccaacgccgccctcctcgacattgacttcgggacctacccctttgtgacttcatccaactgcaccgtgggcggtgtgtgcacgggcctgggcatccccccgcagaacataggtgacgtgtatggcgtggtgaaagcctataccacacgtgtgggcatcggggccttccccaccgagcagatcaacgagattggaggcctgctgcagacccgcggccacgagtggggagtgaccacaggcaggaagaggcgctgcggctggctcgacctgatgattctaagatatgctcacatggtcaacggattcactgcgctggccctgacgaagctggacatcctggacgtactgggtgaggttaaagtcggtgtctcatacaagctgaacgggaaaaggattccctatttcccagctaaccaggagatgcttcagaaggtcgaagttgagtatgaaacgctgcctgggtggaaagcagacaccacaggcgccaggaggtgggaggacctgcccccacaggcccagaactacatccgctttgtggagaatcacgtgggagtcgcagtcaaatgggttggtgttggcaagtcaagagagtcgatgatccagctgttttagtcacagactgagctgatcccaacaggccctggcagcgtctggacttgtgtaaacagcagcagtcacgttcctcggccgccacaaccaacaccaaagcaggaaaaccattttctgtacttttatatttctgttcaacctgttggtttctacaatgattttaaacattggaaagccagccttgtgtatatttttaaaaattatattcaaaatgagccaaagtgctcagagaccttctatgacacattagtgtcacatggttgcgtgtccagccgaagcagtgtaataaacatctccaatggccactgaa

SEQ ID NO: 1027 - DNA, 2653 bp, Homo sapiens
  source 1..2653: mol_type = genomic DNA
acgtgacccgcacggcgcctcgaggccggaagcgattgcgagccagcgcgcgcgcttcggcgttcccggcggtctgcgaagtttccggagcccgggtcccgccgcgggttcgcgcttgtgctcgcgctcgttcctggagtcggcggccgctgcgcgcgctcgttgcccaacccggtccccgcccccagacacgccgggctctcggggcaccacagccatgtgctcgttagcgtcaggcgctaccggcggccggggcgctgtggagaatgaggaggacctgccagaactgtcggacagcggggacgaggccgcctgggaggatgaggacgatgcagatctcccccacggcaagcagcagaccccctgcctgttctgtaacaggttattcacatctgctgaagaaacattttcacactgtaagtctgagcatcagtttaatattgacagcatggttcataaacatggacttgaattttatggatacattaagctaataaattttattagacttaagaatcctacagttgagtacatgaattccatatacaacccagtgccttgggagaaagaagagtatttgaagccagtattagaagatgaccttttacttcaatttgatgtagaagatctttatgaaccggtgtcagtacccttctcataccccaatggactcagtgaaaatacatctgttgttgaaaaattgaaacatatggaagccagggcactgtctgctgaagccgcattggccagagcacgtgaggatctgcaaaaaatgaaacaatttgctcaggattttgtgatgcacacagatgtcagaacctgctcgtcatctactagtgtcattgcggacctccaggaggatgaggatggtgtttatttcagctcatacgggcattatgggatacatgaagaaatgctaaaggacaaaatacgaacagaaagctaccgagatttcatataccaaaatccacatatcttcaaagacaaggtagttttggatgttgggtgtggaactggaattctctctatgtttgctgctaaagctggggcgaagaaggttcttggagttgatcaatctgaaatactttaccaggcaatggatattataagactaaataaacttgaagatactattacactaattaaaggaaagattgaagaagttcatcttcctgtagaaaaagtagatgttatcatatctgagtggatgggctattttcttctgtttgagtctatgttagattctgtcctttatgcaaagaacaaatacttggcaaaaggaggctcggtctaccctgacatttgcactatcagccttgtagcagtgagtgatgtgaataaacatgctgatagaattgctttttgggatgatgtctatggcttcaagatgtcctgcatgaagaaagcagttattccagaagctgttgtggaagttttagatccgaagactcttatttcagaaccttgtggtattaagcatatagattgccatacgacgtctatctcagatttggaattttcatcagattttaccctgaaaatcacaaggacatccatgtgcacggcaattgctggctactttgatatatattttgagaagaattgccacaacagggtcgtgttctctacgggccctcagagcaccaaaacacactggaaacaaacagtatttctactggaaaaaccattttcagttaaagcaggtgaagccttgaaaggaaaggtcacagttcacaagagtaagaaagatccacgttctctcaccgtgaccctcacgttgaataattcaactcaaacttatggtctccagtgaaacagccataaaagcacactaccttgtagtttttaatgtgggggtagagtgggtcagcaggagggagctggttttatgtgagcagatggatggatgatggaccctttcctaatgagcctcctcaataagagagaagttctcattgtgggaatctgacatagttcagctgaggaagagaatcagctgatcctcatggtctgccacgtaatcattttcttagacgtttgctccaccagatttaaccaaatgtaactcccacattgagtttatctatattgaaaatcatttacattggcctatatttggaagagagatagtcttttgtttttaataagtttcttactataaattttaaacaaattggttagttatttggatattttattaaactagtaacacaggtactacacattttattatggactcctctgaggaggagtttttaattgtatttgctagaaaatcaggatgtaataaagatttgtataaaaaaactaaaatatggaaaagagcttcagccttcatatacaaatcatatatgcagacagcctagttgattatctagcatacttagggttctcattttgtagtttcttccctctttgtgactattccttagccttatagatttctagtactgcccaggaaatctaatttcaatacatttatcctaggtttcatgaaagtttttaaagattgggataaatatgtacttatttactaacgtattatctttttcaaaccagatttatgtgcaaaggttaaacatgtaactgttactaagcagtctataaagttgtcatttacaattactgattcaatttgaaatgtagaataaaa

SEQ ID NO: 1028 - DNA, 1920 bp, Homo sapiens
  source 1..1920: mol_type = genomic DNA
ccctttcctttatcatgtgtctgtattgtgtaccctccttcatttccgaaattcaaacaaacaaaaaaagccagcgtctaaaaggccagatggccgatagcggacccctcctcctgcccccaatttcaagcttaaagtagccagcgtggattctgatttcaaaatagaagatgagttgtcacactccctggaccatttcttcagcacaacacagttttagggggagcctcaggatatacgtgcacatgtccttgggccaggatgtccgtactaagccctggggatctaaaaccaaagcgaggctccccacacagaggcagccttgaccgcacagatgcctccaccgatctggccatgaggtcctggccctcggagctgggctcccggacttgctcaacttcagccaccactacagccccttccaactccacccccatcgcccggcacccaggccgcaccaaaggctataactcagatgacaacctctgtgagccatccctggagtttgaggtccccaaccacaggcagtacgtgtcgcggccaagtagcttagagagcagtagaaacacatccagcaacagctcacctcttaacctaaaaggctcctccgagcagctccatggccggtctgagagcttcagcagcgaagacctgatccccagcagggacctggccactttgccccgggaagccagcacaccgggacgcaacgccctcggccgccacgagtaccccttgcctcggaacgggcctctcccacaggagggtgcccagaagaggggcacagcccctccctacgtcggagtgcggccctgctcggcctcccccagcagtgagatggtcaccttggaggagttcctggaggagagcaaccgcagctcccccacccatgacactcccagttgccgggatgacctgctgagtgactacttccgaaaggccagcgatcccccagccatcggaggccaaccaggaccacctgccaagaaagaaggggccaagatgcccaccaactttgtggcccccaccgtcaaaatggccgcccccacctcggaggggaggccgctgaagcccgggcagtacgtaaagccaaacttcagactgactgaggccgaggccccacccagcgtggccccgagacaggcccagcctccccagagcctgtctctgggcagaccccggcaggctccggtgcccccagcttcccatgcacctgccagccgcagtgcctccttgagccgggccttcagcctggcctcagctgaccttctccgggccagcgggccagaggcctgcaaacaggagtcccctcagaagctgggggctcctgaggccttagggggcagagagacaggcagccacaccctgcaaagccccgcaccccccagctcccatagcctggcccgggagcggaccccacttgtgggaaaggctggcagctcctgtcagggcccaggtccccgcagccggccgctggacacgaggcgcttctccctggctcccccaaaggaggagaggctggcccccctgcatcagtctgccacagcccccgccattgccactgcaggtgctggtgctgctgctgctggcagtggcagcaactcccagctcctgcacttctcacctgctgcagccccggctgccaggaccaagcccaaggcgcccccacgctcaggggaggtggccaccatcacccctgtccgggcagggctcagcctctcagagggagacggggtcccggggcagggctgcagtgaggggcttccggccaagagcccaggtcggtctcccgatttggctccccacctcggccgggccctggaggactgcagtcgagggagcgtctcaaagagcagtccggcctccccggagcccggcggggatccgcagaccgtgtggtatgagtacggctgtgtgtga

SEQ ID NO: 1029 - DNA, 1095 bp, Homo sapiens
  source 1..1095: mol_type = genomic DNA
gagccgatgcccgattccgcgcccgccatggccgacaaaatggacatgtctctggacgacatcattaaactgaaccggagccagcgaggcggccggggcgggggccggggccgcggccgggccggctcccagggcggccgcggcggtggggcgcaggccgccgcgcgagtgaatcgaggcggcgggcccatccggaaccggccggccatcgcccgcggcgcggccggcggaggcggcaggaaccgaccggcgccctacagcaggccaaaacaacttcccgacaagtggcagcacgatcttttcgacagtggcttcggcggtggtgccggcgtggagacaggtgggaaactgctggtgtccaatctggattttggagtctcagacgccgatattcaggaactctttgctgaatttggaacgctgaagaaggcggctgtgcactatgatcgctctggtcgcagcttaggaacagcagacgtgcactttgagcggaaggcagatgccctgaaggccatgaagcagtacaacggcgtccctctggatggccgccccatgaacattcagcttgtcacgtcacagattgacgcacagcggaggcctgcacagagcgtaaacagaggtggcatgactagaaaccgtggcgctggaggttttggtggtggtggaggcacccggagaggcacccgcggaggcgcccgtggaagaggcagaggtgccggcaggaattcaaagcagcagctttcggcagaggagctggatgcccagctggacgcctataatgcgagaatggacaccagttaaacagaccagcaaatccgcgtgcggaacaggacccaggcgtctcctcttgctccctggttggggggcggtggctggggctgtgcggccaatgatggatttgtttcttttatgttttaaaataggatttaaaaactcatgtaaaggttttttttttttctttttttttttttttaattctgaaacagacctgttttgtaccgagttatttttgggataaattttactggttgctgttgtggagaaggtggcgtttccaccttttccataataaaatagaaatgtgtgtagaactgg

SEQ ID NO: 1030 - DNA, 876 bp, Homo sapiens
  source 1..876: mol_type = genomic DNA
atgggagtggcggcgcggcccccagccctgcggcactggttcagccactcaattcctctcgctatcttcgcgctgctgctgctttatctcagtgttcggagcctaggcgcccgctcgggctgcggacccagggcgcagccctgcgttccaggggaaacggcgcccttccaggtccggcaggagtcgggaaccctggaggccccggagaggaaacagcctccgtgtctgggccctcgggggatgctgggccgcatgatgaggcggttccacgccagtctgaaacccgaaggggatgtggggctgtcgccgtacctggcgggatggagggcactcgtcgagttcctgactcccctcggctccgtcttcgccttcgccactagggaggccttcaccaaggtgacagacctggaggctcgggtgcacggcccggacgcggagcactactggtcgctggtggccatggcggcgtgggagcggagggcgggactgctggagcagccgggggcggccccccgggacccgacccggagctcgggctctcgcacgctgctcctgctgcaccgcgcgctgcgctggtcccagctctgcctccaccgggtggcgaccggcgcgctgggaggcccggacgcgggcgtgcagtgcagcgacgcctaccgtgcggccctgggtccgcatcacccctggctggtccgacagaccgcccgcctcgccttcctcgccttcccgggtcgccgccgcctgctggagctggcgtgtcccggagccaccgaggcggaggcgcgggccgcgctggtccgggccgccggcaccttggaggatgtctacaaccgcacccagagcctgctggccgagcgcggcctgctccagctggcctaa

SEQ ID NO: 1031 - DNA, 3959 bp, Homo sapiens
  source 1..3959: mol_type = genomic DNA
cggacggggccgccccgatgggacgccgcgctccggcccctgcgcgccgctgagccgagcgccccccgctgccgagacccccgccgccaccgccagccgctgccccctcgcccccgcccgggccgggagcctcgtccccgtcccccggaaagctggatttccgaggctggaggcgcctggccggctgggtggggaccaccatgggcaacgcggccggcagcgccgagcagcccgcgggccccgccgcgccgccccccaagcagcccgcgcctcccaagcagccgatgcccgcggccggagagctggaggagaggttcaaccgcgccctgaactgcatgaacttgcccccagacaaggtccagctgctgagccagtatgacaacgagaagaagtgggagctcatctgtgatcaggagcggtttcaagtcaagaatccccccgcagcctacatccagaagctgaagagctatgtggatactggtggggtcagccgaaaggtagcagctgattggatgtccaacctggggtttaagaggcgagttcaggagtccacgcaggtgctacgggagctggagacctccctgaggaccaaccacattgggtgggtgcaggagttcctcaatgaagagaaccgtggcctggatgtgctgctcgagtacctggcctttgcccagtgctctgtcacgtatgacatggagagcacagacaacggggcttccaactcagagaaaaacaagcccctggagcagtctgtggaagacctcagcaagggtccaccctcctccgtgcccaaaagccgccacctgaccatcaagctgaccccagcccacagcaggaaggccctgcggaattcccgcatcgtcagccagaaggacgacgtccacgtctgtattatgtgcctacgcgccatcatgaactaccagtctggcttcagccttgtcatgaaccacccagcctgtgtcaatgagattgctctgagcctcaacaacaagaaccccagaaccaaggctctggtgctggagctgctggcggccgtgtgcttggtgcggggaggacatgacatcatccttgcagcctttgacaacttcaaggaggtgtgtggggagcagcaccgctttgaaaagctgatggaatatttccggaatgaggacagcaacatcgacttcatggtggcctgcatgcagttcatcaacattgtggtacattcggtggagaacatgaacttccgtgtcttcctgcaatatgagttcacccacttgggcctggacctgtacttggagaggcttcggctcaccgagagtgacaagctgcaggtgcagatccaggcgtacctggacaatatttttgatgtgggggcgctgctggaggacacagagaccaagaacgctgtgctggagcacatggaggaactgcaggagcaagtggcgctgctgacagagcggcttcgggacgcggagaacgaatccatggccaagattgcagaactggaaaaacagctaagccaggcgcgcaaggagttggagaccctgcgggagcgcttcagcgaatcgaccgccatggggccctccaggcgtcccccagagcctgagaaagcgcctcccgctgccccgacgcggccctcggccctggagctgaaggtggaggagctggaggagaaggggttaatccgtattctgcgggggccgggggatgctgtctccatcgagatcctccccgtcgctgtggcaactccgagcggcggtgatgctccgactccgggggtgccgaccggctcccccagcccagatctcgcacctgcagcagagccggctcccggagcagcgccaccgccgccgcccccactgcccggcctcccctccccgcaggaagccccgccctctgcgcccccacaggccccgcctctccctggcagcccggagcccccgcctgcgccgccgctgcccggagacctgccgcccccacccccgccaccgccaccacctccgggcactgacgggccggtgcctccgccgccgccgccgccgccgccgcctcccggaggtcctcctgatgccctaggaagacgcgactcagaattgggcccaggagtgaaggccaagaagcccatccagactaagttccgaatgccactcttgaactgggtggcactgaaacccagccagatcaccggcactgtcttcacagagctcaatgatgagaaggtgctgcaggagctagacatgagtgattttgaggaacagttcaagaccaagtcccaaggccccagcctggacctcagcgctctcaagagtaaggcagcccagaaggcccccagcaaggcgacactcattgaggccaaccgggccaagaacttggccatcaccctgcggaagggcaacctgggggccgagcgcatctgccaagccattgaggcgtacgacctgcaggctctgggcctggacttcctggagctgctgatgcgcttcctgcccacagagtatgagcgcagcctcatcacccgctttgagcgggagcagcggccaatggaggagctgtcagaggaggaccgcttcatgctatgcttcagccgcatcccgcgcctgccggagcgcatgaccacactcaccttcctgggcaacttcccggacacagcccagctgctcatgccgcaactgaatgccatcattgcagcctcaatgtccatcaagtcctctgacaaactccgccagatcctggagattgtcctggcctttggcaactacatgaacagtagcaagcgtggggcagcctatggcttccggctccagagcctggatgcgctgttggagatgaagtcgactgatcgcaagcagacgctgctgcactacctggtgaaggtcattgctgagaagtacccgcaactcacaggcttccacagcgacctgcacttcctggacaaggcgggctcagtgtccctggacagtgtcctggcggacgtgcgctccctgcagcgaggcctagagttgacacagagagagtttgtgcggcaggatgactgcatggtgctcaaggagttcctgagggccaactcgcccaccatggacaagctgctggcagacagcaagacggctcaggaggcctttgagtctgtggtggagtacttcggagagaaccccaagaccacatccccaggcctgttcttctccctctttagccgcttcattaaggcctacaagaaagctgagcaggaggtggaacagtggaaaaaagaagccgctgcccaggaggcaggcgctgataccccgggcaaaggggagcccccagcacccaagtcaccgccaaaggcccggcggccacagatggacctcatctctgagctgaaacggaggcagcagaaggagccactcatttatgagagcgaccgtgatggggccattgaagacatcatcacagtgatcaagacggtgcccttcacggcccgcaccggcaagcggacatcccggctcctctgtgaggccagcctgggagaagagatgcccctctagcccctcagatctgcggaaccagccctacatccgcgcagacacaggccgccgcagtgcccgtcggcgtcccccgggccccccactgcaggtcacctccgacctctcgctgtagccgctatttctgcaggtggattctgcaggggtgtggggccgtggacaggctgaggctcaaggaaggtggtcctcagctcggctggccgggcagcccctcctccgctgtggcccgcctcaaacgggctggtgcatcctcctcttggccacagagggcagcatcgcccgccccttcccccaaatgctgcttgcagcacccaccctaaagccccctccaaatagccatacttagcctcagcaggagcctggcctgtaacttataaagtgcacctcgcccccgcaagccccagccccgaggaccgtccatggaccttatttttatatgagattaataaagatgtttgc

SEQ ID NO: 1032 - DNA, 3175 bp, Homo sapiens
  source 1..3175: mol_type = genomic DNA
gggagcgagccggtgctgctgcaggctgaggctgcggcagaggcggcgaggcgcgggcggtgaggacggacagtcaccgacttagtccagttccctgtgatctcaaaacaattgttgcagcaggctcctggcagtctcaagcagttcatcttcttggtgtactggtttcctattgtgattttatcatggaaaatcaattggctaaatcaactgaagaacgaacatttcagtaccaggattctcttccatcactgcctgttccttcacttgaagaatcattaaaaaaataccttgaatcagtgaaaccatttgcaaatcaagaagaatataagaaaactgaagaaatagttcaaaaatttcaaagtgggattggagaaaaattgcaccagaaattgcttgaaagagcaaaaggaaaaagaaattggctggaagagtggtggctgaatgttgcctatctggatgttcgtataccatcacaattgaatgtcaactttgcgggtcctgcagctcattttgaacactactggcctccaaaggaagggactcaattagaaagaggaagtataactctttggcataacttgaactactggcagctattaagaaaagaaaaagtgcctgttcataaagttggaaatactcctctagatatgaatcaattccgaatgctattttctacctgcaaggttccaggaattactagagactccattatgaattattttaggactgagagtgaagggcgttccccaaaccacattgtagtgctgtgtcgaggccgagcttttgtctttgatgtaatacatgaaggatgtttggtcaccccgccagagcttctcagacaactgacatatatccacaagaagtgccatagtgaacctgatggacctgggattgcagcattaactagtgaggagcgaactcgatgggctaaggcacgagaatatctgattggtcttgatccagagaacttggctttgttagaaaaaattcagagtagtttactggtatattccatggaggatagcagtccacatgtaacaccagaggattattctgagattattgcagccatccttattggagatccaacagtacgctggggtgacaaatcctataacttgatttccttttctaatggagtatttggctgtaattgtgatcatgctccttttgatgcaatgattatggtgaacatcagttattatgtggatgagaaaatttttcagaatgaaggaagatggaagggttcagagaaggtacgagatataccacttccagaagagctcattttcattgtggatgagaaagttttaaatgacatcaaccaagctaaagcccagtatctcagggaggcatctgatctacagattgcggcttatgcctttacatcttttggcaaaaagctaaccaagaacaagatgcttcacccggatacgtttattcagcttgcacttcagctggcctattacagacttcatggacaccctggttgttgctatgaaacagctatgacaagacatttttatcatggccgtacagagactatgcgatcatgcacagttgaagcagtgaggtggtgccagtccatgcaggatccttctgtcaatcttcgtgagcggcagcaaaagatgttacaagcttttgcaaagcataataaaatgatgaaagattgttcagctggaaaaggatttgatcgtcaccttttaggtctcttactcatagcaaaagaggaaggtcttcctgttccagaactctttacggacccacttttttccaaaagcggaggaggtggaaattttgttctctcaacaagtctggttggctatttacgagtccagggagtggtagttcccatggtacacaatggttatggatttttctaccatatcagagatgacaggtttgttgtggcctgttcagcctggaaatcctgtcccgagactgatgcggaaaagctagttcagctgactttttgtgcttttcatgatatgatacagctgatgaactctactcatctttagagatgaatcatctattaagcacttaccaaaacatatcattaaactgagtgctgggagtgagttggtaatatgagatgggaaggaatgttgacttgctaacattcctttaacaagttaagaaaacttgttaaatgtagaaattagtagaatcatgctctctaaatttattctgccatagaaggtagaaatatttttaagctcctctgatgcagcagcaatgcaaattatgacatagtgaatatagaactatgcagtatttaagcctcaacaatccaaatctacaaactttaacaatgcaagtcttactctaatttttaagtatttttgttggtacttacatgggttataaatcctctctctggacatcaatgtagagtccatctttcaagcactttaatttttttagctgccaaagggtatgaattacattattgtatgctaatttccctgaaatcaatgccttctatgttcaccacagggatacaagcctgttatgtttgatgggaaagaccactacaatctaatggtgatctaaaataacttttttgggctgggtgcagtggctcatgcctataatcttagcactttgggaggccaaggtaggaggattgcttgaagctaggagtttgagaccagcctgggcaacagggtaaggtcctgtctctacaagatcaaaaacttagccgggtatggtggtgcatgtgtgcctgtagtccaagctacttgaaggctgagacaggaggatcggttgagcccaggaggttgtggctgcagtgagctgtgatgtgcccttatgctatagcctgggcaagagcgtgagaccctgtctcaaagaagaaaaaaagagaaaaataactcttttgaacaaacagacaaattagctagtagtatggagatgtataccctctattacacacataaaaccgtaacaaaattcattgtggtgtattataattagttttgtgaatagaaaaataaagcacttatgtttaaatttgttacagtgacttttaaaggattaatgttgaatcacattgtcagaattttttcctcctcgctgttcaattttgtagtttttactctcaaaaaatgaaattctcaaaattatatagctttttgttttgtttgaataaatgattcattcctgtttg

SEQ ID NO: 1033 - DNA, 3347 bp, Homo sapiens
  source 1..3347: mol_type = genomic DNA
gctatttgacgtgcggctcgaggaaggcgaaggtttttgtgttgctagccggggccagcggcggtggcggcggcggcggaggcgtcggtggaggaggggaggcggcgaggaggcgcagctcccgctgcaccgcgatcgacgctgcggagcgagcccacccgccccgggagctcgcctccccggtgctcccccgccctccccgcccccccagcggcgctgcctcctccaaatgagcgattcgcccgctggatctaacccaaggacacccgaaagcagcggcagcggcagcggcggcggcgggaagaggccggcggtgccggcagcggtgtccctcttgccaccggcggaccccctgcgccaggcgaaccggctcccgatcagggtcctgaagatgctgagcgctcacaccggtcacctcctgcacccggagtacctgcagccgctgtcctccactcccgtcagccccattgagctggacgccaagaagagccccttggcgctgctggctcagacctgctcgcagatcggcaagccggacccgccgccctcctccaaactcaactcggtggcggcggcggccaacgggctgggagcggagaaggaccccggccgctcagccccgggcgccgcctccgcagccgcggccctgaagcagctgggggactcaccggccgaggacaagtccagcttcaagccctactccaagggctccggcggcggcgactcccgcaaagacagcggctcctcctcggtgtcttccacctcctcctcgtcctcctcgtccccgggagacaaggcgggcttcagggtccccagcgccgcctgcccgccctttcccccgcatggagcgccggtctccgcatcctcgtcctcgtcgtcgcccggcggctcccgcggcggctccccgcaccactctgactgcaagaacggcggcggggttggcggcggggagctggacaagaaagaccaggagcccaagcccagcccggagccggcagccgtgagccgcggcggcggtggggagcccggggcgcacggtggcgccgagtccggggcctccgggcgcaagtccgagccgccctcggcgctggtgggggccggccacgtggcgccggtgtctccctacaagccgggccactcggtgttcccgctgccgccctccagcattggctaccacggctccatcgtgggcgcctacgccggctacccgtctcagttcgtgcctggcctggatcctagcaagtccggcctcgtgggaggccagctgtctgggggcctgggcctgccgccgggcaagccccccagctccagcccgctcaccggggcctccccgccctccttcctgcagggattatgccgcgacccctattgcttgggaggttaccacggcgcctcgcacctcggcggctccagctgctccacctgcagcgcgcacgaccctgccgggcccagcctgaaggcggggggctacccgctggtgtaccccgggcacccgctgcagcccgccgcgctctcgtccagcgccgcccaggccgcgctccccggccacccgctctacacctacggcttcatgctgcagaacgaaccgctgccgcacagctgcaactgggtggcagccagtgggccgtgcgacaagcgcttcgccacctcggaggagctgctcagccacctacggacccacacggccctgccgggagccgagaaacttctggccgcctaccccggggcctcgggcctgggcagcgccgccgccgccgccgccgccgccgcctcctgccatctgcacctccccccgcccgccgcccccggcagccccgggtcgctgtccttgcggaatccacacactttgggcctaagccggtaccacccctatggcaagagccacttatccacagcggggggcctggccgtgccgtccctccccacagccggaccctactattcgccatacgcgctgtatggacagagactagcttcagcctcggcgctgggataccagtaactacagctcttcctccaccccagccccctcaccctcctccctctccctcctcctccctccccacctgccgtcgccgctgcaacctccactactgcttgaccctgccgggattccccacccagcccttccccaccggactgtgtatttatttactataatgttagcttacaagctgggaatataagtgcattaacggcccacatgagtcaatggtatgcaaaaagtctgtgttctcccaaataataatattaatcccacaaataacgacatgatccccgcccctgttcctttctgttattttttcttagatataagttttacattttttattccttttcctctttttttggttttgattggtttggtttgagggagagttggggtctttgggttcttctagacgttttgttttcccttcctggggagtttcttgcatgagtcttaacttaaaactacgtttccgccttctctttttccctcttcccccttcattccctcttgtttccttccatttgcggttctgtttttgttttttgttttgttttgttttgttttttcctttgttgtacaagtaacagagaggaggttttttttgtaactcattttgggggtggagggggccacctgggtggcaggggccctggagctctattgacctggtacactgctccgggactcctcccccgccaccctccgcgcatagggtccttggtctggaccctgccccccaaaagtagggccttgctcctctaccttgctctgagcacggagagccctgaccccaccagtaggctcgcccccagaagggcccaagtggccgtctaccgtcaccttccagactcccgcccctaacacccagtggctacagtgcgcctgtcggggcacctggagcgctcacctggttgaattcaaagtcccagaaggccccgctggcgtgaagccggccccttacattttgcgaagtgcattatagtccttgtttttctctccctcgtgggggcaacgacccctcccctggcagtaggggtggggtaggtgactctcgctagatccctccaaagcagaccggtggcgatgtcagcggatgtcacgagctcgttagctgcgttcggggaaggttggggcgtcagggagctctcggatcacagcagcccccgccctctcctaggcctggcccggcagagcccccagagtggaccccccagcgactggggtcttctccccactcctccctccttctggtctgatgcggcagcgcgggggctgcggggcctgtttgggacgaacagagctctcccttggtaagacttattttgttaataaatggaatacttggctatattca

SEQ ID NO: 1034 - DNA, 2789 bp, Homo sapiens
  source 1..2789: mol_type = genomic DNA
aggctaggcgtggacccaactggcgaggctgctggggttgcagcgggacagttggggcggccccgcaggcccaggtttttgaaaataaagttaattcagagaaggtaaaactttctcttcggaatttcccacataatgattatgaggatgtttttgaagagccttcagaaagtggcagtgatcccagcatgtggacagccagaggccccttcagaagagacaggtggagcagtgaggatgaggaggctgcagggccatcacaggctctctcccctctactttctgatacgcgcaaaattgtttctgaaggagaactagatcagttggctcagattcggccattaatattcaattttcatgagcagacagccatcaaggattgtttgaaaatccttgaggaaaaaacagcagcgtatgatatcatgcaggaatttatggctttagaacttaagaatctgcctggtgagttcaactctgggaatcaaccaagcaacagagaaaaaaatagataccgagatattcttccatatgattcaacacgcgttcctcttggaaaaagcaaggactacatcaatgctagttatattagaatagtcaattgtggagaagagtatttttatatcgctactcaaggaccactgctgagcaccatagatgacttttggcaaatggtgttggaaaataattcaaatgttattgccatgataaccagagagatagaaggtggaattatcaaatgctaccattactggcccatttctctgaagaagccattggaattgaaacacttccgtgtattcctggagaactaccagatacttcaatatttcatcattcgaatgtttcaagttgtggagaagtccacgggaactagtcactctgtaaaacagttgcagttcaccaagtggccagaccatggcactcctgcctcagcagatagcttcataaaatatattcgttatgcaaggaagagccaccttacaggacccatggttgttcactgcagtgccggcataggccggacaggggtgttcctatgtgtggatgtcgtgttctgtgccatcgtaaagaactgttcattcaacatcatggatatagtggcccaaatgagagaacaacgttctggcatggttcaaacgaaggagcagtatcacttttgttacgatattgtgcttgaagttcttcggaaacttctgactttggattaagaaagacttctgttgcctctcacttgaaattaccaagtgggtttgcacctcctcataaagaacatgtttgcactgtgctgaagggctttgctatgcatacaatctgctttcttggtttatcagtttattttctttctaaaagctccctgaagggcaatatcatttggcttggggtgatcagtgtttacttattgatcttgctagacaatatcaaaataacttcccacattttccagtgaaacagatgttacataaaacgattgcagcttggctatttggttgaagggattacagagcccaataaaggatttaaaatatattcattaagattttatttggaaaggtggctggagagagctgaggatttccaggactttgtaagttcttattctgggagaacataaggccaataatcatgacctcttccaggcatttttaagacagatgtctattcatgttctttagctagagcctgtactttttgctggcatttgaataacccagtttaaaaagagtccagttagggtggactaactttggacacaaattggcttccatttcctacattttcatactgctgccttcctacagctgctagaccaagacctgttggtctgggaagcatttcatggatagggagagctcctctcggtgaacagtccaaaactaaaatagatgtttatatagaaagcccaagaggagacttttgccatgcctgagttctttcctatcccaccctaacacttaacatattacttagtctgctttgttaaaagcaagtattacctttaacttgcctcttactctttgccctttagctaactaataaagtttgatataggcattattatataattctgagtcattcatggtatctctcatgtttgatgtatttttcaaactaagatctatgatagttttttttccagagttccattaaatcatttatttcctttactttctcacctctgttgaaacatttagaaactggatttgggaacccaattttggaaaaccagattcatagtcatgaaaatggaaacttccatattctgtttttgaaaagatgtggccattattacagtaattttattataggactttgcctcgtacaattaatagtgatattttggacaaggagttctggtgacaagctatacctaattataagctataaaacaatagatatgagtgtttgtacagtttaactcaatggagatcagaatattctatgtattgagaaaatgtttaatatcaatctataaatcttgaatttctaagaggcttattttgttcttttggctgaatgagtatatttgaattggttgaataattaataattctcattgtaaaaataattatatgccaaaaatatatttgatgttaaatcaaatagatgattctgtttacattgttcatatgaataataatctgtgttaatttcattttgataattggcctttaatatttgtatctctaattttattttctctctgttactgtaaaataatagctataatgtataacaattttcttcagaagaattctatgctattattaaaataaaatatttactgtgta

SEQ ID NO: 1035 - DNA, 3670 bp, Homo sapiens
  source 1..3670: mol_type = genomic DNA
gtggtcttcccgcgcctgaggcggcggcggcaggagctgaggggagttgtagggaactgaggggagctgctgtgtcccccgcctcctcctccccatttccgcgctcccgggaccatgtccgcgctggcgggtgaagatgtctggaggtgtccaggctgtggggaccacattgctccaagccagatatggtacaggactgtcaacgaaacctggcacggctcttgcttccggtgttcagaatgccaggattccctcaccaactggtactatgagaaggatgggaagctctactgccccaaggactactgggggaagtttggggagttctgtcatgggtgctccctgctgatgacagggccttttatggtggctggggagttcaagtaccacccagagtgctttgcctgtatgagctgcaaggtgatcattgaggatggggatgcatatgcactggtgcagcatgccaccctctactgtgggaagtgccacaatgaggtggtgctggcacccatgtttgagagactctccacagagtctgttcaggagcagctgccctactctgtcacgctcatctccatgccggccaccactgaaggcaggcggggcttctccgtgtccgtggagagtgcctgctccaactacgccaccactgtgcaagtgaaagaggtcaaccggatgcacatcagtcccaacaatcgaaacgccatccaccctggggaccgcatcctggagatcaatgggacccccgtccgcacacttcgagtggaggaggtggaggatgcaattagccagacgagccagacacttcagctgttgattgaacatgaccccgtctcccaacgcctggaccagctgcggctggaggcccggctcgctcctcacatgcagaatgccggacacccccacgccctcagcaccctggacaccaaggagaatctggaggggacactgaggagacgttccctaaggcgcagtaacagtatctccaagtcccctggccccagctccccaaaggagcccctgctgttcagccgtgacatcagccgctcagaatcccttcgttgttccagcagctattcacagcagatcttccggccctgtgacctaatccatggggaggtcctggggaagggcttctttgggcaggctatcaaggtgacacacaaagccacgggcaaagtgatggtcatgaaagagttaattcgatgtgatgaggagacccagaaaacttttctgactgaggtgaaagtgatgcgcagcctggaccaccccaatgtgctcaagttcattggtgtgctgtacaaggataagaagctgaacctcctgacagagtacattgaggggggcacactgaaggactttctgcgcagtatggatccgttcccctggcagcagaaggtcaggtttgccaaaggaatcgcctccggaatggcctatttgcactctatgtgcatcatccaccgggatctgaactcgcacaactgcctcatcaagttggacaagactgtggtggtggcagactttgggctgtcacggctcatagtggaagagaggaaaagggcccccatggagaaggccaccaccaagaaacgcaccttgcgcaagaacgaccgcaagaagcgctacacggtggtgggaaacccctactggatggcccctgagatgctgaacggaaagagctatgatgagacggtggatatcttctcctttgggatcgttctctgtgagatcattgggcaggtgtatgcagatcctgactgccttccccgaacactggactttggcctcaacgtgaagcttttctgggagaagtttgttcccacagattgtcccccggccttcttcccgctggccgccatctgctgcagactggagcctgagagcagaccagcattctcgaaattggaggactcctttgaggccctctccctgtacctgggggagctgggcatcccgctgcctgcagagctggaggagttggaccacactgtgagcatgcagtacggcctgacccgggactcacctccctagccctggcccagccccctgcaggggggtgttctacagccagcattgcccctctgtgccccattcctgctgtgagcagggccgtccgggcttcctgtggattggcggaatgtttagaagcagaacaagccattcctattacctccccaggaggcaagtgggcgcagcaccagggaaatgtatctccacaggttctggggcctagttactgtctgtaaatccaatacttgcctgaaagctgtgaagaagaaaaaaacccctggcctttgggccaggaggaatctgttactcgaatccacccaggaactccctggcagtggattgtgggaggctcttgcttacactaatcagcgtgacctggacctgctgggcaggatcccagggtgaacctgcctgtgaactctgaagtcactagtccagctgggtgcaggaggacttcaagtgtgtggacgaaagaaagactgatggctcaaagggtgtgaaaaagtcagtgatgctccccctttctactccagatcctgtccttcctggagcaaggttgagggagtaggttttgaagagtcccttaatatgtggtggaacaggccaggagttagagaaagggctggcttctgtttacctgctcactggctctagccagcccagggaccacatcaatgtgagaggaagcctccacctcatgttttcaaacttaatactggagactggctgagaacttacggacaacatcctttctgtctgaaacaaacagtcacaagcaaaggaagaggctgggggactagaaagaggccctgccctctagaaagctcagatcttggcttctgttactcatactcgggtgggctccttagtcagatgcctaaaacattttgcctaaagctcgatgggttctggaggacagtgtggcttgtcacaggcctagagtctgagggaggggagtgggagtctcagcaatctcttggtcttggcttcatggcaaccactgctcacccttcaacatgcctggtttaggcagcagcttgggctgggaagaggtggtggcagagtctcaaagctgagatgctgagagagatagctccctgagctgggccatctgacttctacctcccatgtttgctctcccaactcattagctcctgggcagcatcctcctgagccacatgtgcaggtactggaaaacctccatcttggctcccagagctctaggaactcttcatcacaactagatttgcctcttctaagtgtctatgagcttgcaccatatttaataaattgggaatgggtttggggtattaatgcaatgtgtggtggttgtattggagcagggggaattgataaaggagagtggttgctgttaatattatcttatctattgggtggtatgtgaaatattgtacatagacctgatgagttgtgggaccagatgtcatctctggtcagagtttacttgctatatagactgtacttatgtgtgaagtttgcaagcttgctttagggctgagccctggactcccagcagcagcacagttcagcattgtgtggctggttgtttcctggctgtccccagcaagtgtaggagtggtgggcctgaactgggccattgatcagactaaataaattaagcagttaacataactggcaa

SEQ ID NO: 1036 - DNA, 837 bp, Homo sapiens
  source 1..837: mol_type = genomic DNA
gccggcgccagacgcggagggaaggagctacgagtagccgccgagaggccgcggagccagcgacgaccgacccagccgagccgccgccgccgccgcgcccccatggcggccgccaaggacactcatgaggaccatgatacttccactgagaatacagacgagtccaaccatgaccctcagtttgagccaatagtttctcttcctgagcaagaaattaaaacactggaagaagatgaagaggaactttttaaaatgcgggcaaaactgttccgatttgcctctgagaacgatctcccagaatggaaggagcgaggcactggtgacgtcaagctcctgaagcacaaggagaaaggggccatccgcctcctcatgcggagggacaagaccctgaagatctgtgccaaccactacatcacgccgatgatggagctgaagcccaacgcaggtagcgaccgtgcctgggtctggaacacccacgctgacttcgccgacgagtgccccaagccagagctgctggccatccgcttcctgaatgctgagaatgcacagaaattcaaaacaaagtttgaagaatgcaggaaagagatcgaagagagagaaaagaaagcaggatcaggcaaaaatgatcatgccgaaaaagtggcggaaaagctagaagctctctcggtgaaggaggagaccaaggaggatgctgaggagaagcaataaatcgtcttattttattttcttttcctctctttcctttcctttttttaaaaaattttaccctgcccctctttttcggtttgtttttattctttcatttttacaagggacgttatataaagaactgaactc

SEQ ID NO: 1037 - DNA, 2573 bp, Homo sapiens
  source 1..2573: mol_type = genomic DNA
cacgccggcgctccaggcgcggcaggctgccgcccccggaagtagtgggtaccgggacgccgtgaggcggaagctgtgtatggcgggaggctgtggcggtcccttggtggggaagctgttgctgttgctagacgacgggaactagctctcgtcacttcctcagcccgccgtctgcccactcctctagccggaacctgggggcccggagccggggtaggcacagagttgtcctcggaggtccaggacagcggccagcccggcggcgggagtcagggccacgccacctgcagggaagaacccgagtcgaagcgggaagatggctgcagacaagcctgcagatcagggagcagagaaacatgaaggcacaggtcagtcctctgggatcactgatcaagagaaggagttatccaccaatgctttccaagctttcacatctggaaattatgatgcctgtctacaacaccttgcctgtctacaagatataaacaaagatgattataaaataattttgaatacagcagtagctgagttttttaaaagtaaccaaacaacaacagataatttgagacaaacacttaaccagctgaagaatcaggtccactcagctgttgaagaaatggatggattagatgatgttgaaaacagcatgttgtactataatcaagcagtcattctttatcatctgcggcagtatacagaagccatatcagttggtgaaaaactttatcagttcatagagccttttgaagaaaaatttgcccaagcagtgtgttttttgcttgtagacctgtatatattaacctaccaagctgagaaagctttgcatcttcttgctgtcctagaaaaaatgatttcacagggtaacaataacaaaaatggaaagaatgagactggtaataacaacaacaaagatggatctaatcataaagctgaaagtggagctctaatagaagctgcaaaatcaaagatacatcagtacaaagtacgagcttatatccaaatgaagtctctgaaagcatgtaaaagggaaatcaagtcagtcatgaatacagctggaaattccgcaccctctctctttcttaaaagcaattttgagtacttaagaggtaattatcgaaaagccgtgaagctattaaatagttcaaacattgctgagcatccaggattcatgaaaacaggtgaatgcttgagatgcatgttctggaataaccttggttgcatccattttgccatgagcaagcacaatttgggaatattctactttaaaaaggctctgcaagagaatgacaatgtctgtgcacagctcagtgcaggtagcactgatccaggtaaaaaattttcaggaagacccatgtgtacgttactaaccaataagagatatgagttgctgtataactgtggaattcagcttcttcacattggaaggcctcttgctgccttcgaatgtctgattgaagctgttcaggtttatcatgcaaatcctcgcctctggctacggctggctgaatgctgcattgctgccaataaggggacttctgaacaagaaactaaaggccttcccagcaaaaaaggaattgtacagtctattgttggtcaaggctatcatcgtaaaatagttttggcatcacagtctatacagaatactgtttataatgatgggcagtcttcggccattcctgtagccagtatggagtttgcagccatatgtctcagaaatgccttgttgctgctacctgaagaacagcaagatccaaagcaggaaaatggggctaaaaatagtaatcaattaggtgggaacacagagagcagcgaaagcagtgaaacttgcaggtgctccatacttgcttgcagtgcctacgtggctctggctttgggtgataacctcatggctttgaatcatgcagataaacttcttcagcagcccaagctgtcaggatctcttaagtttttgggacatttatatgctgcagaagccctcatctctctcgacagaatatctgatgccattactcacttgaacccggagaatgtcactgatgtctccttagggatctcttcaaatgagcaggaccaaggatcagacaaaggtgaaaatgaagcaatggaatcctctggtaagcgggcccctcagtgctaccccagttccgtcaactctgccaggactgtgatgctgttcaaccttggcagcgcttactgcctgaggagcgaatatgacaaagcccgaaagtgtctccaccaggcggcttcaatgatccatcctaaagaggtgccccctgaggccatcttgctggcagtctaccttgaactgcagaatggtaatactcagctggccttacagatcatcaaaaggaatcagctgctccctgcagtgaaaacacactctgaagtgagaaagaagccagtgtttcagcctgtccacccgatccagcccatccaaatgccggctttcaccactgtgcagagaaagtgatacttcacttttggaaaactgttacctgagacccaggggagaatttactggccattttagttgtatcacagcagaatgaataaaagatggtgaaggctgttaa

SEQ ID NO: 1038 - DNA, 2056 bp, Homo sapiens
  source 1..2056: mol_type = genomic DNA
caggatgtaccaaacgtggaagcggagacggggaggtctgggggtgccacgcaagtccctttcctcccgacacgagtgcagtaaagaaaaacggttatgagcgtaaagtgacagcctcggccgatgggaatagggggaagtccgacactgagcaacgaacgcattcccgcgcctccaaaacctaggccgggggcgctggaaacccttaccggcacccggccaccgcggcagacgcttgctcctgccacgccccccccccctcccccgcatcacgtgtctgcactcgctttcctcggattcccggatgtggttgccaaaacaaaggggatttggtgatggaggctttgttagaaggaatacaaaatcgagggcatggtgggggatttttgacatcttgtgaagcagaactacaggagctcatgaaacagattgacataatggtggctcataaaaaatctgaatgggaaggacgtacacatgctctagaaacttgcttgaaaatccgtgaacaggaacttaagagtcttaggagtcagttggatgtgacacataaggaggttggaatgttgcatcagcaggtagaagaacatgaaaaaatcaagcaagagatgaccatggaatataagcaggagttgaagaaactacatgaagaattatgcatactgaagagaagctatgaaaagcttcagaaaaagcaaatgagggaattcagaggaaataccaaaaatcacagggaagatcggtctgaaattgagaggttaactgcaaaaatagaggaattccgtcagaaatcgctggactgggagaagcaacgcttgatttatcagcaacaggtatcttcactggaggcacaaaggaaggctctggctgaacaatcagagataattcaggctcagcttgtcaatcggaaacagaaattagagtctgtggaactttctagccaatcagaaattcaacacttaagcagtaaactggagcgggctaatgacactatctgtgccaatgagttggaaatagagcgcctcaccatgagggtcaatgacttggttggaaccagtatgactgtcctacaggagcagcagcaaaaagaagaaaaattgagggaatctgaaaaactattagaggctctgcaggaagaaaagagagaattgaaggcagctcttcagtctcaagaaaatctcatacatgaggccagaatacaaaaggagaagttacaagaaaaagtaaaggcaactaacactcaacatgctgtagaagctataagtttggaatctgtgagtgcaacgtgtaaacagctgagccaagaactaatggaaaaatatgaagaactgaagaggatggaagcacataacaatgaatacaaagcagagattaagaagttgaaagaacagattttacagggtgaacaaagttacagttctgcactagaaggaatgaagatggaaatctcccatctaactcaggagttacatcagcgagatatcactattgcttccaccaaaggttcttcctcagacatggaaaagcgactcagagcagagatgcaaaaggcagaagacaaagcagtagagcataaggagattttggatcagctggagtcactcaaattagaaaatcgtcatctttctgaaatggtgatgaaattggaattgggtttacatgagtgttccttgcctgtatctccccttggttcaatagctaccagatttttggaagaggaggaactgaggtctcatcacattctagagcgcttggatgcccatattgaagaactaaaaagagagagtgaaaagacagtgagacaattcacagccttaaagtagcctcttaaaaaaatcactatcttggaaataaaaataaacaccaaagagttactgtcatctgaagtagcagctctttaaaaacatgaagagataaaattataaaaatgatacatctaaagcagtggtgaagaaagctgaaaaactgatacttttgataggcattttctctgcactggtttgtttaaaggacttcttccagcaataagttgaaagaataaaccactttgctagac

SEQ ID NO: 1039 - DNA, 4699 bp, Homo sapiens
  source 1..4699: mol_type = genomic DNA
gggaccaagagcggaagtgggtgtgacggggacgggggcccggtgggcccgcggaggaaagatactggggagtgggagccgcggggttcagagcgatgattcccccacaggaggcatccgctcgacggcgggagattgaggacaagctgaagcaggaggaggagactctgtccttcatccgagacagcctggagaagagcgaccagctcactaagaacatggtgtctatcttatcatcctttgagagccgccttatgaagctggagaactccatcatccctgtgcacaagcagacggagaatctgcagcggctgcaggagaatgttgagaagacgctgtcctgcctggaccatgtcatcagctactaccatgtggccagtgacactgagaagatcatcagagagggccccacaggtaggctggaagagtacctgggaagcatggccaagattcagaaggcagtggagtatttccaggacaacagcccagacagcccggaactcaacaaagtgaaactgctctttgagcgcgggaaggaggccctggagtccgaatttcgcagcctgatgacgcggcacagtaaggtcgtctcgcccgtgctcatcttggatctgatcagtggtgacgatgatctggaggcccaggaggacgtgaccctggagcacctgcccgagagcgtgctccaggatgtcattcgcatctcccgctggctggtggaatatggccgcaaccaagatttcatgaacgtctactaccagatacgctccagccagctggaccgctccatcaaaggactgaaggagcatttccataagagcagttcttcctctggggttccctactcccctgctatccccaacaagaggaaagacacacctaccaagaagccagtcaagcggccagggagagatgacatgctggacgtggagaccgatgcctacatccactgcgtcagtgccttcgtcaagctggcgcagagcgagtaccagctgctggccgacatcatccccgagcaccaccagaagaagaccttcgactccctgatacaggatgccctggatgggctgatgcttgaaggggagaacatcgtgtctgctgcccggaaggccattgtgcgacacgacttctccacggtgctcaccgtcttccccatcctgcgacacctcaagcagaccaagcctgagtttgaccaggtgctccagggcacggctgccagcacaaagaacaagctgcctggcctcatcacatccatggagaccatcggtgccaaagcgctggaggacttcgcagacaacatcaagaatgacccggacaaggagtacaacatgccgaaggacggcaccgtacacgagctcaccagcaatgccatcctcttcctgcagcagcttttggacttccaggagacggcaggcgccatgctggcctcccaagagaccagctcttcggccaccagctacagctctgagttcagcaagcggctgctaagcacctatatctgtaaagtgctgggcaacctgcagttgaacttgctgagcaagtccaaggtgtacgaggacccagctctgagcgccatcttcctgcacaacaactacaattacatcctcaagtccctggagaagtctgaactgatccagctggtggcagtgacacagaagactgctgagcgctcctaccgggagcacattgagcagcagatccagacctaccagcgcagctggttaaaggtgactgattacatcgcagagaagaatctacctgtgttccagccgggagtcaagctccgggacaaggagcggcagattatcaaggagcgttttaagggcttcaatgatggcctcgaagaactgtgcaaaatccagaaggcctgggctattccagacacagagcagagggacaggattcgccaggcccagaagaccattgtcaaggagacctacggggcctttctacagaagtttggcagcgtgcccttcaccaagaacccggagaagtacatcaagtacggggtggagcaggtgggcgacatgatcgatcgccttttcgacacctctgcctgagcctgctgctagccctgcctggttccaccagactggcgtgtcattggacagataaaccagtgttagcttgcctctgggctgggtgagcttgaagtcctctgggacagagacctgtctccacgcctccgggagctgtgtccctgagccccctagtcctggctcctgctttttccccacagcccgtgttcccagccgaaccagcactctcccggaagcctggggtccctccacaccttggcttttatgaccctgatggcttctgaaacaggaaaagagagaaggaagacagaggcctgtgcccactgctgctccatgtgtaccaagagcagcagggcagaagggccctccctccagcctaggtcagaggtggggacagagaactcccctacagcccagagatgtggcagggctcagagaagcagccagagctcctggaggaaaggcagtcgggactgaccccctctcttaaaacacattcccgcccgcccacaggcctgaggtctgggacctttccctcccaggagtcccctaggtggctgggggaggcaggctcactggccattttccctagagtccagcacactgcaggaggcgttcggaggaggagttccgccccaccctctacagccttcctcaggcccctgtctctggcccccagcctcagtgcctcttggcccagggccaggcagtcgtggttgcagaaggagcaattaggctgcctgcctgtgggctgggagacagggacaatggggaaaagttaaggagcaaaatgggggttggaagcaaaaaatagggccccacctatttaggacgagattgaagactgacccttgaggcacacttgcactggagatgggtttatttcacgctctgtgcttgtgtgctagcggagggagagctcagggtggcttaatccagaggccctgtcatggcccgcccccagccatgggaaagcaaacttcatcctaaggtgtgcagcccaggccctgcccctttacagtctaggccgcctgccatggggtgcagcctctccaggggctgcgtcagacttgcacgctgcccacatccagattcctgcaaagacgaattgggtgcacagcaccccaaccacatacacgaggaagaagatgcggtcagcagtctcaggccagcttctctgtgacccctttactcctctggagggctctgtggggagagatacagggaaaggagctgttcttcaaggtcccctcaacatgagcggaagagcgaaccccaggggtcatcagcctgtatcgcttcctttcttagattctcagctgatgaaaatttgggtctggcccatttcaggccatcttcagttgaagaaacaccctcttaggctgtgcaaggcatgggttatcaggggattgaggtcacctgggacttcagggaggctcagcttgctccctgccccagacctgtttcttctaagggaggaggacatggtggagaccagggacaggagagccagcagggtggatgcaaggggcctctacccacacctggacctccgtgccctcaccccagccctaggtgtgcacctaggcctcattccttaccccccagcccctgcccaccttcagcaggatgaggccctgggttgccgtgctctcgctgttcccctctcggggctgggctggggccgctcttggccccaaggttgccccgggccagcagcccagccagcagcacagtctctatggtgctgaggaagagcagcagcagcaggatggtgaagtagtaaactgggggaggcagggcacagggagatgctcaggggccagtccctgtgtctctggtgcccagcgagctgagcaccagtgggtgaccggggagaaacagggcagactgggtaagggagcagggcttactgagcagtgggttgcaggaggaggagctgggcagggcctgcaccagggaggagtggaggacgaggtaactcagcagcaatgtcaccttgtagcctatgcgctcaatggcccggaggggcagcaaccccccgcacacgtcagccaacagcagtgcctctgcaggcaccaagagagcgatgatggacttgagcgccgtgttcttcagcctcagctggaaggggaaaagtcagggccttcccggcgggggggaaggaggtgggcatcgggggcatggggcctggcctctggccgtgcatcctcactcccacccgcctccagcagccctctgtcggcctcctcccgacttgactcaccgtcacctggaagcagggcaccagctgctggggtgggacttgggtcttcagatcataaactacgtattccctcttgacactcacaatctcgttcaccacgtgggcctggaactctaactccatcgctgaggggtgggaatgagaactatgaaccaggaaggagagatcccagctgccaagtctgggggtagcagactggagcccaggggtgatggagacttttgatggcttttggcagggacagacttggacacaaaaccgatccatagaagggcttcccaaaccttgttttgcaacatcccaaattgtctccagttgaaggaaggcctttatcagattcatagatgagctttcattgtaaaaataaatgtactttgcaccacttcatgatggaggg

SEQ ID NO: 1040 - DNA, 3390 bp, Homo sapiens
  source 1..3390: mol_type = genomic DNA
agaaggggaaacaggaatcgattaggaataaaggattataatccactttccttctgaggaaaagctgggaaccttctcattttgccttatgaaaactaagctgaatcgactgctgccaaacatctattaggcaaaattggcctcttgcccatgatttgactttccagcacagccagttctttttctcctctgcagctgattggctctggagtgtggccagaagcctctctcctgcaattaaaggagtcgggtctctaactgttgatctgtttttttcccttctgagcaatggagcttaccatctttatcctgagactggccatttacatcctgacatttcccttgtacctgctgaactttctgggcttgtggagctggatatgcaaaaaatggttcccctacttcttggtgaggttcactgtgatatacaacgaacagatggcaagcaagaagcgggagctcttcagtaacctgcaggagtttgcgggcccctccgggaaactctccctgctggaagtgggctgtggcacgggggccaacttcaagttctacccacctgggtgcagggtgacctgtattgaccccaaccccaactttgagaagtttttgatcaagagcattgcagagaaccgacacctgcagtttgagcgctttgtggtagctgccggggagaacatgcaccaggtggctgatggctctgtggatgtggtggtctgcaccctggtgctgtgctctgtgaagaaccaggagcggattctccgcgaggtgtgcagagtgctgagaccgggaggggctttctatttcatggagcatgtggcagctgagtgttcgacttggaattacttctggcaacaagtcctggatcctgcctggcaccttctgtttgatgggtgcaacctgaccagagagagctggaaggccctggagcgggccagcttctctaagctgaagctgcagcacatccaggccccactgtcctgggagttggtgcgccctcatatctatggatatgctgtgaaatagtgtgagctggcagttaagagctgaatggctcaaagaatttaaagcttcagttttacatttaaaatgctaagtgggagaagagaaaccttttttttggggggcggtttttttggtttgttgttggttttttttttttttttggcgggaagaaagagttttgctcttgttgcccaggctggagtgcaatgacgtgatctccgctcactgcaacctccacctcgcgggtttaagcgattcttctgcctcagcctccctagtagctgggattacaggtgcccaccaccatgcccagctaatttgtatttttagttgagacagggtttcactacgttggccaggctggtcttgaactcctgatctcaggcaatccacccacctcagcctcccaaagtgctgggatgacaggcgtgagcaaccgcacccagcttaaggtttttttgttttgttttgagacggagttttcgctcttgttgcccaggctggagtgcaatgctgtgatctcagcttaccacaacctccacctcccgggttcaagtgattcacctgcctcagcctcctgagtagctggtattacaggcatgcgtcaccacgccggctaattttgtacttttagtagagatggtgtttccccacgttggtcagtctggtctcaaattcctgacctcaggtgatctgcctgcctcggcctcccaaagtgctgtgattacagacgtcagccaccatgcctggcctgaaaccttttttaggtaaagttgaattccatccttaaaagtttctgttatatcctatttagccattttctattgtctcccaaagaattcacatcaaaaaaacagctttgaactcccccttcaaaggaaacagtcgactttcataattagcatctaccattatccccaaatcttattttattcattgacttgaaattttttccaattgcttttttttttttttttttaaggttaagagcagaggtttactaggccaaagaaagagaatagctctctgttgcagagaggggtcctggagaaatgggttaccccagttgtcttatttaaatggttacccatcagattttaattttatcttctctttgagagcttggtaataagaagcacttaaatcactccaaagaagactttaaaaagggagcagtgaaaaggtcttaataatttattgattgaattaagaaatactagctaattaagaatctgagtctaaacagcacagattttttctttctgcttttaaattgtgttttaaaaaaagagacagggggctgggcgtggtggctcacgcctgtaatcctagcactttgggaggccgaggcgggtggatcacgaggtaggagttaaagaccagcctggccaacatggcaaaaccctactaaagatacaaaaaaaaaaaaaaattagccaggcgtggtggtgggtgcctgtaatcccaggtacttggaaggctgaggcaggagaatctcttgaacccagaaggcgaaggttgcagtgaaccgagatcatgccattgtactctagcctgggtgacaagagcaagactccgtctcaaaaaaaaaaaaaaaaaaaaaaagaagtagagacagggagacagggtctcactgtgttgcctaggccggtcttgaactcctgggctcaagtgattctcccaccttgacctcctaaattgttgggattacaggtgtgagacagtgcacctggccgaaatagctcaagtttctgaaaaacaaatctgaatctatttgttattcttagcgtcactggtctggctttcagaattaacatacaaggttgccacacctagttctgcccagctttatgtcttttattccagtattccaccaaagtttgttttcctgcattccagttctcaagtcttaagataaagattgtacttgacagtttagtatatccataaaactatttgaggtggttaaggttcttgggttcattttccttaatactttgctgaatattgtagattgtaggcaatgaaaaagtctactaaattaggaaaaccttgaataattaggtatcctaggtaagagcccctaaacatcaagcaatctgtgagtctgtaaagaaataaatattttttggattattcttatctaattccacccctgttggaagatgatttctttgttctttgcaactatggaagctgtgaaaatcatcacaagtgcctctgaaagcgagtgttaggttggttagagggtttaatattttctgcaatggtttgtaggaattttaataaatgtagtatattttctgagatgattttgtaaaagtactattttaaatatcaaatcaaccaataaattcacatttgtgttaggaacagaaatatggttta

SEQ ID NO: 1041 - DNA, 5812 bp, Homo sapiens
  source 1..5812: mol_type = genomic DNA
aagtcacgtgctgtgacagtagctggggtgaggccgtcgtcgccgcacgggctggttggggctgtgtctgtgggaggcgccggggtgatggcggtggagactctgtccccggactgggagtttgaccgcgttgacgacggctcgcagaaaattcatgccgaagtccaacttaagaattatgggaaatttcttgaggagtatacctctcaactgagaagaattgaggacgctctggatgactcaattggagatgtttgggatttcaatcttgatcctatagcattaaagcttttgccttatgaacagtcctctcttttggaactcataaagactgaaaacaaggtcttaaacaaagtcatcactgtttatgctgcactttgttgtgaaatcaagaaattaaaatatgaggctgaaactaaattttacaatggtctcttgttttatggagaaggagctacagatgccagcatggtggaaggtgattgccaaattcaaatggggagatttatttcattcttacaggaactgtcttgctttgttacgaggtgctatgaagtggtgatgaacgtagtccaccagttggctgccctctatatcagtaacaagattgcacccaaaattatagagacaactggagttcattttcagactatgtatgagcacttgggagaactgctaacagttttgctcaccctggatgaaattattgataatcatatcacactgaaagaccactggactatgtacaaaaggttactgaaatctgtccatcacaatccttcaaaatttggaattcaggaagaaaaattaaagccatttgaaaagttcttgctgaagctagaagggcaattactggatggaatgatattccaggcctgtatagaacaacaatttgattctctcaatggaggagtatctgtgtcaaaaaatagtacttttgctgaggaatttgcacatagtattcggtcaatttttgcaaatgtagaagccaaacttggagaaccttctgaaattgaccagagagacaagtatgttggaatttgtggactctttgtattgcactttcagatttttcgaactattgataaaaagttttataagtctttattggacatttgtaagaaggtaccagccatcactctaactgctaatattatttggtttcctgataattttctgatccagaaaataccagcagctgccaaactgctagacagaaaaagtcttcaagccattaaaatacacagggatacttttctacaacagaaagctcaatcacttaccaaagatgtacagtcttactacgtctttgtgagctcatggatgatgaaaatggaatctattttgtctaaagagcagagaatggataaatttgctgaagatctcaccaatagatgtaatgtttttatacagggcttcttgtatgcatatagtattagtaccattattaaaaccacaatgaatctctacatgtccatgcaaaagccaatgaccaaaacctcagttaaggcattgtgcaggcttgttgaacttctcaaggcaatagagcatatgttctacaggagaagcatggttgtggctgattcagtttcacatataacacagcaccttcaacatcaggctcttcattctatttctgtggccaagaaaagagtgatttctgacaaaaaatacagcgaacagcgtcttgatgtgctctctgctctagttttggctgaaaacactctaaatggaccaagcacaaagcaacggcgacttattgtttctttggcactaagtgttggcacacaaatgaaaacatttaaagatgaagaactctttccacttcaagtagtcatgaaaaaactggatcttattagtgaacttagagaacgagtccaaacacaatgtgactgttgttttttatactggcatcgagctgtcttcccaatttatttagatgatgtatatgaaaatgctgttgatgcagccagattacattacatgttcagtgctttgcgcgactgtgtacctgctatgatgcatgcaaggcatttagagtcctatgagatacttctggattgctatgacaaggaaattatggaaattttaaatgagcatttgctggacaaattatgcaaagaaatagagaaagatctgcgactttctgtgcatactcatttaaagctggatgaccgaaaccctttcaaagttggcatgaaagacctggctctttttttctctctgaatccaattcggtttttcaatcgtttcattgacattcgggcttacgtaactcactacctagacaagactttctacaatctaacaactgtagcccttcatgactgggccacttatagtgagatgagaaacttagctactcagcgttatggactggttatgacagaggcacatcttcccagtcagactttggaacagggccttgatgttttagaaattatgagaaacattcatatatttgtgtcccgatacctctataatctcaacaatcagatttttattgaacgaacaagcaataacaagcatttgaatactattaatattcggcatattgctaattcaattcgaacacatggcacgggaattatgaatacaactgttaatttcacctaccagtttttgaaaaagaagttctatatatttagccaatttatgtatgatgaacacatcaaatccagattgattaaagatattcgatttttcagggaaattaaggaccaaaatgatcataagtatccttttgatagagcagaaaaattcaatcgaggcatcagaaaacttggagtaacacctgagggacagagctaccttgatcaattcaggcaactcatcagccagattggtaatgctatgggctatgtacgaatgataagatctggtggtcttcattgtagcagcaatgccattagatttgttcctgatcttgaagatattgtaaattttgaagaactagtaaaagaagaaggtcttgcagaagaaacattaaaagcagcaaggcatttggattcagtcctcagtgatcacacacgaaattctgccgaaggcacagaatatttcaaaatgcttgtagacgtttttgctccagaatttcgaaggccaaagaatatacatctccgaaatttctatataattgttccccctctgaccctcaactttgtagagcattccattagttgcaaggaaaaattaaataaaaaaaataaaattggagctgcctttactgatgatggctttgccatgggtgtggcttacattctaaagcttttggatcagtatcgggagtttgattcacttcactggttccagtctgttagagagaaatacctgaaggagataagagcagttgctaagcaacagaatgtacagtcagccagtcaagatgaaaaactcttacaaaccatgaatctcactcagaagcgactggatgtctatctacaggaatttgaattgctgtatttctcactgagcagtgcaagaattttcttcagagcagacaagactgcggctgaagaaaaccaagaaaagaaagagaaggaagaagaaactaaaacaagcaatggagacctgtctgacagcactgtgtctgctgatcctgttgtgaaatgatacggatggtattcactgcacatatgatgaaatcatcagaattgttaaaacttttgccagtggaatggataaactattgatgaattgtttcctgggtcacatctctggaaaatagatgttacagttcttaaaggcagtgctttaaagtgaagttcattctgtttccaaaggctctactttcaaaggttaagaatgagattttaaaattggatttttgcctggacttgagggtacaagatgtttctatttgaagtgaagttataaaagggcaaatccagattcataaactatcacctcggatttcttgtaatctacatgtttgtaatttgtatttgcatagatctttgatctatagttatttcaagtcatgggaaattcaatgcatatactatatacagccagtaaatacatgcttaacaaaaggaatgagcctgaagttcataaagaatacatatcaatattcttataaaaggaatatatgaagatggctttgatactagaggtgaggcacaagtgttttatgtactctcagtgtacagtataactgatgatccttctttcattgttaatttcatgtgactcacaagagctgctgatgtctttgatgagacattttataactagtttacattgctttgagaacatttaacctccaacagctgctttaaatttaagatttacttaatactcagaaaattcagataaagccatagagtcctgtttgaagcttcacttctattttggttgaaggcatgatgtatgatgtcagaaaaaaaattgaatgaattatttctacatccaaactcaggtttcttctacattagattgaattgaaattttggtgatggtttgggtagactttttttttatatcaagtataatttaaaacatcagattaaataattacactgttcaggcttttaaaaaaataccactgtgagaataaagcgctagcaagatacatcacttactgattttaaaaatacagaaagattttgagtaaattttgtgcccagcaagctgttagttttatttttgtaaaggtatgtaagttattaaatggttaatcatggccttttaaaaataaaataaagtgatacctttacaatgaagacaaaagtttaaaactttctaatacaaacaccattttgggaaatgcttgatttttttctattgcatttgtctgctaaacatttctttggataaatcctgcaaatacttctaacattattctttgattccagcttttagaatgggtgtacaatgccctgtttgtacttactggttagggtcagggtaacttgccagcccaagataaatactttaattgttaaaagtcagaagagacagaatatgtaggaaatgttttttgtttattatgtaaacatggcttacagaattatgaacagtggatagattaaaggcatttaatatttgtaattcataataactgtagaaatggccctaaagcatgctgcataattaataatttatattttcattattataagtgtttatattaatgatcttgcatttgattatatcaaattcgtcatttcatagcaacagtattgttttctctgtttttcttctctaacttctctgaaatcatctcctattaagggatagaaattgttactagaagagaatcacatgttctgtgttcattatccctacacatgtaaattaattattttatcaatactagatagagttcacatgctgactccctggatacctacagttgagaagaaaatgacagacaattatttttcctttaggtcaaaataatgtcactgctatctggataaattataagttcatatatttgaaataagatcctggaaacgaatttaaatggtgtcaaactgcagagcaacagggcttcagtatattcacatctaataggttaatatgtacatttggatgatgatttttcttgataacattaacattaattttattttttcagacatactgtaatttaaaaattaatgtgagcgtttgttttaagttcacagaaaacttaataattcaaattctcaggaattaaggactcaccataacattgtcagttctaatgaaattttgtaaaagatggcaagtttgttacctcacttgagtggggttttccttttcccccaattctaagagaatataatgtgtatactaaaacattaataaacataattttgaaaatttc

SEQ ID NO: 1042 - DNA, 1737 bp, Homo sapiens
  source 1..1737: mol_type = genomic DNA
acctgagctgagactagtgcccctgtggaggggtagtgtgggagggcccccagggtgacacttggaggcaaaggctggttctgggcagagtcacagtgagctgggcagaagcctcgcctgaggatcccgtggccccaatttgtgtgcagatagcagaggcagcaggccgtgccgggggggcatgttgctgtaaccagtggcccaggggatgttacggtggacagtgcacctggagggcgggccccgcagggtgaaccatgctgcagtggctgtcgggcatcgggtatactccttcgggggttactgctctggtgaagactatgagacactgcgtcagatagatgtgcacattttcaatgcagatacgcacaagtggttcacaccccgagtgtcagggacagttcctggggcccgggatggacattcagcctgtgtcctaggcaagatcatgtacatttttgggggctacgagcagcaggcggactgtttttccaatgacattcacaagctagataccagcaccatgacatggactcttatctgtacaaagggcagccctgcacgctggagggacttccactcagccacaatgctgggaagtcacatgtatgtctttgggggccgtgccgaccgctttgggccattccattccaacaatgagatttactgcaaccgcattcgagtctttgacaccagaactgaggcttggctggactgtcccccgactccagtgctgcctgaggggcgccggagccactcggcctttggctacaatggggagctgtacatctttggtggttataatgcaaggctgaaccggcacttccatgacctctggaagtttaatcctgtgtcctttacctggaaaaagattgaaccgaaggggaaggggccatgtccccgccggcgccagtgctgctgtattgttggtgacaagattgtcctctttgggggtaccagtccatctcctgaggaaggcctgggagatgaatttgaccttatagatcattctgacttacacattttggactttagccctagtctgaagactctgtgcaaactggccgtgattcagtataacctagaccagtcctgtttgcctcatgatatcaggtgggagctgaatgccatgaccaccaacagcaatatcagtcgccccatcgtctcctcccatgggtaggaggaagtttctgccacctcccctcctgagcctgctgtcatcttcactgcccctgcccatctgtcacccacctgctcctttgacccctggacttggtatacctccatgtggagttgttgggcgagaggtgttctctgtgctgtgaattcagtggggagctgtagcggggtgggggctaggttcctccccccttgggccgagggccccttccccttggtgctctgtccccatccacctcctttcagctgctcctgggcctcagctctgcccagggccagccaggttctgctgggaagggaagggaatggggagaagggagaagcaagcagtgtctgagcctcaggagcttccccctccccctttgcctatcccctcccctctgcttgagccttgagccttgactgggagctgaaaggagttgcagctgttggcatgagacctccttctccccgtcttggggaggtggggaccagcagataaatcccacccttccttgagctgtcgctgtactctgaagttcagccagctcagattttataaaaattaattaaaatctc

SEQ ID NO: 1043 - DNA, 3484 bp, Homo sapiens
  source 1..3484: mol_type = genomic DNA
gcctactttggtgcagaggcgtggggggcgggacgcgtctttcccgttcggatcgcggggaaagcagtggctccaagtgagccagaggagagctgaggagaggagggggaggccgacgacctgggccctgggcctctgaaggcctactttaaggctggccaattctgcaagaaaggcaaggaggaggagactggctcacagctctggaggacccccttctgtcagctgtggggcttgacaccacttgaacaagaaaaggagggggaaactgcaccacatcagtgaagatccacctccagtggctgctctgctggtggtggagttgctgctgacaaccaccctcaacgggtctgcacccatccaggaaatatctgtcttcctttagcttggttgtacctgttctcactctatctgtattattgaattattgactgagactgtgtttgggaaggaggctgagtgactactggactggatattgactctaactcttattcccaagcttatatccttaatcacctaaagatcagagtgtgaagaaacaaacctgtgacagatctgtggttgaggtttagactacgggaggagtatattacctgactttctttgtaacttgtaccatgactggggcagagattgagcctagtgcccaggccaagcctgaaaagaaggctggggaagaggttatcgctgggcctgagagagagaatgatgtccctctggtggtcagacccaaggttaggacccaggcaactactggggcaaggcccaaaactgagaccaagtctgtgcctgcggcaaggcccaaaactgaggcccaagcaatgtctggggcaaggcccaaaactgaggtccaagtaatgggtggtgcaagacccaaaacggaggctcaaggaatcacaggggccaggcccaaaaccgatgccagggcagtaggtggcgctcgttctaaaactgatgccaaggcaatccctggagcaaggcccaaggatgaggcccaggcatgggcccagagtgaatttgggactgaagcagtgtcacaggcagaaggagtgtcccagactaatgccgttgcttggccactggccactgctgagtctggatcagttactaaatctaagggcctgtctatggatagagaactagtcaatgtggatgctgaaacctttcctggcacccagggtcagaaaggaatccagccctggtttggaccaggggaggagactaatatggggtcttggtgctattccaggcccagggccagagaggaggcctctaatgagtctgggttctggtcagcagatgagacctctacagcgtcttctttctggactggagaagagacaagtgtcagatcatggcccagggaagagtccaataccaggtccaggcacagggctaaacatcagactaatcccaggtccaggcccagatccaagcaagaagcctatgttgattcctggtctggatctgaggatgaggccagcaacccattctccttctgggttggagaaaataccaataacttgttcaggcccagagtcagggaggaggcaaatatcaggtccaagctcaggacaaatagagaagattgttttgaatctgagtctgaagatgagttctataagcagtcctgggttttgcctggagaagaggccaatagtagattcaggcacagagacaaagaagatcctaatactgccttgaaactcagggcccagaaagatgttgacagtgatagggtcaaacaagaacccaggtttgaggaggaagtcattattgggtcctggttctgggcagaaaaagaggccagtttggagggtggagcttcagcaatctgtgaatctgagccaggaactgaggagggggccattggcggatccgcgtactgggctgaggaaaagtccagtttgggggctgtggccagagaagaggccaagccggagtctgaagaagaggccatatttgggtcctggttctgggacagagatgaggcctgctttgacctaaatccctgtcctgtgtacaaggtcagtgataggttcagagatgcagctgaggagcttaatgcatcctccaggccccaaacctgggacgaggtcactgttgaattcaaacctggtctttttcatggggttggcttccgatccacaagcccctttggaattcccgaagaggcttctgaaatgcttgaggcaaagcccaagaacctggaacttagcccagaaggagaagagcaggaatctttgcttcagcctgatcagcctagtcctgagttcacatttcagtatgatccttcctaccggtcagtccgggaaattcgagagcatcttagggccagggagagtgcagagtctgagagttggtcctgcagctgcatacaatgtgagctgaaaattggttctgaagagtttgaagaattccttttattaatggacaaaattcgggatccttttattcatgaaatatctaaaattgcaatgggtatgagaagtgcttctcaatttacccgagatttcattcgagattcaggtgttgtctcacttattgaaaccttgcttaattatccatcctctagagttaggacaagttttttggaaaatatgattcacatggctccaccttatccaaatctaaacatgattgagacattcatatgtcaagtgtgtgaggaaacccttgcacatagtgtggattcccttgagcagctgactggaataaggatgcttagacacctcactatgactattgactatcacacactgattgccaactatatgtccgggtttctctccttattaaccacagccaatgcgagaacgaagtttcacgttctgaaaatgctattgaatttgtctgaaaatcctgctgtggcaaaaaaactattcagtgccaaagctctttcaatatttgtgggtctctttaacatagaagagacaaatgataatattcaaattgttattaaaatgtttcagaatatcagtaacattataaaaagtggaaagatgtccttaattgatgatgatttcagtcttgagccgcttatttctgcatttcgtgaatttgaggagttagctaagcaactacaagcccaaatagacaaccaaaatgatcctgaggtgggacaacaaagttaatatgattaaccacctgccgctgatcagccttatgttcccaaagagccctgagtagtgctttggtgttcacagtctgtttttttgttgtaacttatattttttaatgctgatgttaactttgtcaaactcttgttttgagctggatcattttgtggatgccaaatgaatatcaaaactgaaaacacatttgttgatatttgtcttgctgtccagattgcggtatttttcagtattaagttttcaatgaactgtgtcacctaagtaagctaccctgctattcgttgtttaaatatatggttctctatttgagtctgtgttttcaataaagttctatgttaaaattggca

SEQ ID NO: 1044 - DNA, 3504 bp, Homo sapiens
  source 1..3504: mol_type = genomic DNA
tgctgcctcagcctcccgagtagctgggactacaggtgcccgccaccacgcccggctaattttttgtatttttagtagagatagggtttcactgtgttagccaggatggtctccatctcctgacctcatgatctacccgcctcagcctgccaaagtgctgggattacaggcgtgagccaccgcgcccggccaaagcggtttttaaagggaggatttggaaggcaaaagaggcagggggactgggaggtgtcaggtggtgtgaccccctccagtggcttgtcctgaattatttttccatctgtggaagtggccggcgtcatcatggctggaggaggtgcatggttcgtatcaggatctgactactgaagcttctaaggaaatatgtgaccagataaggtcatcaccttcaggaccacaatgcctggtagggcaaggactcgcgcccgaggcagagcccgccgcagggagagctaccaacaagaggcacctgggggacccagagcacctggatcagctacaacccaggagccccctcagttgcagtcgacaccccggccgctgcaggaggaagtcccagtggttagacctctgcagccaagagcagcaagaggaggagcaggaggaggagcacagtctcaaggggtgaaggaacctggacctgaggctgggttgcatacagcgcccttgcaggagagaaggattggtggagtttttcaagacctggtggtgaacaccaggcaagatatgaagcatgttaaagactcaaaaacaggttcagagggtacagtggtacagctactcgccaaccacttccgagtgatatctcgtcctcagtgggttgcatataaatacaacgttgactacaaaccagacatagaagatggaaatctccgtacaattttacttgatcaacatagaaggaaatttggagagcgccatatatttgatggaaactctttattattatctcggccactaaaagagcggagagtggaatggttgagcacaaccaaagacaaaaacatcgtgaagattacagttgagttttccaaagaactcacgcccacgtcgccagattgcctacgctattacaacattctctttagaagaactttcaagctgctggattttgaacaagttggtcgcaactattataccaaaaagaaggccattcagttataccgtcatggtaccagtttggaaatctggcttggttatgttacttctgttcttcaatacgaaaacagcattaccctctgtgccgatgtgagccacaaactgctccgaatagaaactgcttatgatttcataaagagaacatctgcccaggcccagacaggaaacatccgagaggaagtaactaataaattaattggatcaattgttctgacaaaatacaacaacaaaacctacagagtagatgatattgattggaagcagaatcctgaagacacatttaacaaatcagatggcagcaaaatcacctatatagactactacaggcagcaacataaagaaattgtcacagtgaagaaacagccacttttggtcagccagggcagatggaaaaagggcctaacgggtacacaacgtgaacctatcctgctgattcctcagctgtgccacatgacaggtctaacagatgaaatatgtaaagattatagcattgtgaaagaattggctaaacatacaagattgagtccaagaagaaggcatcatacattaaaagaattcatcaatactctacaagataataaaaaagtacgagagttacttcaactctgggatttgaaatttgataccaattttttgtccgtcccgggaagagttttgaaaaacgcaaacatcgtgcaaggcagaagaatggttaaagccaattcacaaggagactggtcaagagaaataagagaattacccttacttaatgcaatgccactacatagttggctcatactctatagcaggagcagtcacagagaagccatgtccttaaagggtcatctacagagtgtcacagcccccatgggcataactatgaaaccagcagaaatgattgaagtagatggtgatgctaactcctatatagacacattacggaaatatactagaccaacactgcagatgggaatgtcatgtttgctggttttcaaggtgatttgtatcctgcccaatgatgacaaacgtagatatgacagcataaaaagatacctatgtaccaaatgcccaattccaagccagtgtgtggtgaaaaagaccttagaaaaagtccaggcaaggaccatcgtcaccaagattgcccagcagatgaattgcaagatgggaggagccctctggaaggtggagacagacgtacaaagaacaatgttcgttggcattgattgtttccacgatatcgtaaatcgacagaaatcaatagcaggatttgttgcaagtaccaatgctgaattaacaaagtggtactctcaatgtgtcatccagaaaacaggagaagagcttgtgaaagagctggagatctgcttgaaagctgccctggatgtctggtgtaaaaacgaatcatcgatgccacattctgttattgtgtatcgggatggagtgggagatggtcagcttcaagcattgcttgaccatgaagcgaaaaagatgtcgacctacttaaaaaccatctctcctaacaatttcactctagctttcattgtggtgaagaaacgaataaacactagattttttcttaaacatggaagcaattttcaaaatccacctccaggaacagttattgatgtagagttgactaggaatgaatggtatgacttttttattgtgagtcagtctgtgcaagatgggactgttacccccactcattataacgtcatctatgacacgattggcttgagcccagatacagtacagcgtttaacatattgtctatgccacatgtattataatttgccaggcatcatccgagttccagcgccttgccactatgcccacaagctggcttacctcgtggggcagtccattcaccaggaaccgaatcgttccttgtcaactcgtctcttttacctttgacctgcagaagaagacctgatgtgctaatgaaaccacaacgtgtaagcctgtcttccttttgaagcaggatgtctgaaatattttcctaggtccatagcattaaattctcatcgtttttgattggacacaggagagattcagagtgatatgttctactctcaatactaccacagactgatttttccagagaggagaactgacagggtttggcttgcagtttccctttcaaatatgtgacagagatctcacagctgaacgtgactgaacattttccaccccaagcagggccactctaagaattgaaaagatggggcattcgtcacagagagagtacatctgtgaacaagtaaactctacttggaaaactacgtttactttatttttgaaacttttttttgttaaaggacaggaaaggaagacataaaagtaacaacactg

SEQ ID NO: 1045 - DNA, 2529 bp, Homo sapiens
  source 1..2529: mol_type = genomic DNA
atccctctcagctcttgctaagtgatcactagcttgcctccaagctctctcactatgaacagacaagtttgcaagaaatccttcagtggcaggagccagggtttctctggccgctctgctgtggtctccggcagcagcaggatgagctgtgtggcccgctctgggggagctggtggaggggcctgtggcttcaggagcggagcaggcagctttggcagtcgcagcctctacaacctgggcagcaacaagagcatctccatcagcgtggcagctggcagctcccgggctggaggctttgggggagggcggagcagctgtggctttgcaggtggctatggaggtggctttgggggcagctatggtggtggctttggtggtggcagaggagtaggtagtggttttggaggggctggtggctttggtggagctggtggctttggtggtcctggtgtatttggtgggcctggcagctttggtggtcctggtggctttggccctgggggctttcctgggggaattcaggaagtgattgtaaaccagagtctcctgcagcccctcaatgtggagatcgacccccagattgggcaagtaaaggcccaggagcgggaacagatcaagaccctcaacaacaagtttgcctccttcatcgacaaggtgcggttcctggaacagcagaacaaggtcctggagaccaagtgggaactgctccagcagcagaccacaggctcagggcccagcagcctggagccttgttttgaatcctacatcagcttcctatgcaagcagctagattcacttctaggggagagggggaacctggagggagagctgaaaagcatgcaggacctggtggaagacttcaaaaagaagtatgaagatgaaatcaacaaacgcactgccgcagagaatgagtttgtggggctcaagaaggatgtggatgcggctttcatgaacaaggtggagctgcaggccaaagtggacagcctgacagatgaagtcagcttcctgaggaccctctatgagatggagctgtcccagatgcaaagccatgccagtgacacgtctgtggttctgtccatggacaacaaccgctgcctggacctgggcagcatcattgccgaggtccgcgcccagtatgaggagattgcccagaggagcaagtctgaagctgaggccctgtaccagaccaagcttggggagctgcagaccacagctggcaggcatggggatgacctgaggaacaccaagagtgagatcatggagctcaacaggatgatccagaggctacgggctgagattgaaaatgtcaagaagcagaatgccaacctgcagacggcaattgcagaggctgagcagcgtggagagatggccctcaaggacgccaatgccaagctccaagacttgcagactgccctacagaaggctaaggatgacctggctcggctcctgcgtgactaccaggagctgatgaacgtcaagctggccctggatgtggagattgccacctaccgcaagctgctggagggagaggagtgcaggatgtctggagaatgtcagagtgccgtgtgcatttcagtggtcagcaatgtcaccagcacaagtggcagctctggcagtagccgtggagtttttggaggggtcagtggcagtggcagtggtggctacaaaggcggcagcagcagcagcagcagcagtggctatggagtcagtggcggcagcggcagtggctatggaggggtcagcagtggcagcactgggggcaggggtagcagcgggagctaccagagcagcagtagtgggagcaggctcggcggtgcaggtagcatctccgtgagccacagtggaatgggctccagctctggcagcatccagacttctggaggaagtggctacaagtctggtggtggaggcagcaccagtatccgcttctcccagaccacgagctcaagccagcatagctccaccaagtgatctactgttccaaatctctataaccacctgcttcccactcagcctgcaatagtgtttcccactctctgcttggcatcaatagatgcataagggtcaaccacatttttcctcaagttccctggagaagaagctgaactcctggtttctccatccccatgaccttcccagggccatggaggtcctgctgctggtctgggatgatgatgcccctggaaaccttcctgcaatggccccttactttggacagcaacccctgagcccaagccagttttggccttcacagcctggcctgttcccactctggcccatctccctttcttactgggagttggagatttgaagccagtcatctcagcactgtctgaggagggcagagccatgggttctgtgctggagggtgcacggccaagatctccagactgctggttcccagggaaccctccctacatctgggcttcagatcctgactcccttctgtcccctaattccctgagctgtagatcctctggtgatgagtatgttgcactttcttttctcaataaattgcactgaacttca

SEQ ID NO: 1046 - DNA, 4785 bp, Homo sapiens
  source 1..4785: mol_type = genomic DNA
acctgcttccctctcggatagccagggctgatgatttcaactcattaatcattccgaactcttcccaacaaacagcctcatggctgtcccggacctcctctgtcccggctcaggaaatgatctcggtcggaagtgaaaagaccaaatcggccccaggaggccattttcttcgacagaagctgaggcgtgggggcgtggccttcccccgcttccccctccactcccccgcccgcccccggccccggctttccgatctcggcccagggaagagccttggtcgcgaatcaccagtttgcatttgcccctggggcgggggcggctttctgagaccaggctggggctgggactccgccaccttcagctaagggtaccgaggtcagtccgggagtcgcgtcaccgggactcgaacccgcctcttcgtcttccgaggcctagtgcgagcctgcggcgctaaacgcagtcacactgtccctttaaggcggcactttttattcttcatttgtttacttcttcatgcgctcttcggtctttacaaaatgtgctcgcgatatccttccgcaagtgtcagtctcaggcactcaccacccgccttgaagccatttctataatcttaagactcgcgagttagcagccgtgggccgacgtctctctttataggatttaattcttttacattttagggactactttttaggaataaaccattcttgcgttagttaataaaggttcataaccttcggaacccctccgctgagaacaaaatacgataatagcctttataacgcaccttttcataaaaatattctgtgaggactctcataggccatcgaatcttctcgtattcctgaaacagaatggtacggtccagaacccgccccatcttctctgcgattggccgtccttcctcagcgagtcgtgtgatttttcaccaatggccgctcgcgtttctttagcgaggtctaagcgatggaaggtggcggccagggagacgccccctacgcgtcctgggattggctacgtcgcacggcgcgcgagggcggcgggcccgaaagataagaactacgactcccggcgccccgcaaagggaactccgttacgcatgcgcacgggcggggcgaaaaagcttctatataaaaggggcgcagaggactgggagacagcagttggaagttggcaggtggagaggcaggttgggagggaaagtcgggggaggacgcggaagaggagctgtgggaagggggaggagggagggaggaaaagaggaggaggcggaggagaactgagcagagcagagcatcgagccaaaggggagatgagtttgtctgtcctctgctgaggctacggccgggcctagggaactgggagcttgggtggaagcgacacccgtggaagtgggaggaggtggcgccgggactttaaccccttgtgggctctgcggcaggggatttaaccctttgtggatctggcccctcggaggcagcgtcatcggtagttttaaccccttcggggctgggtttcacgcactggacttaccctcatcaccttgctcaccaactcctttattggggtgctccgcttggaggtttgaggcccacctccgcccattacgtactgttcctgccgctgcacccccttggacccgctagctggccgcactgtgggcgcttaaccctttactgacttgagctccccagattgcagttggagtttgctgatagaaggactagctaaaggcgtcactgcaggaattacaaactgaagaggactctgttggactgttttttttttctttttcttttttttaagaaaaacccatttttttccttaaggacttactagccaaaatttcttaaacttcgaggactctactagccatggccgagccattcttgtcagaatatcaacaccagcctcaaactagcaactgtacaggtgctgctgctgtccaggaagagctgaaccctgagcgccccccaggcgcggaggagcgggtgcccgaggaggacagtaggtggcaatcgagagcgttcccccagttgggtggccgtccggggccggagggggaagggagcctggaatcccaaccacctcccttgcagacccaggcctgtccagaatctagctgcctgagagagggcgagaagggccagaatggggacgactcgtccgctggcggcgacttcccgccgccggcagaagtggaaccgacgcccgaggccgagctgctcgcccagccttgtcatgactccgaggccagtaagttgggggctcctgccgcagggggcgaagaggagtggggacagcagcagagacagctggggaagaaaaaacataggagacgcccgtccaagaagaagcggcattggaaaccgtactacaagctgacctgggaagagaagaaaaagttcgacgagaaacagagccttcgagcttcaaggatccgagccgagatgttcgccaagggccagccggtcgcgccctataacaccacgcagttcctcatggatgatcacgaccaggaggagccggatctcaaaaccggcctgtactccaagcgggccgccgccaaatccgacgacaccagcgatgacgacttcatggaagaagggggtgaggaggatgggggcagcgatgggatgggaggggacggcagcgagtttctgcagcgggacttctcggagacgtacgagcggtaccacacggagagcctgcagaacatgagcaagcaggagctcatcaaggagtacctggaactggagaagtgcctctcgcgcatggaggacgagaacaaccggctgcggctggagagcaagcggctgggtggcgacgacgcgcgtgtgcgggagctggagctggagctggaccggctgcgcgccgagaacctccagctgctgaccgagaacgaactgcaccggcagcaggagcgagcgccgctttccaagtttggagactagactgaaacttttttgggggagggggcaaaggggactttttacagtgatggaatgtaacattatatacatgtgtatataagacagtggacctttttatgacacataatcagaagagaaatccccctggctttggtttcgtaaatttagctatatgtagcttgcgtgctttctcctgttcttttaattatgtgaaactgaagagttgcttttcttgttttcctttttagaagtttttttccttaatgtgaaagtaatttgaccaagttataatgcatttttgtttttaacaaatcccctccttaaacggagctataaggtggccaaatctgagaacaattaaattcattttagttataataaatttaatatttgtaaatgtaacatagtttcagtgtgatttctagagctaattcaaaatagtattgatatattttatgtgactgcatttttggggaggggtaccgaaatcgttaaatttgtcagtttgcaaaaatatcaatctttaatgggagaattttcaatttgccaattttttccttgaatgggtttaagtatgctacaatatacagttcaggcaaaatttaagatgtaattatcttcaatacttaagtgtgcttgctttctagtgccttggttttctttcttgatgctggaaaaataaacaaaccggtattgagtgtttaggcgagtggaaagtggctacaatccaaaattttaaatttaactctgcctcggccattcaaaagtctaataacaaaaaatgtaaacctaatttggcagtttgttaggttagacaactgacagcctcatttcattcctacaagttggttttcagtaatctcttccttccccccagtaaggctggaagaggctcttggcaaacttcttagtgcaagcaatggttagattaatttgtgaggcagctctttaagacgttcagaggtaagaaatactggatttataaagcaaatggctgtttgggggattccaaggatttacctaattgtccaattctacgtgctctctataccaaaacaaaaaaaaaaagctatccacctttccatgtgggtcaaactaaaattagaaatgtcccctcactgcagatcaaatgtaaagcttccagttaaggagctaaatgaggtcctcagctgaatgaggaaccctgtacatccccttgcacagccctattctaaatcgcttaaactatgctgatagctgcttaggttcttgagtagttctgctcttaaacgtagggaggccctgagaactaaattttgccccaaaataaaaacagaaattatgagattgcctcctgtcattttggttaacccagtccttcacctgccctgtgtcagtgtcttctgagggcaattgcgttgctcaaatcactagcacagaggttccttaatttggggccttagaaaccattgtgggccttggggtccatgaaccccatgaaattatttgtagacttgtatgtacatttttctggggagaaggttcaagagattcataagattgtcaaactccttgaaggttcagaacctctgcagggaagggggaagaaaaccctcccattaggaagcatgcttttgcagttaaatggcgatggtggaggtgatagggacttcaagagtaaaatgcaccttgtattgcataagaagcatacacaaatcaataaatcaagggagattataccagtaggactgaatcagggccttcaaagctggactgagttggtcctgttctggcacatatggtccactggagacaatgtatgattgagtttttctttggtctaaaaattatattaaacatttattttgaaata

SEQ ID NO: 1047 - DNA, 6414 bp, Homo sapiens
  source 1..6414: mol_type = genomic DNA
gagttgtaggcctccggcgtcagcccgcgggctgccgcccgcactctccaagagactgctggcgccggcgcccgcccgcgcggcaccgacgcggggagcgcgcttcgcgctgactcagcggcggcggcggctgcggcggcggcggcggcgttagccggccctcgcgctctttcccttcctggggcgccgaccccgcccgcttgcttgcttgcttgcttgcctgcctgcctgcctgcccggcgccacgcaagagaaggtgccaggggacgcagagcgactagaggcgcgcggtcccggccagcaccgtctctggcgttgtagctgcggccgtggcggaggactacggcgacaaggacgagggccgctctcccagctctctgcgtgccgcgccgctccgctccgctggctgaccatctggagtgcaggctgggaggcgggatggagtgatagggaagatgtttataaattcttctgtgggatcagagggcacgcctattacaaccagaaaactacaagtataacagcgaggatggatgaacaggctctattagggctaaatccaaatgctgattcagactttagacaaagggccctggcctattttgagcagttaaaaatttccccagatgcctggcaggtgtgtgcagaagctctagcccagaggacatacagtgatgatcatgtgaagtttttctgctttcaagtactggaacatcaagttaaatacaaatactcagaactaaccactgttcaacaacagctaattagggagacgctcatatcatggctgcaagctcagatgctgaatccccaaccagagaagacctttatacgaaataaagccgcccaagtcttcgccttgctttttgttacagagtatctcactaagtggcccaagtttttttttgacattctctcagtagtggacctaaatccaaggggagtagatctctacctgcgaatcctcatggctattgattcagagttggtggatcgtgatgtggtgcatacatcagaggaggctcgtaggaatactctcataaaagataccatgagggaacagtgcattccaaatctggtggaatcatggtaccaaatattacaaaattatcagtttactaattctgaagtgacgtgtcagtgccttgaagtagttggggcttatgtctcttggatagacttatcccttatagccaatgataggtttataaatatgctgctaggtcatatgtcaatagaagttctacgggaagaagcatgtgactgtttatttgaagttgtaaataaaggaatggaccctgttgataaaatgaaactagtggaatctttgtgtcaagtattacagtctgctgggtttttcagcattgaccaggaagaagatgttgacttcctggccagattttctaagttggtaaatggaatgggacagtcattgatagttagttggagtaaattaattaagaatggggatattaagaatgctcaagaggcactacaagctattgaaacaaaagtggcactgatgttgcagctactaattcatgaggatgatgatatttcttctaatattattggattttgttacgattatcttcatattttgaaacagcttacagtgctctcggatcagcaaaaagctaatgtagaggcaatcatgttggccgttatgaaaaaattgacttacgatgaagaatataactttgaaaatgagggtgaagatgaagccatgtttgtagaatatagaaaacaactgaagttactgttggacaggcttgctcaagtttcaccagagttactactggcctctgttcgcagagtttttagttctacactgcagaattggcagactacacggtttatggaagttgaagtagcaataagattgctgtatatgttggcagaagctcttccagtatctcatggtgctcacttctcaggtgatgtttcaaaagctagtgctttgcaggatatgatgcgaactctggtaacatcaggagtcagttcctatcagcatacatctgtgacattggagttcttcgaaactgttgttagatatgaaaagtttttcacagttgaacctcagcacattccatgtgtactaatggctttcttagatcacagaggtctgcggcattccagtgcaaaagttcggagcaggacggcttacctgttttctagatttgtcaaatctctcaataagcaaatgaatcctttcattgaggatattttgaatagaatacaagatttattagagctttctccacctgagaatggccaccagtccttactgagcagcgatgatcaactttttatttatgagacagctggagtgctgattgttaatagtgaatatccggcagaaaggaaacaagccttaatgaggaatctgttgactccactaatggagaagtttaaaattctgttagaaaagttgatgctggcacaagatgaagaaaggcaagcctctctagcagactgtcttaaccatgctgttggatttgcaagtcgaaccagtaaagctttcagcaacaaacagactgtgaaacaatgtggctgttccgaagtttatctggactgtttacagacattcttgccagccctcagttgtcccttacaaaaggatattctcagaagtggagtccgtactttccttcatcgaatgattatttgcctggaggaagaagttcttccgttcattccatctgcttcagaacatatgctcaaagattgtgaagcaaaagatctccaggagttcattcctcttatcaaccagattacggccaaattcaagatacaggtatccccgtttttacaacagatgttcatgcccctgcttcatgcaatttttgaagtgctgctccggccagcagaagaaaatgaccagtctgctgctttagagaagcagatgttgcggaggagttactttgctttcctgcaaacagtcacaggcagtgggatgagcgaagttatagcaaatcaaggtgcagagaatgtagaaagagtgttggttactgttatccaaggagcagttgaatatccagatccaattgcacagaaaacatgttttatcatcctctcaaagttggtagaactctggggaggtaaagatggaccagtgggatttgctgattttgtttataagcacattgtccccgcatgtttcctagcacctttaaaacaaacctttgacctggcagatgcacaaacagtattggctttatctgagtgtgcagtgacactgaaaacaattcatctcaaacggggcccagaatgtgttcagtatcttcaacaagaatacctgccctccttgcaagtagctccagaaataattcaggagttttgtcaagcgcttcagcagcctgatgctaaagtttttaaaaattacttaaaggtgttcttccagagagcaaagccctgaggactggatttccctgtgcctacttcatgatcatgaattccagttaatttataaagaggcgatttttgtgtgccattcacactggtctttttcacattgttttgagcttattgcagtatatgttttgggatttttctgtaaaatgggtgtaattttcctaatacaggtatgtaacaacaaaagaagttgcctgcatgccggtccaaattgttctgtataaagatgctcttaaaagacacaagagttatcctagaaccttaattcttttttatttgaaattttaagtcaagtcctttataaagaccatagcagtggaaaacagtgtactttttaaaaaattgctgaatataaaatctttgaaaattttctttatgtgtgaagacacaaagtatgggggaagacagcaatcaaaactaactttttgtagatagccatttcatttctttaaactgtttcaacgccaatatgtattctacaaaagagaatggttttaggctccagtgttatacttttttttatatatatatataaaaataaactttacgtagtgaaatcttccaagtcttttctggaattattataaatactttagttttattttctcatcttaatctctccataatttcccatttaaaggtttacaaatatgagtgtgtggatgctttaattcatttaacctcactcctcaaaggtaacatgcaacttagttctgttatatgagagtctttttctttaatgtactggaaaaagcctatgtgaatctgttgatagaatttaaaattccaggccgggcgtggtggctcacgactgtaatcccagaactttgggaggccaaggcaggtggatcacttgaggtcaggagttcgagactagcctggccaacatggtgaaaccccatctctactaaaaatacaacagccaggtgtgatggtgcacgctcgtaatcccggctactcaggaggctgaggcaggagaatcgcttgaacccggaaggcagaggttgcagtgagctgagattgtgccactgcacgccagcctgggcaagagagtaagactctctctcaaaaaaaaaaaaaaagaatttaaaatcccaatttattttctaactcttttattggatgtatttagaacacagtatacctatagtatacctatgtgtttattatgtttgtaaatggtaactgacatttaattattagaagtacttacccctgccttcctccatttttattcatggctacttgagaaagcaaaaggaaaaaataatagttatcagtagtgtcactggaaagaagagaggagggacaaaactgagcagcagaattcgtatagacatttacgtttaaattctaaaagcccaattgagatgttcagggagggtttgttttgccctttggcctcatgaatgggtttcatgaatgggcttcagtggcttataaactctgtaaaattctattctaaattttgtacatttattttgttccggttaattccagaagacatttcaaacatttttcttacaccatataataaaaatacttaactaaattgacagttataaaaataaatcagtgaaatgtaccttatactttaataaaaaatgttttcagaaatagataagtgaaagctgagtgtttctttgataggttcccctgtactataggagtgataattgcagctattgcaatagtagtaattgttaaatggatactaatgaatagcatagcatagtgggtaagagtttatatagcacaggctctagaatcagattaagtaggttcaaataccagttctgccagtaactggttttagaaccttgggcaagttaaagaatgtctcccagcctcagtttccctatttgtaaaatggaaataatggtagctacctcaaacctcattacgaattcaatgagttaaacttgaaaagacttattacagtagctggcacataaagacttgatagtagtttatatggatgctatctcatattagcatatatggaattaatagtgtatcactatactttttttttcttttttttttttgaatagagatcagtctatcacccaggctggagtgcagtggtgacatcatagctcactgtaacttctcccatactctaccaatcctcctgcctcagcatccagactagctgtgattacaggtgtgcaccaccacacccagctacatttttttttggtagagacagggtctcactatgttacccagtctggtctcaaactcccggcctcaagcaatcctcccactggcctcacaatgttgggattacaggtataagccactgcacacggccttactatgctatcaattccatatatggaaaggtgttttccctttcagagctctttaaagctctgcagaagatttacatgtgtttatagagctaagagaaatcagggcatggaaattgagtgtgtaataaaaattaaactcttcatgttatataatcatgcataacttctatcttcattctctgaagttgcctagagcaccatcacagctaggaagcttccatcatgaattaccttatttccaaaagcaagtactcaaataattgtctcaagagaggaaggacaaaactgttacaagctgaaatatttggggatttgtttgacttgactagggaaccacaagttttcatataatgcctgatttagccctgtgcctaacagtttaaatcttaatgctaatgttaattgcttcccagttggttgaccttataagaaaacactgtgtggtattttaatgtggtaaacatgtgaatgaaggcctgtggctcagttaatcactcccacaactttgagctgtgagttttactggtggaaggaactttaacaggtcttcgctcttgtcattagatatcaaagaactgaaattagttggaattgtaagcagtgaatagatgtgttgttagaatgattccatcacttatacattgtttaaaatgctaataaagtaacttgctttgtaagaatt

SEQ ID NO: 1048 - DNA, 3484 bp, Homo sapiens
  source 1..3484: mol_type = genomic DNA
acacctcagttcacaatcctggggcgatatggcagaatcttttttttcggattttggcttgttgtggtatctgaaggagctcagaaaggaagagttttggaaatttaaggagctcctcaaacaacctttggagaaatttgaactcaagccaatcccctgggctgagctgaagaaggcctccaaagaagatgtagcaaagctgctggacaaacattacccaggaaagcaggcatgggaggtaacactgaacctgtttctacagatcaataggaaagatctctggacaaaggctcaggaagagatgagaaataagctaaacccatacagaaagcatatgaaggaaacatttcaactcatatgggagaaggaaacctgtcttcacgtccctgagcatttctacaaagaaaccatgaaaaatgagtataaagaattgaatgacgcatatactgctgcggctagacgacacactgtggtcctggaaggtcctgatggaattggaaaaacaacccttttaagaaaagtgatgttggactgggcagagggaaacttatggaaggacaggttcacatttgtgtttttcctcaatgtctgtgaaatgaacggtatcgcagagaccagcttactggagctcctctctagggactggccggagtcttcagagaagatcgaagacattttttcccagccagagagaattctgttcatcatggatggctttgagcaactgaagtttaacttacaacttaaggctgacttgagcgatgattggaggcagcggcagccaatgccaattatcctgagcagtttgttgcaaaaaaagatgcttccagaatcctctctccttattgcattaggaaaactggctatgcaaaaacactattttatgttgcggcatccaaaactcataaagctcttaggattcagtgaatctgaaaagaagtcgtatttctcctacttctttggtgagaagagcaaagccctgaaagtcttcaattttgtgagagataatgggccgctgtttatcttgtgccataatccctttacgtgctggttggtctgtacttgtgtgaaacagaggctagagaggggagaagaccttgaaataaactcccaaaacaccacctatttatatgcatcctttttaacaactgtattcaaagcaggaagtcagagttttccacctaaggtgaacagagcccgactaaaaagcctgtgtgctttggctgcagagggaatttggacatatacatttgtattttcccatggggatctccggaggaatgggttatctgagtctgagggcgtgatgtgggtgggtatgagactcctccaaaggagaggggactgttttgccttcatgcatctgtgtatccaagagttttgtgccgccatgttttatttgctcaaacgacccaaagacgatcctaacccggccattggaagcataacccagcttgtaagagcaagtgtggttcagcctcaaaccctcttgacccaggtggggatattcatgtttggaatttcaacagaagaaatcgtcagcatgctggagacctcctttggttttccactgtcaaaagacctaaagcaggaaataacccaatgccttgaaagtttaagtcaatgtgaagctgatagggaagccatagctttccaggaactattcattggtttgtttgaaactcaggaaaaagaatttgtaaccaaagtgatgaatttctttgaagaagttttcatttatattggtaacatagaacatttggtaatagcttcattctgcctgaagcattgtcaacatttaacgacacttcgcatgtgtgtggagaatatctttccagatgactcaggatgcatctcagattacaatgagaagctcgtctactggcgggagctttgctcaatgttcattaccaacaagaacttccagattttagacatggaaaataccagccttgatgatccctccctggcgattctttgcaaagcgctggctcagcctgtttgtaaactccgaaaactcatatttacttctgtgtactttggacatgattcagaattatttaaggcagttcttcacaaccctcatctgaaacttctgagcctgtacggcactagcctctcccagtctgacatcagacacctgtgtgagacgctgaaacatccaatgtgcaagatagaagagctgatactgggaaagtgtgacatctccagtgaagtttgtgaagacatcgcctccgtcctggcctgcaacagcaagctgaaacacctctccttggtagaaaatcccttgagggacgaaggaatgacgttgctgtgtgaagccctgaagcactcacactgtgccctggagaggctgatgttgatgtactgctgtctcacctctgtctcctgtgactccatttccgaagtcctcttgtgcagtaagtccctgtccctcctcgatctgggctcaaatgccctggaagataatggagtggcatctctgtgtgcagcgctgaagcacccaggctgcagcatacgggagctgtggttgatgggctgtttccttacttccgattcctgtaaggacattgctgctgttcttatttgcaatgggaaactgaagaccctgaaacttgggcataatgaaataggagacactggtgtcagacagttatgtgcagctttgcagcatcctcactgtaaattagagtgtctcgggctgcaaacgtgtccgatcacccgtgcctgctgcgacgacatcgccgcagcactcatcgcctgcaaaacactgaggagcctgaacctcgactggattgccttggatgctgatgcagtggtggtgctgtgtgaggcattgagccacccggactgtgccctgcagatgctggggctgcacaaatctggctttgatgaagaaactcagaagatcctgatgtctgtggaagaaaaaattccccatctgaccatttcacatggaccttggattgacgaggaatacaagatcaggggtgtgctcctctgatggggaacaccctgaagtagtcgtctcacaaaggctttccttggccacagtgggaccttcacctggcacctctatcctgtaattgcacatcatggcagcagggctgtgatttcagaggtactccctaagtgttctagcaatatgattatggagtgtgattcagtgtacatgctgattgtctttgcctcggtcctatatccccttgtctttagaaatcccatcctgccttgtgatatttagaagcacaagtacgttaaacaagtgctaaacgctctggaaagcatggctttattttcttaatggatgtcttggtgtgtaggagcatgcatttgtaggcaccacaatccggatacttctgacacagaagtgatgctagaatgtgtctatagattgtattgctagcatccagactttctagtttgtccagatttcgatttgatcaattttcttgtccaataaaaaagcatttccaaatctcta

SEQ ID NO: 1049 - DNA, 868 bp, Homo sapiens
  source 1..868: mol_type = genomic DNA
gagattcctaaatcattgcaggttaattgtgagaggggaccagtcccagaggctctcagctctgcagtgcttccgaatcactggacgactctttaagaattctgatccccgggcccccatcccggaccaatgaaatcagaatctctaatagtggggccctggcatcggtagtttttaaagctgcccaggtgattctggggtgccgagaaccaccgtgttaagctccaccagcccattggagaaaagttactgttcagtccctgaaggcttgtgccataaaagagtgggagacattcccagggagtttcagcacccatttggactttcacaatcagagatggcagcggtaaaggcatcaacatcgaaagctaccaggccttggtattctcatccggtatatgcaagatactggcaacattatcatcaagcaatggcttggatgcaaagccatcacaatgcctacaggaaggccgtggaatcctgtttcaatcttccatggtacttaccttctgcgcttcttccccaaagctcttacgataatgaggctgcgtatcctcagtccttctatgaccatcatgtggcctggcaggactacccctgcagttcttcacatttcagaagatctgggcagcatccacgttacagcagtaggatccaggcatccacaaaagaagaccaagctttgtccaaagaggaagagatggagactgagtcagatgcagaggtagaatgtgacctgagcaatatggaaatcactgaagagctccgccagtactttgcagagaccgagaggcatagagaagaacgacggcggcagcagcagctggatgcagagcgcctggacagctatgtgaacgctgaccacgac

SEQ ID NO: 1050 - DNA, 1969 bp, Homo sapiens
  source 1..1969: mol_type = genomic DNA
ggcgtcgtggggaggagcgtggcgtcggcgtcgtggggaggagcgtggcgtcggcgtcgtggggaggagcgtggcgtcggcgtcgtggggaggagcgtggcgtcggcgtcgtggggaggagcgtggcgtcggcgtcgtggggaggagcgtggcgtcggcatggtggggaggagctgtggggtggcaacccagaggcaaggaggtgggcagaggcccacgaacctggccctgaccctcagctcgtccccagctcacagcacagccctcccctggctgcctccaaggagtctccagttactgagtggccactccgtgccagctcagcccacccctcaccttcccagtgcctgtggaggcccaactagggtgacgctgggagaggagagggcttggaggagccacgggtcaaatgcaggaggccacacctgcctgcccaggaggactgcaggagccggatccttaacacctggaggggagcgggggggcaacaacgccggccacacggtggtggtggatgggaaagagtacgacttccacctgctgcccagcggcatcatcaacaccaaggccgtgtccttcattggcaacggggtggtcatccacttgccaggcttgtttgaggaagcagagaagaatgaaaagaaaggcctgaaggactgggagaagaggctcatcatctctgacagagcccaccttgtgtttgattttcaccaggctgtcgacggacttcaggaagtgcagcgccaggcacaagaggggaagaatataggcaccaccaagaagggaatcggaccaacctactcttccaaagctgcccggacaggcctccgcatctgcgacctcctgtcagattttgatgagttttcctccagattcaagaacctggcccaccagcaccagtcgatgttccccaccctggaaatagacattgaaggccaactcaaaaggctcaagggctttgctgagcggatcagacccatggtccgagatggtgtttactttatgtatgaggcactccacggcccccccaagaagatcctggtggagggtgccaacgccgccctcctcgacattgacttcgggacctacccctttgtgacttcatccaactgcaccgtgggcggtgtgtgcacgggcctgggcatccccccgcagaacataggtgacgtgtatggcgtggtgaaagcctataccacacgtgtgggcatcggggccttccccaccgagcagatcaacgagattggaggcctgctgcagacccgcggccacgagtggggagtgaccacaggcaggaagaggcgctgcggctggctcgacctgatgattctaagatatgctcacatggtcaacggattcactgcgctggccctgacgaagctggacatcctggacgtactgggtgaggttaaagtcggtgtctcatacaagctgaacgggaaaaggattccctatttcccagctaaccaggagatgcttcagaaggtcgaagttgagtatgaaacgctgcctgggtggaaagcagacaccacaggcgccaggaggtgggaggacctgcccccacaggcccagaactacatccgctttgtggagaatcacgtgggagtcgcagtcaaatgggttggtgttggcaagtcaagagagtcgatgatccagctgttttagtcacagactgagctgatcccaacaggccctggcagcgtctggacttgtgtaaacagcagcagtcacgttcctcggccgccacaaccaacaccaaagcaggaaaaccattttctgtacttttatatttctgttcaacctgttggtttctacaatgattttaaacattggaaagccagccttgtgtatatttttaaaaattatattcaaaatgagccaaagtgctcagagaccttctatgacacattagtgtcacatggttgcgtgtccagccgaagcagtgtaataaacatctccaatggccactgaa

SEQ ID NO: 1051 - DNA, 468 bp, Homo sapiens
  source 1..468: mol_type = genomic DNA
atggtcaactcctgttgtggctccgtgtgctctgaccaaggctgtggccaagacctctgccaggagacctgctgctgccccagctgctgtcagaccacctgctgcaggaccacctgctaccgccccagctacagtgtgtcctgctgctgcagaccccagtgctgccagtctgtgtgctgccagcccacctgctgtcgccccagctgctgtgtgcccacctgctgccaccctagctgctgcatctccagctgctgccgccccagctgctgtgtgtccagctgctgcaagccccagtgctgccagtctgtgtgctgccagcccaactgctgccgccccagctgctgccgcccctgctgctgcctgcgtccagtctgtggccgagtctcctgccacaccacttgctatcgcccagcctgtgtcatctccacctgcccccgccccgtgtgctgcgcctcctcttgctgctga

SEQ ID NO: 1052 - DNA, 3008 bp, Homo sapiens
  source 1..3008: mol_type = genomic DNA
ccctcgccgcagtcgcgggcaccccgctcggcgtcggtgcctgagggaggccgcgatggcggccgaggccctggcggcggaggccgtggcgtcgcgcctggagcggcaggaggaggacatccgctggctgtggtcggaggtcgagcgcctgagggacgagcagctgaacgcgccctacagctgccaggcggaggggccgtgcctcacgcgggaggtggcgcagctccgggccgagaactgcgacctgcgccaccgcctgtgcagcctgcggctgtgcctcgccgaggagcggagccgccaggccacgctggagagcgcggagctagaggcggcgcaggaggccggcgcacagcctcctcctagtcaaagccaagacaaggacatgaaaaagaagaaaatgaaggaaagcgaggctgacagcgaggtgaagcatcaaccaattttcataaaagaaagattgaagctttttgaaatactgaagaaagaccatcagctcttacttgccatttatggaaaaaagggggatacaagcaacatcatcacagtaagagtggctgatgggcaaacagtgcaaggggaagtctggaaaacaacgccttaccaagtggctgctgaaattagtcaggaactggctgaaagcacggtaatagccaaagtcaatggtgaactgtgggacctggaccgcccattggaaggggactcttctctagagctgcttacatttgataatgagaaagttaacactgcaactaccaccgtgtacaggtgcggtccattaattgacctttgcaaaggtccacatgtaagacacactggaaaaattaaaaccatcaaaatttttaagaattcctcaacatattgggagggcaatccggaaatggaaacattgcagaggatctatggaatatcctttcctgataacaagatgatgagagactgggaaaagttccaagaggaagcaaagaaccgagatcacaggaagatcgggaaggaacaagaacttttctttttccacgatttgagtcctggaagctgttttttccttcccagaggagccttcatttataatacgcttacagatttcatacgagaggaatatcacaaacgggacttcacggaggtgctctctcccaatatgtacaacagtaaactctgggaagcctcaggccactggcagcattacagcgagaacatgtttacctttgagattgaaaaggacacttttgccctcaaacccatgaattgtccagggcactgtctaatgtttgcccatcgtccacgatcttggagggaaatgcctattagatttgctgattttggagttctgcatagaaatgaactgtcggggactctcagcggcttgaccagagtgaggcgcttccagcaggacgatgctcacattttttgcacagtggagcagattgaagaagaaataaaggggtgtttgcagtttttgcaatctgtttactcaacatttggcttctcctttcaattaaacctgtcaacaaggccggaaaacttcctaggagagattgagatgtggaatgaggctgagaagcaactgcagaacagcttgatggactttggagaaccgtggaaaatgaacccaggagatggagcattttatggccctaaaattgacataaaaatcaaggatgctattggcagataccatcaatgtgctacaattcagctggacttccaactgcctattagatttaatctcacatatgttagtaaggatggggatgataagaagagacctgtgatcattcatcgagccattttgggatcagtggaaagaatgatagccattctttcagaaaactatggcggaaaatggcctttctggctatctcctcgtcaggtgatggtcatccctgtggggccaacttgtgaaaaatatgcacttcaggtatccagtgaattttttgaagaaggatttatggctgacgttgacttggatcacagttgtacactaaataagaaaatacgaaatgcacagctggctcagtataattttattttggtggttggagaaaaggaaaagatagataatgctgtaaacgtgcgaacaagagacaacaaaattcatggagagattttagtaacttctgccattgataaactgaagaatctcaggaagacacggacactcaatgctgaggaggccttttgaagtccttccctgatatttgcttctgtgtaactttgttttgacccttaaaaatgtatttttcttaacatgttagtacttctacgactttggagccactgatgggtccactcatggcctcagctgagaaaggagacgatgaacgtgtagctgacatgcacgaagtttaatttactcatgtccacgggggacgtttagagggcacgtgggaaattttccagcaatcaatgccttgagaaacttaaatggggaaatattattcatcgagaaagtgaaacaaaacactaggaaatgattatgaaatgttagtgattttcaaaagatgggcttcaaataaaagtctgcagagttttttttaaataggagggaaaatcttattttctaatatgtctcaggtatttttatgacttctactaaaattcacactgaaactttatcttctaaactggaatcattacttaattttaactaaccaacaaccacaaaagcagcagctactgctaaatattggattactgacaaaggaattcagttttgtggaatctggtgtttgcactataggttaagagttgccatttaaatgtttcttattcataattaggttttgttccgctttagaaaaaaataaattcccaaatgaattgcatcagtgtttccagcgtttcagctgtgggcttctaccaccactaagccgctcacctagagttgttacttttttgatgggatgacattccatggatttatgtactgaaatggatttcagattttaaagagaggaatgctctacgtgctcagaactgaattaaaatggcattatgtcaatagagaattc

SEQ ID NO: 1053 - DNA, 3686 bp, Homo sapiens
  source 1..3686: mol_type = genomic DNA
agccaagttctttccatcatcctgggccctcacctctggcataggctcttggtagtgggggcccagacagggaggcacctgccacctgcttcccttctcagccacccacagccctcatagggcagaatgggactcttgctgatgtagacgccgaagtcgcgggcgctcatggcgggcctggaggtactgttcgcatcggcagcgccggccatcacctgcaggcaggacgcgctcgtctgcttcttgcattgggaagtggtgacacacggttacttcggcttgggtgtcggtgaccagccgggtcccaatgataagaagtcagaactgctgccagctgggtggaacaacaataaagacctgtatgtcctccggtatgagtataaggatgggtccagaaagctccttgtgaaagccatcaccgtggagagcagcatgatcctcaatgtgctggaatatggctcacagcaagtggcagacttgaccctgaacttggatgattatatcgatgcagaacacctgggtgacttccacaggacctacaagaacagtgaggagcttcggtctcgtattgtgtctggaatcatcacacctatccatgagcagtgggaaaaggctaatgtaagcagtccccaccgggagttcccccctgctaccgccagagaggtggacccactccggattcctccacaccacccacacaccagtcggcagcctccctggtgtgatcccctgggcccgtttgttgtcgggggagaagacttagacccttttgggcctcggagaggtggcatgattgtggatcccctgagatctggcttcccaagagcacttattgacccttcctcaggcctcccgaaccgacttcctccaggcgctgtgcccccaggagctcgctttgacccctttggacccattgggaccagcccacccggacctaacccagaccatctccccccgccgggctacgatgacatgtacctgtgaaggcctcaagaatgtaacatcccaggcttccctccattctcctggagctgccaccgctgtccccatcagcaaccatgttcttgcaggctgggggcaagggattctgctcatgtgtttgcagaccggctgggatagcctccccaccccttatcagagccaagacacctgctgcagctctccacctagctgcagatagctcccaaagagaaatcagtgtgtctctttcaccatcagctcctcccctttcaccaccagctcctctccacttcccaagggagactccggcaaccttcagcaacatatatcctcgaccagatgcagtgctataagaacagaacgcattttggatgttattattaagaaccaaatgtcaatacagaattcatgttgccggtttcccacttttctttttacattaatgcatagctgcttccatttatgagactttagagtttgagtttctgtagggctgaatgactctttttcctgcccagggcccattcttgcttctcaggcaccttccgtttattaattgccattgctcctgacatcactaagatgggtccccttctggctgcatgaatggaaatgagtgactggaaatcccataggccacaagaatgactttcacaagggcaggaacattgtggaaagactgcatcattctgatgaggcaaaatcctccagctattcctgtctgggccagttttgtaggtccatctgtgcatgggcagcagtagtcaaaaagccaaggaaaaaacagagcagacctgaaggctaatcttatttttgccactaacttagtgaatgaccctaagcaagttccttctcctcttagggccttgtgccaagcctatgaaattggaggtggctttcctgctctaaagcattttgatgtctcattctgtgtttggtaacccctataaactggggcagaggaaaagaatgatggttcaaggccatacttcccttgaaccttgtgtggttcttgcctaactctgtggtttttggaccccatggggcccagacagagcacaggagcatgggctgcctctgagtgtggtgttgaacttcgggaggagcagggagccctgcaccttgtgtcctggcccacctgacctttggtgttctccggatccttttcagcccgaggcctgacagacgcgggcagtgatgagccctgttctggagtggaaagagcacgatagagcaccaggctaagaggcacgagatcaaggcggtagtcacttccgctctgcagctagcatttcaaccatatgtggatcctttcatttctcagctccctggattccttcccctaaattaggacctattatttacctgtaggtaagcaagctactgtagctcttctgaggtatctgccaggctgttttctgtagcctcagattgcctatctgcttagcctgagaacaggtagatgaaaactaaactgatgcctaggcccagggtcagtctcagatggaagctgggcctgggtggggaggctagcatgcgtggctccctgggtatttctgtcagtccccatggcaagcagtgatttagtaaaacaccccagagtcagggaagccaaccaccttgaaacctttagaacatctctgctttggagaaagacccagagatcaggcagaggtgcagattcaatcattactcataacctttgagagatggcaaatgggaggagtgttagtctttgttttggaattggaccattcttgcaaccaaaaggacttagagcagtttgctcataaagacatcctttattataaaaggaagtatttaaaggatgatagagaccatcagatagaagcagggaaggtagataacttttaggaccttgatgtgaggaaaagataaaatttaaacaataaatttgccacttagattttctagcagcaaagtccgaaaagatagttatatacaaaattctgttttctgaaaacaaaattgtgattcaccttcagaattggccattttttttgtgagtttccttgcatcaaggacactgagaaacacagtcattgtcttaggtgttctatgggaggaagtgaatagagcctttaggaacttcctggtcaagcttatggtgcttattttgatctgggccacttccctccttccagtcatgagtaatcatcaaggagcaagttggagtgtttcaggtgtatattttgtagaacccaaaagattggagccttaacaataaacatcagcactaagtgacctgttcctccttttttaaatagcagctttattgagatataatttacatacccataatttacatacctgtttaaagtatacaattcagtggatttagtatgttcacagtgttgcacatccaccaccatttctaattcctgaacattttcaccacctcaaaaagaaaccacacacccattggcatgactccccattcccttgctcccagccccaggcaaccactaacatctgtctctaaagattttttttttttttctggacagttctcataagtggaatcactcagtattatggccttttgtgtctggcttctttcatttcatgtgatgttttcaagattcattcatgctgtagcatgtatccatggtatggatatatcacattttgcttatccttttatcagttgatggacagttgggttgtttctacaaaaaggctattatgagtaatgcagccaagaa

SEQ ID NO: 1054 - DNA, 574 bp, Homo sapiens
  source 1..574: mol_type = genomic DNA
cggaagccgcggttcctaccaaccgttcttattgctggcggcctgaggagcccatcatggcgacgccccctaagcggcgggcggtggaggccacgggggagaaagtgctgcgctacgagaccttcatcagtgacgtgctgcagcgggacttgcgaaaggtgctggaccatcgagacaaggtatatgagcagctggccaaataccttcaactgagaaatgtcattgagcgactccaggaagctaagcactcggagttatatatgcaggtggatttgggctgtaacttcttcgttgacacagtggtcccagatacttcacgcatctatgtggccctgggatatggttttttcctggagttgacactggcagaagctctcaagttcattgatcgtaagagctctctcctcacagagctcagcaacagcctcaccaaggactccatgaatatcaaagcccatatccacatgttgctagaggggcttagagaactacaaggcctgcagaatttcccagagaagcctcaccattgacttcttccccccatcctcagacattaaagagcctgaatgccttt

SEQ ID NO: 1055 - DNA, 747 bp, Homo sapiens
  source 1..747: mol_type = genomic DNA
atcctcgtgggccctgaccttctctctgagagccgggcagaggctccggagccatgcaggccgaaggccggggcacagggggttcgacgggcgatgctgatggcccaggaggccctggcattcctgatggcccagggggcaatgctggcggcccaggagaggcgggtgccacgggcggcagaggtccccggggcgcaggggcagcaagggcctcggggccgggaggaggcgccccgcggggtccgcatggcggcgcggcttcagggctgaatggatgctgcagatgcggggccagggggccggagagccgcctgcttgagttctacctcgccatgcctttcgcgacacccatggaagcagagctggcccgcaggagcctggcccaggatgccccaccgcttcccgtgccaggggtgcttctgaaggagttcactgtgtccggcaacatactgactatccgactgactgctgcagaccaccgccaactgcagctctccatcagctcctgtctccagcagctttccctgttgatgtggatcacgcagtgctttctgcccgtgtttttggctcagcctccctcagggcagaggcgctaagcccagcctggcgccccttcctaggtcatgcctcctcccctagggaatggtcccagcacgagtggccagttcattgtgggggcctgattgtttgtcgctggaggaggacggcttacatgtttgtttctgtagaaaataaaactgagctacg

SEQ ID NO: 1056 - DNA, 1387 bp, Homo sapiens
  source 1..1387: mol_type = genomic DNA
agttgcaacccgggccgcccgcagaggcaggcggggcccaggtggcgtggaccgcccgtcaccagctctgcctcgccagtctgagtccgacttattaactagcttccgtcattcatcaacacgcgctattgggcatcttgcgagcgccgggctccgcgccggcgccggaatgcgatccgggcttcggactcgaacgaatgcgggggacgagccaaccctggtgggggaggctggggcggacgcgtttattagaagatcggggccgtttgcctagacatgaacatttggactcggaggagcagagggacgccccctcggccgctccggctgcactgcggagccgaggcccgcgcgagggcgcagaccgaccaaccggctagggcctgactggctagactgtgcccgctgcagaggcgcgctcccagcacagggcggggacggaagggaggaccccgagccgcgtgaaacgcaaggccctcgtgtgtgcgcagctgacaccctaggcggggctgcgtcgggggcggggacaggcgcgtcccagcccacgcagccggaacgcctgagcgctgggcgcctggtctgccggacctcagcagggggcaccgcgggccggactgtggaggggcgcacgcccggaagcggcgagggtagccatgacggcctccgtgctgcgaagtatctcgctagccctgcgcccgactagcgggcttctgggaacttggcagacgcagcttagagagactcaccagcgagcgtcattgttgtctttctgggaactcattcccatgagatcagaacctcttcgaaaaaagaagaaggtagatcctaaaaaagaccaagaagcaaaggagcgcttgaaaaggaagatccgaaaactggaaaaggctactcaagagctaattcctattgaagattttattacccctctaaagttcttggataaagcaagagagcggcctcaggtggagctcacctttgaggagactgagaggagagctctgcttctgaagaagtggtccttgtacaagcagcaagagcgtaagatggagagggacaccatcagggctatgctagaagcccagcaggaagctctggaggaactgcaactggaatccccgaagctccatgctgaggccatcaagcgggatcctaacctgttcccctttgagaaggaagggccacattacacaccaccgatccctaactaccaaccccctgaaggcaggtacaatgacatcaccaaggtgtacacacaagtggagtttaagagatagacttgcaggctgctatccttaacatgctgcccctgagagtaggaatgaccagggttcaagtctgctttccacagaatcaggcatgctgttaataaatactggtttaatcaaaa

SEQ ID NO: 1057 - DNA, 10141 bp, Homo sapiens
  source 1..10141: mol_type = genomic DNA
aggtctttgcctccgcgtcactttctcctcatcgagtccccggaggcagagagctgagcgaggttcgcctccccgggcgggacacgagctccggtcctctcttggcgcaaacccccgccccccgcggagggactacttttcgtctcccgcggaggaactacttcctcccccgcggaggcgtcggtccaggcggcgcgcacggtatggcggcggcggcggcggcggcggcgcgcgcctgagaagaggggacgccagcccggtcaggcctcggcgcggcctacacgctccgctcgctcgctcgctcccgcctcccgccccgcgcccggccatggcggagccgtcgtccgcccgacgcccggtgcctctcatcgagtcggagctgtacttccttatcgcccggtacctatcggcgggcccgtgtcggagagcggcccaggtgctggtgcaggagctggagcagtaccagttgttgccgaagagattggactgggagggcaacgagcacaacaggagctacgaggagttggtcttgtccaataagcatgtggctcctgatcatcttttgcaaatctgccagcgcatcggtcctatgttggataaagaaattccacccagtatttcaagagtcacttctttacttggtgcaggaaggcagtctttgctacgtacagcaaaagactgcaggcacacagtttggaagggctctgcctttgctgctcttcatagaggaagacctcctgaaatgccagtgaattatggttccccaccaaatcttgtggagatacatcgaggaaaacaactcacagggtgttccacttttagtacagcatttccaggaactatgtatcagcatataaaaatgcacagaaggattctcggacatctatctgctgtttactgtgtagcatttgataggacaggacatagaatctttacaggttcagatgactgtttggtaaagatttggtcaacacataatggccgcttgttatctacattaagaggtcattctgcagaaatttcagatatggcagtaaactatgagaatacaatgattgctgcggggagctgtgataaaattattagagtgtggtgcttgagaacttgtgccccagttgctgtgctccaaggacacacaggatcaattacatctttacagtttagcccgatggccaaaggctctcaaagatacatggtttccactggtgctgatgggacagtttgcttttggcaatgggatttagaatccttaaaatttagcccacgtcccctgaagttcactgaaaagcctaggccaggcgttcaaatgctttgttcttcttttagtgttggtggtatgtttttagccacaggtagtactgatcatgtaatcagaatgtattttttgggttttgaagcacccgaaaaaatcgcagaacttgaaagccacactgataaagtagatagtatccaattttgtaacaatggtgatcggttcctaagtggtagcagagatggaacagcacggatttggagatttgagcagttagaatggaggagcattttattggatatggctaccagaatctcaggggacttatcttccgaagaggaaaggtttatgaaacctaaagtaacaatgatagcttggaatcaaaatgatagcattgttgtcacagctgtgaatgatcatgtcctcaaagtgtggaattcttacactggacaactgcttcataacttaatgggacatgctgatgaagtatttgttctggagacacatccctttgattccagaattatgttatctgcaggacatgatggcagcatatttatatgggatattacaaaaggtaccaagatgaaacattattttaatatgattgaaggacaaggacatggagctgtgtttgactgtaagttttcacaggatggacagcattttgcctgtacagattctcatgggcaccttctgatatttggttttggatgcagcaaaccatatgaaaagattcctgatcagatgttcttccatactgactatcgaccacttattagagattctaataattatgtcttagatgagcaaactcagcaggctcctcatcttatgcctccaccattcttggtagatgtagatggaaatcctcatccaaccaagtatcagagattagtaccaggccgagaaaattctgcagatgaacatttgattccacagctgggctatgtggcaacaagtgatggagaggtgattgaacaaattataagcctgcaaaccaatgataatgatgaacgcagcccagaatcgagtattcttgatggaatgataagacagttgcagcagcagcaagatcagagaatgggagcagatcaggatactattccaagaggactttcaaatggtgaagaaacaccccggagaggttttagaaggctgagcttagacattcagtcccctccaaatattggtctgcgtcgtagtggacaagttgaaggtgttcgtcagatgcatcaaaacgctccacgcagtcagattgctacagaacgtgacctgcaggcttggaaacgaagagtggttgtaccagaggtaccactaggcatatttaggaagctggaagacttccgattagagaaaggtgaagaggaaagaaatctttatataataggaagaaaaagaaagactcttcagctctcacataagtcggattcagtggttttggtatcacagtctagacaaaggacatgtaggcgtaaatatccaaattatggtagaagaaatcgtagctggcgtgagttatcttctggaaatgagtcttcaagctctgtaagacatgagacttcctgtgatcagagtgaaggttctggttcttcagaagaggatgaatggagaagtgacagaaaaagtgagagttacagcgaaagttcaagtgactcttcatctagatattccgattggacagctgatgcgggcatcaatttgcagcctcctttaagaacatcatgtcgtcgacgaattactcgattttgtagtagttcagaagatgaaatatctactgagaatttatctcctccaaaaagaagacgaaagagaaagaaagaaaataagcctaagaaggagaatttgcggaggatgactccagcagagcttgcaaatatggagcatttatatgaatttcaccctccagtttggattactgacaccacacttagaaaatctccttttgttcctcaaatgggtgatgaggtaatatattttcgacagggtcatgaagcttatattgaggctgtaagaagaaataatatttatgaactgaaccctaataaggagccatggagaaaaatggatcttagggatcaagaattggttaaaatagttggaatacgatatgaagttgggccccctacactctgttgcctaaaactagcatttatagatccagcaactggaaaacttatggacaaatctttctctattagatatcatgatatgccagatgttattgactttcttgtattgcgtcaattttatgatgaagcaagacagaggaattggcagtcttgtgacagattccgctctattattgatgatgcttggtggtttggaacagtgttaagtcaagagccatatcaaccacagtatcctgatagtcatttccagtgttatattgttaggtgggataatactgaaattgaaaaacttagcccatgggacatggaaccaattcctgataatgttgatccacctgaagaattaggagctagtatttctgtcacaacagatgagctagagaaattgctctataaaccacaagctggtgaatggggtcagaaatcaagagatgaagaatgtgatagaattatcagtggtatagatcaacttttgaatcttgatatagcagcagcttttgcaggccctgttgatttgtgtacatacccgaagtactgtactgtagtagcttatccaaccgatctttacacaattcgaatgagacttgttaatcgattttacaggaggctgtctgcgttagtttgggaagtcagatatatagaacataatgccagaacatttaacgaacctgagagtgtaattgcaagatcagctaaaaagataactgaccaacttttaaaatttatcaagaatcaacactgtacaaatatctcagaactttctaacacatctgaaaatgatgagcaaaatgctgaggatttggatgatagtgatcttcctaaaacatcttctggaaggaggagagtccatgatgggaaaaaaagcatcagagctacgaactatgttgaaagcaactggaagaaacagtgtaaggaactagtgaacttaatttttcagtgtgaagattctgaaccatttagacaacctgttgatttggttgaatatccagactacagagatattatagataccccaatggattttggaacagtaagggaaactctagatgcgggaaattatgacagccctttggagttttgcaaagacatccggctgatatttagcaatgcaaaagcgtatacaccaaacaaaagatcaaagatttatagtatgaccttgagattatctgccttatttgaagaaaaaatgaagaaaatctcttctgattttaaaattggtcaaaaattcaatgaaaaacttcgaagaagccagaggttcaagcaacggcaaaattgtaaaggtgacagtcagcctaacaaaagtatcagaaacctcaagccgaagaggttaaaatctcagacaaaaataattcctgagttggtaggttctcctacccagtctacctcaagtaggacagcttatcttggaacccacaagacaagtgctggtatctcttcaggtgttacttctggtgactcttcagattcagcagaatcatcagaaaggaggaaaagaaatagacctataacaaatggttctacattatctgaaagtgaagtggaagattctttagctacctctttgtcatcgtcagcttccagtagttctgaggaaagcaaagagagttccagagctcgtgaatcctcctcacgcagtgggctatccagaagcagcaatctcagggtaaccagaactagagctgctcaaagaaaaactggtcccgtttcattagcaaatggatgtggcagaaaagccactcgaaagagagtctatttaagtgattctgataacaattcattggagactggtgaaattctaaaagccagagctggaaataaccgaaaagtcttaaggaagtgtgctgctgtggctgccaataaaataaagctaatgagtgatgtagaagagaattctagctctgaaagtgtctgttctggtcggaagctgcctcaccgcaatgcttctgctgtagctagaaaaaagttattacataattctgaagatgaacagagcttaaagtcagaaattgaagaagaggagctaaaagatgaaaatcaactattaccagtgtccagttctcacactgcccagagcaatgttgatgaatctgaaaacagagactcagagtcagaaagtgatttgcgggtagcccggaaaaattggcatgctaatggttacaagtcccatactccagcaccttcaaagacaaaatttcttaaaatagagtcttctgaggaagactctaaaagtcatgattcagatcatgcatgtaacagaactgctggcccatcaacgtctgtgcagaaacttaaggcagagagcatctcagaggaagcagattctgaaccaggaagatctggtggtaggaaatacaatacatttcacaagaatgcgagtttctttaaaaaaaccaagattctgagtgactcagaagactctgaatctgaagagcaagatagagaagatgggaaatgtcataaaatggaaatgaacccaatttcaggaaatctgaactgtgaccctattgctatgtcccagtgttcctcagatcatggatgtgaaactgatttagattcagatgatgacaaaatagaaaaaccaaacaattttatgaaagattctgcatcacaagacaatggactaagcagaaaaatttccaggaaaagggtctgttccagtgactcagacagtagtttacaggtggttaagaaatcatcaaaagccagaacaggtctcctgaggattactcgaagatgtgcagctacggctgccaataagatcaagctcatgagtgatgtagaagatgtcagtttagaaaatgtgcacactagaagcaaaaatggaaggaaaaaacctctccatcttgcttgtactacagctaagaagaaattgagtgattgtgaaggaagtgtacattgtgaagtaccaagtgaacagtatgcctgtgaaggcaagccacctgatcctgactccgaaggtagtacaaaagtgcttagtcaggctctaaatggagactcagactctgaagatatgttgaattcagaacacaagcacaggcataccaatattcacaaaatagatgcaccttctaaaagaaaaagttcctctgttacatcttcaggagaagattcaaaaagtcatattccagggagtgagactgataggacattttcttcagagtcaaccttggcacaaaaagctactgcagagaataattttgaagtggaactgaattatgggctgcgcaggtggaatggcagaagactcaggacctatggaaaggctccttttagtaagacaaaagtgattcatgattcacaggaaacagcagagaaggaagtaaaaaggaagagatcgcatcctgaattggaaaatgtgaaaatctctgaaacaactgggaattcaaagtttagacctgatactagttccaaatcatcagatttgggatctgtaactgaatcagatattgactgtactgataatacaaaaaccaaaaggaggaaaacgaaaggaaaagcaaaagtagttagaaaagaatttgttcctagagacagagaacccaatacaaaagtgagaacatgtatgcataatcagaaggatgcagtgcagatgcctagtgaaactctgaaagcaaaaatggtacctgagaaagttccccgcagatgtgctactgttgctgcaaataaaataaagataatgagtaatctaaaagaaacgatctcaggaccagaaaatgtctggattaggaagagtagcagaaaactgccccatcgaaatgcttctgctgcggctaagaaaaaattactgaatgtttataaagaggatgatacaaccataaattctgaaagtgaaaaagagctagaagatattaatagaaaaatgctttttttaagggggttcagatcctggaaagaaaatgcacaatagtgactatgagaatgtagaagtggcatctgaaaacaattggtacacaagtaaactggcagttacattctgctcccagctctaaaattactcccttattggcatctttggaggaattttctaaaagccataatccagtgggttcctcccagtcagctcttgtacagacatgtgctctggggaattctgaggaggaaataaattgcagagtctgtaggtggagaggtggaaagaaaagacaaatggcctgctataagactactattcctttccagaatgcaaggccttgaagacatgattccttagaggaagaatataatgggaagtgtacaggctaggaagaacttgaagtgaacaaatttcaaaatcttaacctgatgctaattttcagggttctccattacagtgtaaaaattcagaccacgacaactatggtgtcatgaggaaaaaaaatcaggcatttttccaaaggaagtgctaatgggcctatttgacttctgagtgaagcaaaaactacccagatccattccctacaattcacatccccaaaggtcaaaaacaaactaggaggacctgggaatttcagctggagatactgattattgagttctgaagtagagtgttggaaataggcaattagagaaagtccattgatgtcattttgtttataatattgcagttcatactgaatgaccacttgatatgactaattcagggaatatatatttttctatgaaagctatgaatgttactatcacggcttttccttatttttacttgtatgtagcagcatttacagaaatgccaaaaatgtgcctcattaagaggcaggtcttaatcagttagataaaaataaaatgtatagcttaagatcaaaacagtcatatttttagatacagtgaaatcttttatgtttctctacagcaccttaaaaattagaacttgaatactttgagtaaacttactacaatctcatcccaacaaactttaatggtagcatgtttggcctatttcattgtggcctgtactaggattagaaaatttggtcgtggtataacaaagaagtgtatttacaataggatttaatttgttgttaatatgtatttgttgaaattaaaattgccagattaaatgaatatactgtcgcatctttttaacatagtaacgtgttactggaaaaattaagttgttgaaagtaagttgttttcccatttaaaaatatctgaatatatgatttgcatgtgtaaatctgaaaaactaaactacagaaacctagggttttctatttcttttttaagtcaaatgcatttttttttttttgttatacagatgaaccaagtgtctaaaatacttgagaaatttgtggttgcatgtctgttttaaaaaaaaggctttttgttttttagcataagccagaatattctaacctactaagtctgtgtcctttgctccttttgtagtatactttcatctaaattactgatccccaatatgttgatacacaggtgagaaagggaagaattcctaataaactgctattacttttaggtgcatggggtttgatttttgagctctaatgaaatgcttaaacttctttccagttcaaattttacacttaatttataatatttattgagtatattatgtcctcaacaagtaactataaaatgaaatacttaactcggtgaagactattttatgcaaagtttttttttttttttttttttttttttagcaatttcagtgtaatgaaagaatttaagctttgaatttataatttgctgtggtggggttaatttctgtcagtatttgagattgtattatcagtcttgcataatgaaatccttttttggctaagtatttaattcgaacatatttgcctttttaaaaagtgcttggcctaaacttattgtaactgcatgaaataagcatttgcttaaaacttaacattgtaaaattgttctctctgaaatgtgtgcagaatttaaatcatggccaaatgtattactattaccctatttacagtaatttgctttgcagaaaatatttcttcatcatggaactgtgaaatcaaattgaagatcttactggtaaaaatgacaaattaacaaaaggactaagacaagtggtgcccaaacaacctttttattctgcagttccatcatcataatagaccagttaacccaggagtcctaatgttttaaaacatcattgtggtgatcttgtttattctatctcactaaggatatccagtttcctaagctcttactggctagcaatttcgtcttaattttattgctaaatgttcaaattttgcttccaaactcactttatttttgcagatgtgtacatctgctaagtactaattttatgtaaatgattttgttgattatctttccacatcttaaaatgtttctaacagctttgagattttatctcaacaggctctctctgaccccaaagtagtacttaccttcgtgactactgacaaagtcacaaaatgcaggcgatgtcatgtatttcggtacaactaaatctaggaaacggttttttcattgcattactgcatattttcattttcatttaaattatgtcccctttttctcttgcttgaaacagtgctcctcgaactttgtcttccagcacattttaaagagaaccaattaaagaacaatcacacattctgcttattaaaggctatttaaaaagaaacattttgtattagaaaatggccaactttaaaacactattttttacactcataaaaatgttttttaaatcgccttgacaatcatcagcttttgaaatgtgaattcctattgccagagtaaaggtctcgtttttataccacca

SEQ ID NO: 1058 - DNA, 2986 bp, Homo sapiens
  source 1..2986: mol_type = genomic DNA
acacctcagttcacaatcctggggcgatatggcagaatcttttttttcggattttggcttgttgtggtatctgaaggagctcagaaaggaagagttttggaaatttaaggagctcctcaaacaacctttggagaaatttgaactcaagccaatcccctgggctgagctgaagaaggcctccaaagaagatgtagcaaagctgctggacaaacattacccaggaaagcaggcatgggaggtaacactgaacctgtttctacagatcaataggaaagatctctggacaaaggctcaggaagagatgagaaataagctaaacccatacagaaagcatatgaaggaaacatttcaactcatatgggagaaggaaacctgtcttcacgtccctgagcatttctacaaagaaaccatgaaaaatgagtataaagaattgaatgacgcatatactgctgcggctagacgacacactgtggtcctggaaggtcctgatggaattggaaaaacaacccttttaagaaaagtgatgttggactgggcagagggaaacttatggaaggacaggttcacatttgtgtttttcctcaatgtctgtgaaatgaacggtatcgcagagaccagcttactggagctcctctctagggactggccggagtcttcagagaagatcgaagacattttttcccagccagagagaattctgttcatcatggatggctttgagcaactgaagtttaacttacaacttaaggctgacttgagcgatgattggaggcagcggcagccaatgccaattatcctgagcagtttgttgcaaaaaaagatgcttccagaatcctctctccttattgcattaggaaaactggctatgcaaaaacactattttatgttgcggcatccaaaactcataaagctcttaggattcagtgaatctgaaaagaagtcgtatttctcctacttctttggtgagaagagcaaagccctgaaagtcttcaattttgtgagagataatgggccgctgtttatcttgtgccataatccctttacgtgctggttggtctgtacttgtgtgaaacagaggctagagaggggagaagaccttgaaataaactcccaaaacaccacctatttatatgcatcctttttaacaactgtattcaaagcaggaagtcagagttttccacctaaggtgaacagagcccgactaaaaagcctgtgtgctttggctgcagagggaatttggacatatacatttgtattttcccatggggatctccggaggaatgggttatctgagtctgagggcgtgatgtgggtgggtatgagactcctccaaaggagaggggactgttttgccttcatgcatctgtgtatccaagagttttgtgccgccatgttttatttgctcaaacgacccaaagacgatcctaacccggccattggaagcataacccagcttgtaagagcaagtgtggttcagcctcaaaccctcttgacccaggtggggatattcatgtttggaatttcaacagaagaaatcgtcagcatgctggagacctcctttggttttccactgtcaaaagacctaaagcaggaaataacccaatgccttgaaagtttaagtcaatgtgaagctgatagggaagccatagctttccaggaactattcattggtttgtttgaaactcaggaaaaagaatttgtaaccaaagtgatgaatttctttgaagaagttttcatttatattggtaacatagaacatttggtaatagcttcattctgcctgaagcattgtcaacatttaacgacacttcgcatgtgtgtggagaatatctttccagatgactcaggatgcatctcagattacaatgagaagctcgtctactggcgggagctttgctcaatgttcattaccaacaagaacttccagattttagacatggaaaataccagccttgatgatccctccctggcgattctttgcaaagcgctggctcagcctgtttgtaaactccgaaaactcatatttacttctgtgtactttggacatgattcagaattatttaaggcagttcttcacaaccctcatctgaaacttctgagcctgtacggcactagcctctcccagtctgacatcagacacctgtgtgagacgctgaaacatccaatgtgcaagatagaagagctgatactgggaaagtgtgacatctccagtgaagtttgtgaagacatcgcctccgtcctggcctgcaacagcaagctgaaacacctctccttggtagaaaatcccttgagggacgaaggaatgacgttgctgtgtgaagccctgaagcactcacactgtgccctggagaggctgatgttgatgtactgctgtctcacctctgtctcctgtgactccatttccgaagtcctcttgtgcagtaagtccctgtccctcctcgatctgggctcaaatgccctggaagataatggagtggcatctctgtgtgcagcgctgaagcacccaggctgcagcatacgggagctgtggttgatgggctgtttccttacttccgattcctgtaaggacattgctgctgttcttatttgcaatgggaaactgaagaccctgaaacttgggcataatgaaataggagacactggtgtcagacagttatgtgcagctttgcagcatcctcactgtaaattagagtgtctcgggctgcaaacgtgtccgatcacccgtgcctgctgcgacgacatcgccgcagcactcatcgcctgcaaaacactgaggagcctgaacctcgactggattgccttggatgctgatgcagtggtggtgctgtgtgaggcattgagccacccggactgtgccctgcagatgctgggaaattgtcagaagtccctcggagacacagttgcaccaggtgagaaccactgctctataaaacatcttctacttacgttgcccataaatatgcaacgccagctcagacttcagaag

SEQ ID NO: 1059 - DNA, 3299 bp, Homo sapiens
  source 1..3299: mol_type = genomic DNA
ccaggaagagagctgtgaccagcagcgtcccttattcgcttggccttggttcctgtttgcactggctacagcagggcactggcccctactgtcaccgccacctacacaaagaccctatctctgagcgctgcagcctactgttcagccccaggtttgaggatggatgccctggacgcttcgaagctactggatgaggagctgtattcaagacagctgtatgtgctgggctcacctgccatgcagaggattcagggagccagggtcctggtgtcaggcctgcagggcctgggggccgaggtggccaagaacttggttctgatgggtgtgggcagcctcactctgcatgatccccaccccacctgctggtccgacctggctgcccagtttctcctctcagagcaggacttggaaaggagcagagccgaggcctctcaagagctcttggctcagctcaacagagctgtccaggtcgtcgtgcacacgggtgacatcactgaggacctgctgttggacttccaggtggtggtgctgactgctgcaaagctggaggagcagctgaaggtgggcaccttgtgtcataagcatggagtttgctttctggcggctgacacccggggcctcgtggggcagttgttctgtgactttggtgaggacttcactgtgcaggaccccacagaggcagaacccctgacagctgccatccagcacatctcccagggctcccctggcattctcactctgaggaaaggggccaatacccactacttccgtgatggagacttggtgactttctcgggaattgagggaatggttgagctcaacgactgtgatccccggtctatccacgtgcgggaggatgggtccctggagattggagacacaacaactttctctcggtacttgcgtggtggggctatcactgaagtcaagagacccaagactgtgagacataagtccctggacacagccctgctccagccccatgtggtggcccagagctcccaggaagttcaccatgcccactgcctgcatcaggccttctgtgcactgcacaagttccagcacctccatggccggccaccccagccctgggatcctgttgatgcagagactgtggtgggcctggcccgggacctggaaccactgaagcggacagaggaagagccactggaagagccactggatgaggccctagtgcggacagtcgccctaagcagtgcaggtgtcttgagccctatggtggccatgctgggtgcagtagctgcccaggaagtgctgaaggcaatctccaggaagttcatgcctctggaccagtggctttactttgatgccctcgattgtcttccggaagatggggagctccttcccagtcctgaggactgtgccctgagaggcagccgctatgatgggcaaattgcagtgtttggggctggttttcaggagaaactgagacgccagcactacctcctggtgggcgctggtgccattggttgtgagctgctcaaagtctttgccctagtgggactgggggccgggaacagcgggggcttgactgttgttgacatggaccacatagagcgctccaatctcagccgtcagttcctcttcaggtcccaggacgttggtagacccaaggcagaggtggctgcagcagctgcccggggcctgaacccagacttacaggtgatcccgctcacctacccactggatcccaccacagagcacatctatggggataactttttctcccgtgtggatggtgtggctgctgccctggacagtttccaggcccggcgctatgtggctgctcgttgcacccactatctgaagccactgctggaggcaggcacatcgggcacctggggcagtgctacagtattcatgccacatgtgactgaggcctacagagcccctgcctcagctgcagcttctgaggatgccccctaccctgtctgtaccgtgcggtacttccctagcacagccgagcacaccctgcagtgggcccggcatgagtttgaagaactcttccgactgtctgcagagaccatcaaccaccaccaacaggcacacacttccctggcagacatggatgagccacagacactcaccttactgaagccagtgcttggggtcctgagagtgcgtccacagaactggcaagactgtgtggcgtgggctcttggccactggaaactctgctttcattatggcatcaaacagctgctgaggcacttcccacctaataaagtgcttgaggatggaactcccttctggtcaggtcccaaacagtgtccccagcccttggagtttgacaccaaccaagacacacacctcctctacgtactggcagctgccaacctgtatgcccagatgcatgggctgcctggctcacaggactggactgcactcagggagctgctgaagctgctgccacagcctgacccccaacagatggcccccatctttgctagtaatctagagctggcttcggcttctgctgagtttggccctgagcagcagaaggaactgaacaaagccctggaagtctggagtgtgggccctcccctgaagcctctgatgtttgagaaggatgatgacagcaacttccatgtggactttgtggtagcggcagctagcctgagatgtcagaactacgggattccaccggtcaaccgtgcccagagcaagcgaattgtgggccagattatcccagccattgccaccactacagcagctgtggcaggcctgttgggcctggagctgtataaggtggtgagtgggccacggcctcgtagtgcctttcgccacagctacctacatctggctgaaaactacctcatccgctatatgccttttgccccagccatccagacgttccatcacctgaagtggacctcttgggaccgtctgaaggtaccagctgggcagcctgagaggaccctggagtcgctgctggctcatcttcaggagcagcacgggttgagggtgaggatcctgctgcacggctcagccctgctctatgcggccggatggtcacctgaaaagcaggcccagcacctgcccctcagggtgacagaactggttcagcagctgacaggccaggcacctgctcctgggcagcgggtgttggtgctagagctgagctgtgagggtgacgacgaggacactgccttcccacctctgcactatgagctgtgacaaggcagccaccctgtcacctagctcaatggagccccggatcccaagccctgcattgtaagcccacagtaggcactcaataaatgcttgttaaaggaagg

SEQ ID NO: 1060 - DNA, 1350 bp, Homo sapiens
  source 1..1350: mol_type = genomic DNA
atgcacacatacgcgcgcgcacatgcacataggcacacagagatacgcgcacacacacacacaaacgcactcagatttcccggaccctggttttcctcctgtgaccctttcggggccgggctctcaccctaaagaagcagccccgccctggggtggccccaccctctcttgggacctgtcataagtcggaccccgggcgcccggctgcgcagtcccagccgccttccccaggcagtggaaccttcgggctcctgagcttcaggatggttcgtactaagacatggaccctgaagaagcactttgttggctatcctactaatagtgactttgagttgaagacagctgagctcccacccttaaaaaatggagaggtcctgcttgaagctttgttcctcaccgtggatccctacatgagagttgtggaaagtaaaaatgtagccctaccaaaaggaactattgtactggcttctccaggctggacaacgcactccatttctgatgggaaagatctggaaaagctgctgacagagtggccagacacaataccactgtctttggctctggggacagttggcatgccaggcctgactgcctactttggcctacttgaaatctgtggtgtgaagggtggagaaacagtgatggttaatgcagcagctggagctgtgggctcagtcgtggggcagattgcaaagctcaagggctgcaaagttgttggagcagtagggtctgatgaaaaggttgcctaccttcaaaagcttggatttgatgtcgtctttaactacaagacggtagagtctttggaagaaaccttgaagaaagcgtctcctgatggttatgattgttattttgataatgtaggtggagagttttcaaacactgttatcggccagatgaagaaatttggaaggattgccatatgtggagccatctctacatataacagaaccggcccacttcccccaggcccacccccagagattgttatctatcaggagcttcgcatggaagcttttgtcgtctaccgctggcaaggagatgcccgccaaaaagctctgaaggacttgctgaaatgggtcttagagggtaaaatccagtacaaggaatatatcattgaaggatttgaaaacatgccagctgcatttatgggaatgctgaaaggagataatttggggaagacaatagtgaaagcatgaaaaagaggacacatggaatctggaggccatttagatgattagttaatttgtttttcaccatttagcaaaaatgtatactaccttaaatgtcttaagaaatagtactcataatgagtttgagctacttaataaaatacatttaagtggtatgtaa

SEQ ID NO: 1061 - DNA, 2230 bp, Homo sapiens
  source 1..2230: mol_type = genomic DNA
caggtcctagagcagctccagcaggatggcggctccagcgtctctaaggcctgcagggggtccagccccatggggggcgccctaggcctccgacagctccccatctgtgctcctgcctgccggccatcctcaggccactcgccatgggcggctgcttctccaaacccaaaccagtggagctcaagatcgaggtggtgctgcctgagaaggagcgaggcaaggaggagctgtcggccagtgggaagggcagcccccgggcctaccagggcaatggcacggcccgccacttccacacggaggagcgcctgtccacccctcacccctaccccagccctcaggattgcgtggaggctgctgtctgccacgtcaaggacctcgagaatggccagatgcgggaagtggagctgggctgggggaaggtgttgctggtgaaggacaatggggagttccacgccctgggccataagtgtccgcactacggcgcacccctggtgaaaggcgttctgtcccgtggtcgggtgcgctgcccctggcacggcgcctgcttcaacatcagcactggggacctggaggacttccctggcctggacagtctacacaagttccaggtgaagattgagaaggagaaggtgtacgtccgggccagcaagcaggccctacagctgcagcgaaggaccaaggtgatggccaagtgtatctctccaagtgctgggtacagcagtagcaccaatgtgctcattgtgggtgcaggtgcagctggcctggtgtgtgcagagacactgcggcaggagggcttctccgaccggatcgtcctgtgcacgctagaccggcaccttccctacgaccgtcccaagctcagcaagtccctggacacacagcctgagcagctggccctgaggcccaaggagtttttccgagcctatggcatcgaggtgctcaccgaggctcaggtggtcacagtggacgtgagaactaagaaggtcgtgttcaaggatggcttcaagctggagtacagcaagctgctgctggcaccagggagcagccccaagactctgagctgcaaaggcaaagaagtggagaacgtgttcactatccggacgccagaggatgccaatcgcgtggtgaggctggcccgaggccgcaacgtggtcgtcgtgggagccggcttcctggggatggaggtggccgcttacctgacggagaaggcccactctgtgtctgtggtggagctggaggagacgcccttcaggaggttcctgggggagcgcgtgggtcgagccctcatgaagatgtttgagaacaaccgggtgaagttctacatgcagacggaggtgtctgagctgcggggccaggagggaaagctgaaggaggttgtgctgaagagcagcaaggtcgtgcgggctgacgtctgcgtggtgggcattggtgcagtgcccgccacaggcttcctgaggcaaagcggcatcggtttggattcccgaggcttcatccctgtcaacaagatgatgcagaccaatgtcccaggcgtgtttgcagctggcgatgctgtcaccttcccccttgcctggaggaacaaccgcaaagtgaacattccacattggcagatggctcatgctcaggggcgcgtggcagcccagaacatgttggcgcaggaggcggagatgagcactgtgccctacctctggaccgccatgtttggcaagagcctgcgctacgcgggctacggagaaggcttcgacgacgtcatcatccagggggatctggaggagctgaagtttgtggctttttacactaaaggcgacgaggtgatcgccgtggccagcatgaactacgatcccattgtgtccaaggtcgctgaggtgctggcctcaggccgtgccatccggaagcgggaggtggagactggcgacatgtcctggcttacggggaaaggatcctgagctcacatgcagtagacttgggcaggcaaagggggcaccaagggcacaggccaagccttgggggcaggtgccaatctccagtcccaggatcccccagggcagaacctgagccctcccagtgcttgccttcagccacctggctcccctcctgggaggcctctgctggatccagaagatgctcaaccctcaaggcctctgctgccactgacagctggcactggaggcaggacaagccctgcctcttctccctctattgggactggtcccctgaagaaccctgcaacacgtta

SEQ ID NO: 1062 - DNA, 3462 bp, Homo sapiens
  source 1..3462: mol_type = genomic DNA
ctcaagaatgccagtgtgtgtgtagcctccacagagaggtcgttttctcggagtccagaggggccgcctgagcttctgagaactagggaggagccatcccagccatgagcccctgtgggaatctgctgggggccaagtggcctggagtcctcaggctcccgcagctgctccggagggagaggtgagctcagggcagcctgcctgcagccagaggtgccgggagccccgggcctgtcatggtggccatctacagccggcctgaggcagtcacagacggatttgcagctgagcctgtctatctggtgtgggaagaagatggggagttacttgtcagtcccggcttacttcacctccagagacctgtttcggtgttcagaatgccaggattccctcaccaactggtactatgagaaggatgggaagctctactgccccaaggactactgggggaagtttggggagttctgtcatgggtgctccctgctgatgacagggccttttatggtggctggggagttcaagtaccacccagagtgctttgcctgtatgagctgcaaggtgatcattgaggatggggatgcatatgcactggtgcagcatgccaccctctactgtgggaagtgccacaatgaggtggtgctggcacccatgtttgagagactctccacagagtctgttcaggagcagctgccctactctgtcacgctcatctccatgccggccaccactgaaggcaggcggggcttctccgtgtccgtggagagtgcctgctccaactacgccaccactgtgcaagtgaaagaggtcaaccggatgcacatcagtcccaacaatcgaaacgccatccaccctggggaccgcatcctggagatcaatgggacccccgtccgcacacttcgagtggaggaggtggaggatgcaattagccagacgagccagacacttcagctgttgattgaacatgaccccgtctcccaacgcctggaccagctgcggctggaggcccggctcgctcctcacatgcagaatgccggacacccccacgccctcagcaccctggacaccaaggagaatctggaggggacactgaggagacgttccctaaggcgcagtaacagtatctccaagtcccctggccccagctccccaaaggagcccctgctgttcagccgtgacatcagccgctcagaatcccttcgttgttccagcagctattcacagcagatcttccggccctgtgacctaatccatggggaggtcctggggaagggcttctttgggcaggctatcaaggtgacacacaaagccacgggcaaagtgatggtcatgaaagagttaattcgatgtgatgaggagacccagaaaacttttctgactgaggtgaaagtgatgcgcagcctggaccaccccaatgtgctcaagttcattggtgtgctgtacaaggataagaagctgaacctcctgacagagtacattgaggggggcacactgaaggactttctgcgcagtatggatccgttcccctggcagcagaaggtcaggtttgccaaaggaatcgcctccggaatggcctatttgcactctatgtgcatcatccaccgggatctgaactcgcacaactgcctcatcaagttggacaagactgtggtggtggcagactttgggctgtcacggctcatagtggaagagaggaaaagggcccccatggagaaggccaccaccaagaaacgcaccttgcgcaagaacgaccgcaagaagcgctacacggtggtgggaaacccctactggatggcccctgagatgctgaacggaaagagctatgatgagacggtggatatcttctcctttgggatcgttctctgtgagatcattgggcaggtgtatgcagatcctgactgccttccccgaacactggactttggcctcaacgtgaagcttttctgggagaagtttgttcccacagattgtcccccggccttcttcccgctggccgccatctgctgcagactggagcctgagagcagaccagcattctcgaaattggaggactcctttgaggccctctccctgtacctgggggagctgggcatcccgctgcctgcagagctggaggagttggaccacactgtgagcatgcagtacggcctgacccgggactcacctccctagccctggcccagccccctgcaggggggtgttctacagccagcattgcccctctgtgccccattcctgctgtgagcagggccgtccgggcttcctgtggattggcggaatgtttagaagcagaacaagccattcctattacctccccaggaggcaagtgggcgcagcaccagggaaatgtatctccacaggttctggggcctagttactgtctgtaaatccaatacttgcctgaaagctgtgaagaagaaaaaaacccctggcctttgggccaggaggaatctgttactcgaatccacccaggaactccctggcagtggattgtgggaggctcttgcttacactaatcagcgtgacctggacctgctgggcaggatcccagggtgaacctgcctgtgaactctgaagtcactagtccagctgggtgcaggaggacttcaagtgtgtggacgaaagaaagactgatggctcaaagggtgtgaaaaagtcagtgatgctccccctttctactccagatcctgtccttcctggagcaaggttgagggagtaggttttgaagagtcccttaatatgtggtggaacaggccaggagttagagaaagggctggcttctgtttacctgctcactggctctagccagcccagggaccacatcaatgtgagaggaagcctccacctcatgttttcaaacttaatactggagactggctgagaacttacggacaacatcctttctgtctgaaacaaacagtcacaagcaaaggaagaggctgggggactagaaagaggccctgccctctagaaagctcagatcttggcttctgttactcatactcgggtgggctccttagtcagatgcctaaaacattttgcctaaagctcgatgggttctggaggacagtgtggcttgtcacaggcctagagtctgagggaggggagtgggagtctcagcaatctcttggtcttggcttcatggcaaccactgctcacccttcaacatgcctggtttaggcagcagcttgggctgggaagaggtggtggcagagtctcaaagctgagatgctgagagagatagctccctgagctgggccatctgacttctacctcccatgtttgctctcccaactcattagctcctgggcagcatcctcctgagccacatgtgcaggtactggaaaacctccatcttggctcccagagctctaggaactcttcatcacaactagatttgcctcttctaagtgtctatgagcttgcaccatatttaataaattgggaatgggtttggggtattaa

SEQ ID NO: 1063 - DNA, 1595 bp, Homo sapiens
  source 1..1595: mol_type = genomic DNA
gcccgccggtccacgccgcgcaccgctccgagggccagcgccacccgctccgcagccggcaccatgcgcgagatcgtgcacatccaggcgggccagtgcggcaaccagatcggcgccaagttttgggaggtcatcagcgatgagcatgggatcgaccccacaggcagttaccatggagacagtgacttgcagctggagagaatcaacgtgtactacaatgaggctgctggtaacaaatatgtacctcgggccatcctggtggatctggagcctggcaccatggactctgtcaggtctggacccttcggccagatcttcagaccagacaacttcgtgttcggccagagtggagccgggaataactgggccaagggccactacacagagggagccgagctggtcgactcggtcctggatgtggtgaggaaggagtcagagagctgtgactgtctccagggcttccagctgacccactctctggggggcggcacggggtccgggatgggcaccctgctcatcagcaagatccgggaagagtacccagaccgcatcatgaacaccttcagcgtcatgccctcacccaaggtgtcagacacggtggtggagccctacaacgccaccctctctgtccaccagctggtggaaaacacagatgaaacctactccattgataacgaggccctgtatgacatctgcttccgcaccctgaagctgaccacccccacctacggggacctcaaccacctggtgtcggccaccatgagcggggtcaccacctgcctgcgcttcccgggccagctgaacgcagacctgcgcaagctggcggtgaacatggtgcccttccctcgcctgcacttcttcatgcccggcttcgcgcccctgaccagccggggcagccagcagtaccgggcgctcacggtgcccgagctcacccagcagatgttcgactccaagaacatgatggccgcctgcgacccgcgccacggccgctacctgacggtggctgccatcttccggggccgcatgtccatgaaggaggtggacgagcagatgctcaacgtgcagaacaagaacagcagctacttcgtggagtggatccccaacaacgtgaagacggccgtgtgcgacatcccgccccgcggcctgaagatgtcggccaccttcatcggcaacagcacggccatccaggagctgttcaagcgcatctccgagcagttcacggccatgttccggcgcaaggccttcctgcactggtacacgggcgagggcatggacgagatggagttcaccgaggccgagagcaacatgaacgacctggtgtccgagtaccagcagtaccaggacgccacggccgacgaacaaggggagttcgaggaggaggagggcgaggacgaggcttaaaaacttctcagatcaatcgtgcatccttagtgaacttctgttgtcctcaagcatggtctttctacttgtaaactatggtgctcagttttgcctctgttagaaattcacactgttgatgtaatgatgtggaactcctctaaaaattacagtattgtctgtgaaggtatctatactaataaaaaagcatgtgtaga

SEQ ID NO: 1064 - DNA, 4968 bp, Homo sapiens
  source 1..4968: mol_type = genomic DNA
agccgcgcccgccagcgccctcggtgggcacagccacccggagcggcgcgggtgccgggagctgggcgacgcgcccctcctgccccggctgcgctgttgcccgggcggccgacctccgtgcgtgagcgccggcaggcaccttgcgcgcgcggaacctgctgacatggccaagcatggagccgacgagccatcctccaggtcagggagtccggacagggaaggtagggcctctgaggacagatcgctgcttcatcagaggctggctgtccgggagctcatcgacactgaggtctcctacttgcacatgctccagctctgtgcctctgacatcaggagccgcctccagcagttgccgcagggagatctggatgtcctgttctcaaacattgatgatatcatcaaagtgaacagcagattcctccatgatctgcaggagacagcctccaaggaagaggaacaagtgcagctagttggtaacatatttctggaattccaagaggagttggagcaagtctataaggtctactgtgccagctacgaccaggccttgctactggtggacacgtaccggaaggagccggagctgcagcggcacatccagggcatcgttgaggcggtggtgccgcaagctggatcttcaggcctcagtttcttgctggtaattcctctgcagaggatcaccaggtacccactgctgctgcagaaaatcctggagaacacagtccctgatgccagtgcctatcctgtccttcagagggctgtctctgccctccaggacgtgaacaccaatatcaatgagtacaagatgcgcaaggaagtggcctccaagtacaccaaggtagagcagctgaccctccgggagcggctggcccgcatcaacacacacaccctctccaagaagaccacccggctgagccagctgctgaagcaggaggcggggctgatccccaggacagaagacaaggaatttgatgatttagaagagaggttccagtgggtgtctctgtgtgtgactgagctgaagaacaacgtggctgcttacctggacaatctgcaggctttcctctacttcaggccgcacgaatacaatctggacatccccgaggggcctgcagtgcagtattgcaatttggcaagagaccttcaccttgaggccttcctgaaatttaagcaacggctagaaggcctggtgtggcagccactgtgcagcctggccaaagccctgcttggccctcagaacctgatcaagaagcgtctggacaagctactggactttgagcgggtggaagagaagctgctggaggtgggcagtgtgacctaccaggaggaggccgcccggcacacataccaggcactcaactcgctgctagtggctgagctcccacagtttaaccagctggtcatgcagtggctgggccagatcatgtgcacattcgtgaccctccagagggaccttgcaaagcaagtgctgcagagggcagagggaagcatggcccagctgccccaccaccacgtcccagagcctgccttcaggaagctggtggaggacgcactgggccggacgagtaaccagcttcgctcctttcaagagacctttgagaaagtgcagccacctcccaccacacaaccgctccttccagggtctgaacgccaggtgcaggctctcctgagcaggtatggccctgggaagctgtaccaggtgacaagcaacatcagtgggactgggactctggacctgactctgcctcggggccaaatcgtggccatccttcaaaacaaggacaccaaaggcaacagcggccgctggctggtggacaccgggggacatcgtgggtatgtgccggctgggaaactacagctgtaccatgtggtccccagtgcagaggagctcagaaggcaggcggggctgaacaaagacccccgatgtctaacaccggagcccagcccagctctagtgccctctattcccaccatgaaccaggtcatagccgcgtacccttttgtggccagaagcagccatgaagtgagcctgcaggcaggccagcctgtgaccatcctggaggcccaggacaagaaggggaaccctgagtggagcctggtggaagtgaatggacagaggggttatgtgccttctggcttcttggccagggctcggagcccagttctgtggggctggagtctgccctcttagggtaccctctttggagcctacattgccaaatgatgggggaggcttagaggctctgaccctggggggaaaagaagcaaaggaaaggtggaggtggaagggaagaccaggccagggtgggtgaagcacactcaggaggcagccagaagacatgggcgggcctcgcagagtgcttggtgtggtgggggcacaggaggctccagccaggactgctcattatgtctgcataaagaactcattccgacctggggtcacaatgcacttggacagcaggtcacagctgattggccaggactctccataggttatggccagtcttagctgtgcctgcatccgggcctgcctgtgggcgtgggtcacacgggataatgttacctgcgtgctgtgtggttgcaggaagcgggttctggaggagtccagaactgcctggtcagacagttcacttcctacacatggtatcaggagacatcataaccaatgagtcagcttttatttctctatgctggaagctgagtttatcttgggcagtgacccactgggagccctctcaagtggggaagccatggatttatcggtgtagcagagaggttcccaagactcttgactggtcctgggagtgggtgtgaccaagtcatagttctggaatgtgtgtaggcaaattcagaggctgttccagggaagaggggattttgatactgtgttaggtggggtgtgtgaggctgttggcagcaggtgaacagctactgctgtgttctcaggactagggaacaaaggggtatgcaaatcatagaggaaactctgggaaggcggtgataaggcctggtgggtggggaggttagggaatggcttgctttcctgtttctggttagaaggggagccagggggaacccccagtggtttcaggtggcccctgaggtcctggaggcagccgtggatgtgatgcaattggctgtgggaccttagatgtaggacacaacttcagtgttcccatccagaaagacctcactcacagggttgtgctgagaatgacgtggggctaagcatgcagagctccctgtaaactgtgaagtgtgatacaaatgtaaatgacagcagtgatctcggggtggcccccggcatgctgccctcccccacgcccatgcctgtggcagcaaaccttgttcatcagtatagctttctttcctgtaacccaggatctaccttggggggcttctcaatactgcattctatgtagccagcctctttaacttggtaagtgagccaccccattctagaacctggaaattggagcccctcaaaaacagttcctgttcaaggaggactgacctgctggggcaatgttgggtgcagtgcagtccctgcttggggtggtcatgtctaggctgttgctctgggcaaagataagttgcaagattcacagaaatgggaaaatgtgaccaagtgtgatcttaacaactgacaaagtttgtaaccaacccaagttagaatgtgtgtcaaacaggaggtagtttagatatgcttccaagaacatgtctgtgttataaccatagtgcctaagcagtgagctctggtttttgaagggcttttaagaaatatatacatgtctgtgtcagtctataacttgcctcctctgggcctgttaaagcatgaagactgcatgacacaagagaaatgcaagccctacggttcctttctcagcagcgaattcacttgagaggatgctcttgactcattctctctgctctttcctgctcagatttctgataaaaatagagagcataggggaacagataatgaaataggaaacccactcgtgggttccacagatacctaccgaaggcctactgtgtgctagaattgtagctcaggagttctcagtgtagctgctcactgaagttaccatggcaggtttcaactggcagaatccaggctccgtcccacccagagattctgatgaaattggtttagggtgtggctcgggcctcaggaattcagaaagcttcccaggtgcttccaatgtgcagccagggttagggacctctaccctagacacaaagtattggacagatagacctggtgccagagatggccatgagctgtaagctaggacgtgccccacctgagctctgcactagctagttcaaacaggcgctttaaaggcagtgtgaaaggggacagcctgttctgccaggtctcagaatgtatatttattaagtgccattaaaagggacctgaacaaaattggatgtcttgtaggcataagggaggaaaataaaatatacttggaaccaagtctatgtcatgaagggaaaataaaaatgtattcagtagcacgtgggttatggtttctcatagaccaggggataagattaaaagtcactgaagagtgggaaaatgcatgttgagaagatgagaatggcctgtattttctccaggggaatctgtgtaatgtgccttttccctctccaaatgcctagaaccatggcactgtgtcttatttatttaaccgttgggctgtctcatactaaacttgcaaagatatttgcctatgaactgaacaagacttccaggagttgaagtctggttcacaagggtaccccttgcctcctgtgatggagtgagaactcttaaacccctcaggccccaactcagttgtggagatgaggacaagattacaatatcaaaagaaagatgaatgaattcttggttaatatgacgaaccccagctcaatgagtaactgatgtgaactgctgggaataaaggacttcaaagatggaaa

SEQ ID NO: 1065 - DNA, 3795 bp, Homo sapiens
  source 1..3795: mol_type = genomic DNA
gagttccgtattctagttctgtgtgatctgatctttaccttcccttccttggatccctgtgcacctactggagccaggttactctgggtcctggacctgactgcctcattctggaggcttccagacagccacagttagtgcccaaacctgagaggatggcttcagatggagcatctgcattgccgggaccggatatgagcatgaaacctagtgccgccccgtctccatcccctgcacttccctttctcccaccaacttctgacccaccagaccacccacccagggagccacctccacagcccatcatgccttcagtattctctccagacaaccctctgatgctctctgctttccccagctcactgttggtgacaggggatgggggcccttgcctcagtggggctggggctggcaaggtcattgtcaaagtcaagacagaaggggggtcagctgagccctctcaaactcagaactttatccttactcagactgccctcaattcgactgccccgggcactccctgtggaggccttgagggtcctgcacctccatttgtgacagcatctaatgtgaagaccattctgccctctaaggctgttggtgtcagccaggagggtcctccaggccttccgcctcagcctccaccaccagttgctcaactggtccccattgtgcccctggaaaaagcttggccagggccacatgggacaaccggggaaggaggtcctgtggccactctatccaagccttccctaggtgaccgctccaaaatttccaaggacgtttatgagaacttccgtcagtggcagcgttacaaagccttggcccggaggcacctatcccagagtcctgacacagaagctctttcctgttttcttatcccagtgcttcgttccctggcccggctgaagcccactatgaccctggaggagggactgccattggctgtgcaggagtgggagcacaccagcaactttgaccggatgatcttttatgagatggcagaaaggttcatggagtttgaggctgaggagatgcagattcagaacacacagctgatgaatgggtctcagggcctgtctcctgcaacccctttgaaacttgatcctctagggcccctggcctctgaggtttgccagcagccagtgtacattccgaagaaggcagcctccaagacacgggccccccgccggcgtcagcgtaaagcccagagacctcctgctcctgaggcacccaaggagatcccaccagaagctgtgaaggagtatgttgacatcatggaatggctggtggggactcacttggccactggggagtcagatggaaaacaagaggaagaagggcagcagcaggaggaggaagggatgtatccagatccaggtctcctgagctacatcaatgagctgtgttctcagaaggtctttgtctccaaggtggaggctgtcattcaccctcaatttctggcagatctgctgtccccagaaaaacagagagatcccttggccttaattgaggagctagagcaagaagaaggactcactcttgcccagctggtccagaagcgactcatggccttggaagaggaggaagatgcagaggcgcctccaagtttcagtggcgctcagttggactcaagtccttctggttctgttgaggatgaagatggggatgggcggcttcggccctcacctgggcttcagggggctgggggcgccgcttgccttggaaaggtttcttcttcaggaaaacgggcaagagaagtgcatggtgggcaggagcaagccctagatagccccagagggatgcacagggatgggaacactctgccatcccccagcagctgggacctgcagccagaacttgcagctccacagggaactccgggacccttgggtgtggagaggagagggtctgggaaggttataaaccaggtatctctacatcaggatggccatctaggaggcgctgggcctcctgggcactgcctggtggctgataggacttcagaggctctgcccctttgttggcagggaggcttccagcctgagagcactcccagtttggatgctggacttgcagagctggctcctctgcaaggacaagggttagaaaagcaagtcctgggattgcagaaaggacaacaaacagggggtcgtggagtgcttcctcaagggaaggagcctttagcagtgccctgggaaggctcttcaggagccatgtggggagatgacagaggtacccccatggctcagagttatgatcagaatccttcccctagagcagctggggagagggacgatgtctgtctcagcccaggagtttggctgagcagtgagatggatgctgtaggcttggagctgcctgtacaaatagaggaggtcatagagagcttccaagttgagaagtgtgtaactgagtatcaggaaggctgccagggactgggctccaggggcaacatttccctgggtcctggagaaaccctagtacctggggatacggagagcagtgtgattccctgtggaggcacagttgcggcagctgccctagaaaagagaaactattgcagcttgccaggacctttgagggccaacagcccacccttgaggtccaaagaaaatcaagaacagagctgtgaaaccgtagggcatcccagtgatctgtgggcagaaggttgcttcccattgctagaaagtggtgattccacactggggtcttccaaagaaacccttccacccacatgccaaggcaatctccttatcatggggactgaggatgcctcctccttgcctgaagccagtcaagaggcagggagcagaggcaattccttttctcctctgttggaaaccatagaacctgtcaacatactagatgttaaagatgactgtggcctccaactaagggtcagcgaggacacctgcccactgaatgttcattcttatgacccccaaggagaaggcagggtggatcctgatctgtccaagcctaaaaaccttgctcctttacaagagagtcaggagtcttacacaactgggactcccaaagcaacatcttctcaccagggccttggaagcactttgcctagaaggggaaccaggaatgccatagttccgagagaaacttctgttagtaaaacacacaggtcagcagacagggccaaaggaaaggagaaaaagaaaaaggaagcagaggaagaggatgaggaactctccaactttgcttacctcttggcctctaaacttagcctctcaccaagggagcatcccctcagtcctcaccatgcctcaggaggtcagggcagccagagagcatcccacctgctccctgctggagcaaaaggccccagcaaacttccatatcctgttgccaagtctgggaagcgagctctagctggaggtccagcccctactgaaaagacaccccactcaggagctcaacttggggtccccagggagaaacccctagctctgggagtagttcgaccctcacagcctcgtaaaaggcggtgtgacagttttgtcacgggcagaaggaagaaacgacgtcgtagccagtagggagcagcgggaccatctgaccccacttgccagtccctaaaggtgggtgccccagagtagattccacccctgctgcccaccaatggagaatcccaatgttgaatctcatcccaatgttgttttgttgttctgcaaaagtggcaagcatggagagagaggtcagactggctaggctgcagggggaattacctttggaaggagctatatagaaaaaaaatgaataaagtgttttgttggaaaa

SEQ ID NO: 1066 - DNA, 997 bp, Homo sapiens
  source 1..997: mol_type = genomic DNA
gcagagaacgaatacgctccgttttaattcagtggcctgggctacatgggatatttaggacagactatctctctgagacagaaaaacaagggaggaggcagtatgaaagaatgtattctcgctaaattccagtttctaaaggatgtgtaagaaaccagaggtaaaggtctcgcgatatcttaagacatccggcgtagtacgcttcagtgagccacagcgctagagaagtaggagaagctcgcgagatctgtgccgttgccgaggagactaggagggggaggagaggggatctcgcgaaaggaaagaggtcgggagcgctcgcgagatctcggaccacccaacctgaaaggtgcttaggaagttgaaaggcccagaggaggcctccgggcaaatggccggagctggaccgaccatgctgctacgagaagagaatggctgttgcagtcggcgtcagagcagctccagtgctggggttagcacgggctctggttctgggactgaggggcagtcaagcagcaagatggagggggtggggaactgcagctcccggcagcctctgggctttgtgtgagtgccccgcgggctgccgggagctgtggttccgcgggcgggcagcctgggctgcgcggtctgagcgcttgttacaccccgcgcaggattcggacggagagcgcgaggactcggcggctgagcgcgcccgacagcagctagaggcgctgctcaacaagactatgcgcattcgcatgacagatggacggacactggtcggctgcttcctctgcactgaccgtgactgcaatgtcatcctgggctcggcgcaggagttcctcaagccgtcggattccttctctgccggggagccccgtgtgctgggcctggccatggtacccggacaccacatcgtttccattgaggtgcagagggagagtctgaccgggcctccgtatctctgaccacgatggcgcttacctttcagacttcattaaacttatgaccg

SEQ ID NO: 1067 - DNA, 1161 bp, Homo sapiens
  source 1..1161: mol_type = genomic DNA
aaactcaagaactttactctcttggaaacccaaatagatccttcaccctctgacaccatggtcaactcctgttgtggctccgtgtgctctgaccaaggctgtggccaagacctctgccaggagacctgctgctgccccagctgctgtcagaccacctgctgcaggaccacctgctaccgccccagctacagtgtgtcctgctgctgcagaccccagtgctgccagtctgtgtgctgccagcccacctgctgtcgccccagctgctgtgtgtccagctgctgcaagccccagtgctgccagtctgtgtgctgccagcccacctgctgccaccctagctgctgcatctccagctgctgccgccccagctgctgtgtgtccagctgctgcaagccccagtgctgccagtctgtgtgctgccagcccaactgctgccgccccagctgcagcatctccagctgctgccgcccctcttgctgtgaatccagctgctgccgcccctgctgctgcctgcgtccagtctgtggccgagtctcctgccacaccacttgctatcgcccagcctgtgtcatctccacctgcccccgccccgtgtgctgcgcctcctcttgctgctgagcccactgccctggctcatctctcccttcaccgctggtccacaaatgtagaccattcttctgtgctgaatattaggacacatggagtgggatttatgtcattcagcagggtggacctcatgtatccaatgagcccatcaccatcccgctgactctgtgagaacattctggttcattttaaactccctcccttgctttctttttcttccagtcatggcaccaaatacgaattaatttgtaatccactagctaagaaattattccaatcctctaaattcctcattttttaaaatcattttgagcctacagaatatccttcccaattaggtacacattatctccctttcaaacatactatttgtctgtcagcctttcagtcattcttttcttttggaaaggtaggaggctgcccctcccgtgctctcccgctttctccctgctctctctttctctcactgttcaagtttgtcagaatttttctattttattagttctttatctttattgtgttcacaaaatatattgtattaaacttttcatttagaaa

SEQ ID NO: 1068 - DNA, 440 bp, Homo sapiens
  source 1..440: mol_type = genomic DNA
cacctcaactgaaatctaacctcctgaaatcatgtgttgcaactactacagaaactgctgtgggggctgtggatatggctctggctggagttccggctgtggatatggttgtggctatggctgtggatacggctctggctgtagatatggctctggctatggaactggctgtggctatggctgtggatacggctctggctgtggatatggctgtggatacagctctagctgctgtggctaccgaccactttgctacagaagatgctattcctcttgctactaatcatcactacaggtcatccttggctttgcaatgacctctccaagatcaagttcaattgaaatctcccctacccattatcttcacatctaagtaaaggttgactatggtcacctgactatctgaatgcatataagagaagctgttggcagtggatgga

SEQ ID NO: 1069 - DNA, 1281 bp, Homo sapiens
  source 1..1281: mol_type = genomic DNA
aacagggcttcgtcttctttgcagagccatgggcagcaggaagaaggaaattgccctgcaggtcaacatcagcacccaagagctttgggaggaaatgctcagttccaaaggactaactgttgttgatgtctatcaaggctggtgtggcccctgcaaacctgtggtgagcctcttccagaagatgaggatcgaggtcggcctggaccttctgcactttgcattagcagaggcagatcgtcttgatgtcctcgaaaagtacagagggaagtgcgagccaacctttctgttttatgcaggaggagaactggtggctgtggttagaggagcaaatgccccactgctgcagaaaaccatcctagaccagctggaggccgaaaagaaagtgctggctgaaggcagagaacggaaagtgattaaagatgaggctctttctgatgaagatgaatgtgtttcccatggaaagaataatggtgaagatgaggacatggtttcatcagagaggacctgtaccttggccatcattaaaccagatgcagtggcccatggaaagactgatgagattatcatgaagattcaggaagctgggtttgaaattctaacaaatgaagagagaaccatgacagaggcagaagtgcgacttttctaccaacacaaagctggagaggaggcatttgagaagctggtacatcacatgtgcagtggaccaagccacctcctgatcctcaccaggactgagggcttcgaggacgtggtcactacctggcgaaccgtcatgggcccccgtgaccccaatgtggccaggagggagcagccagaaagtctccgagctcagtacggcacagaaatgcccttcaatgccgtccatggaagccgggacagagaagatgctgacagagaactggcattgctcttccccagtttgaaattttcagacaaagatacagaagcccctcagggcggtgaggctgaagcaacagcggggcccactgaggcgctttgctttcctgaggatgtggattgagatggctgtgctgctcttccagagcacgtgaccaggggtctactgcacaaaacagacctccggaatcggaacttactcttttgagtaccaatactttttggtttagctgtcttttgtagacaatgaaaataatatggctgggcgcagtgactcacacctgtaatcccagcactttgggaggccgaggcaggtggatcacctgagattaggagtttgacaccagcctagccaacatggtgaaaccctgtctctactaaaaa

SEQ ID NO: 1070 - DNA, 606 bp, Homo sapiens
  source 1..606: mol_type = genomic DNA
atggtcagctcctgttgtggctccgtgtgctctgaccagggctgcggccaagacctctgtcaggagacctgctgccgccccagctgctgtgagaccacctgctgcaggaccacctgctgccgccccagctgttgtgtatccagctgctgcaggccccagtgctgccagtctgtgtgctgccaacccacttgttcccgccccagctgctgtcagaccacctgttgcaggaccacctgctaccgccccagctgttgtgtgtccagctgctgcaggccccagtgctgccagcctgcgtgctgccaacccacttgctgtcgcccccctaggtgctgcatctccagctgctgtcgccccagctgctgtgtgtccagctgctgcaagccccagtgctgccagtctgtgtgctgccagcccaactgctgccgccccagctgcagcatctccagctgctgccgcccctcttgctgtgaatccagctgctgccgcccctgctgctgcgtgcgtccagtctgtggccgagtctcctgccacaccacttgctatcgcccaacctgtgtcatctccagctgcccccgccccttgtgctgtgcctcctcttgctgctga

SEQ ID NO: 1071 - DNA, 1036 bp, Homo sapiens
  source 1..1036: mol_type = genomic DNA
gcggggcggcggggcggccggcggcggccatgggagatatcccagccgtgggcctcagctcctggaaggcttctccagggaaagtgaccgaggcagtgaaagaggccattgacgcagggtaccggcacttcgactgtgcttacttttaccacaatgagagggaggttggagcagggatccgttgcaagatcaaggaaggcgctgtaagacgggaggatctgttcattgccactaagctgtggtgcacctgccataagaagtccttggtggaaacagcatgcagaaagagtctcaaggccttgaagctgaactatttggacctctacctcatacactggcccatgggtttcaagcctcctcatccagaatggatcatgagctgcagtgaactttccttctgcctctcacatcctcgagtgcaggacttgcctctggacgagagcaacatggttattcccagtgacacggacttcctggacacgtgggaggccatggaggacctggtgatcaccgggctggtgaagaacatcggggtgtcaaacttcaaccatgaacagcttgagaggcttttgaataagcctgggttgaggttcaagccactaaccaaccagattttgatccgatttcaaatccagaggaatgtgatagtgatccccggatctatcaccccaagtcacattaaagagaatatccaggtgtttgattttgaattaacacagcacgatatggataacatcctcagcctaaacaggaatctccgactggccatgttccccataactaaaaatcacaaagactatcctttccacatagaatactgaggacgcttccccttccttgtttctgctcagcccagatgcacagacactattggcaatgttgaccctcctctgtcatcacagcgccagggcagctgtgcctgggacaggagccacacagtcagagggggatgtaagagccaccttctctgacaaatctggagaattgagtgtgttctaagtgaaggcaatggggtttctccaagacagcctgtgtg

SEQ ID NO: 1072 - DNA, 330 bp, Homo sapiens
  source 1..330: mol_type = genomic DNA
gcattgaactgaatctctagtccctgacaccatgagatactatggcagctactacagaggcctgggatatggctgtggaggctttggtggtctgggctatggctgtggctgtggaggctacagatatggctctggctatggaggctatagatatggctgctgccgcccatcatgccgtgaaggatatggattctctggattctactaaaaaacttgctgattctcatactctaactccaagatcttgcccgtatgcttcagcaaggcgaacacttttctcaatgtagagaaaatacctaccattttttggcttcatgctccagaaggaac

SEQ ID NO: 1073 - DNA, 394 bp, Homo sapiens
  source 1..394: mol_type = genomic DNA
gcaaacccaactcactatctctgacaccgtgagctactagggcagctactgtggaggtctgggctatggctgtggaggctttggtggcatgtgctatggctacggctgtggatgtggcagcttctgcagactgggctatggctgcggctatgaaggatgcagatatggttgtggccacagaggctgtggagatggctgctgctgcccatcatgctacagaagatatagattcactggcttctactaagctgctgctctagtgatgcagcatctgttattttgaagggatttaaaaacaagttacttacttctaagatacaatgggggtaaaggtgtaaatgtgtaaatgctcccattccaaagggagaaattgaccaaaacaaaggggctataa

SEQ ID NO: 1074 - DNA, 310 bp, Homo sapiens
  source 1..310: mol_type = genomic DNA
aacaactcaccactcctgacgccatgagctactatggcagctattacagaggcctgggctatggctgtggaggctttggtggcctaggctatggctatggctgtggatgtggcagcttccgcagactgggttatggctgtggctttggaggcaacggatatggctactgccgcccatcatgctatggaggatatggattctcaattctactgaaatcctaccctgaggacacgatatcagaggtcataagaagatcattcaatttaaccaaatattgagtcaaacaagggcacactagatcaatccaaga

SEQ ID NO: 1075 - DNA, 494 bp, Homo sapiens
  source 1..494: mol_type = genomic DNA
atgagctactacggcagctactatggaggcctgggctatggctgtggaggctttggtggcctgggctatggctatggctgtggatgtggcagcttccgcagactgggttctggctgtggctatggaggctacggatatggctctggctttggaggctatggatatggctctggcttcggaggctacggatatggctgctaccgcccatcatactatggaggatatggattctctggattctattaaactactgccccagcaacacaatgtgtgaaattataagaggactttcccagagctgacttcaatcattggacaacaaagatcatgctggagctatttgcacaaaagaatttaacatctcagaatttcaggcaattttttttctctgtatacccacatctctataataatcctagtattctctacttttgcttttaaagctgattgaattatctgtttatcttccaataaaacattctattttcaaacac

SEQ ID NO: 1076 - DNA, 474 bp, Homo sapiens
  source 1..474: mol_type = genomic DNA
cacacacgctcctcactgcaaatcacctgagctcagaactcctgttaacatgtcttacaactgcagctctggaaacttctcctcctgctgttttggaagttacctgaggtatccagtttccacttataatttgttctaccccagcaatgccatctattctccaaatacctgccaactgggctcctctctctacaatggctgtcaggagacctactgtgagcccaccagctgccagacatcctgcactttggccagatcctatcagacatcctgttactgcccaaagaattccatcttctgcagtccccgccagactaactacataagatcccttggatgtggaaacactggccttggatctcttggttgtggaagcactggcttccaatctctggactgtgggtccagcttctaccacccaactaccttttcatccaggaatttccaggcaacttgttactaaccagcctttgg

SEQ ID NO: 1077 - DNA, 645 bp, Homo sapiens
  source 1..645: mol_type = genomic DNA
tgaactcccatctctcatcagcatgtcctacaactgctgctctagaaacttctcctcccgctcctttgggggctacctgtactacccaggctcctaccccagcagcctggtctacagcactgccctctgctctcccagcacctgccagctgcgttcctctctctacagggactgtcagaagacctgctgggagcccgccagctgccagaaatcctgctaccgccccaggacctccatcctctgctgtccctgtcagacgacttgctctggatctctaggctttcggtccagcagctgtcgctcccagggctatggatctaggtgctgctactcgctgggaaatggatccagtggcttcagattcctgaaatatggaggctgtggttttccttccctgagttacggatccagattctgctacccaaactacttggcttctggagcctggcagtcttcttgttacagaccaatctgtggatctcgcttctatcaattcacctgctaaatttctagatccttttgagtattgggatcaaagtctctactgaatgcagccattattttcattcttgccagatcccaatatctttttattcttccaccaccagcttcttgcatgaccaacttctggcagactgcgaaatt

SEQ ID NO: 1078 - DNA, 932 bp, Homo sapiens
  source 1..932: mol_type = genomic DNA
ctctattacctgcaagcaggagcagtggccaactcctggaaacagctctgccccaggttgcactctcgccctttgttcaagacaatctccgggaaggggcagagcagaaggtggtattcatcacaggacgagtccacccaggggaaacaccctcatcatttgtgtgccaagggatcattgacttccttgtaagccagcaccctattgcctgtgtcctccgggaatacctggtcttcaagatcgcaccaatgctcaatcctgatggagtctacctgggcaattacaggtgttctctgatgggatttgatctgaatcgtcactggctggatccctctccatgggtccatcctaccctgcatggagtgaaacaactcatcgtccagatgtacaacgacccaaaaacaagcctggagttttatattgacatccatgcccactccaccatgatgaatggcttcatgtatggcaacatctttgaggatgaggaacggttccagaggcaggccatttttcccaagctcctctgccagaatgctgaggacttctcctattccagcacatcctttaaccgggacgctgtgaaagcaggaactggccgtcgcttcctcggtggactcctggaccacacttcctattgctacaccctagaggtctccttctacagctacatcatcagtggcaccacggctgctgtgccctacactgaagaagcctatatgaagctggggcggaatgtggcaagaacctttttggactattatcggctgaaccccgtggttgaaaaggtggcaattcccatgccgagactgcggaaagaaaaatcccctccttacaagcacccactcctgcggggcccagccagcaactaccccaacagcaaaggggacaagaagagctcagtgaaccacaaagacccttcaacccctttttaa

SEQ ID NO: 1079 - DNA, 966 bp, Homo sapiens
  source 1..966: mol_type = genomic DNA
tctgaacagaagcccaccctctacccctgacaccatgacccactgttgctccccttgctgtcagcctacatgctgcaggaccacctgctgcaggaccacctgctggaagcccaccactgtgaccacctgcagcagcacaccctgctgccagccctcctgctgtgtttccagctgctgccagccttgctgccgcccaacttgctgtcaaaacacctgctgccagcccacctgtgtgaccagctgctgccagccttcctgctgcagcacaccctgctgccagcccacctgctgtgggtccagctgtgaccagagcagctcctgtgcacctgtgtactgcagaagaacctgctactaccccacaactgtctgcctgcctggttgcctaaaccagagctgtggctccaactgctgccagccctgctgccgcccagcctgctgtgagaccacttgcttccagcccacctgtgtgtccagctgctgtcagcctttttgctgctgatcaagtcccaagagaaccaccatcctcacacaacaactttctgctcaactgacttatcttttgggggactaatttaatttgctgctgacagccaccatgctctcacccaaatttttatgaattctctacctgtttaaaatcttgggaatctacttgagggagggcagaatacttcatcctgattctctttttccttacactttgtggatcatgtgccagcttcgtgtgttctcaattttgagtcatggtctcagctttgactcaaaagtcaagagcttcattctctgcttctaaggaatttaggtttctgcaactgatcaataatctttgcaatcatatttttgttttcaatatcctcctcatggttcttgtatccttctttcttcttttcataactttgggttatgtttctgctaccagcagagattcttagctatatgtttctgaataaactctgaaccatcctc

SEQ ID NO: 1080 - DNA, 7289 bp, Homo sapiens
  source 1..7289: mol_type = genomic DNA
aaagcgtcctgggtattgtagtgtattggagggaaggcgtcttggcgccttctcttcgcaccgttttccggagactgttagaggaagagtcgctttttcctgcctcccaggctgcccagcggcgccggttgccggggaacgcaggcgccgtggggagggatggcgggaggatactgcttaggtgctggagacggagttgagctggtgaagaagagctcgggctcatcatgaaacaacgaaaaggccaagggtctgggggcagccgtgggcgcaaaaaaagaggtttaagtgacatttctccatctacaagcctgccacctctggttgaaggccagctacgctgttttctaaaacttactgttaatagagtcatatggaagattgcaaagcctcccacttgtgtacttgtccgagtgagatggtggggagaaacatcagatggaaccctcttttgtcccagggatgcattgcagactgaaccaaaagctgtgagaacaactacacgttacgctattcgttgtggtccaaaacagtttacctcttatctaacagatatggctgtgctggtgctggaagtaatcaccaaacttgatggtcttccaattggtagagttcagatcaatggactagctcaactttctccaacccatcaaatcaatggattttttaccattgtttcatcaacgtctaagaaacttggagaactccaggtctcacttgccctggaacctctgtcagaaacttacgacagctaccatccacttcctaccactgacatgacagaaaatgtgcttttatctaagcagggattcagagagaatactgaacccagcagtacccagtttcaggttccatcaaggcctcgcgacatacataccatcaaaattgatggaaaagagttagcagccaacagcagtagatcaaccactccgaggggaaaagaccatgtatgctttgcagagaaccctgatacaataaaggattcttcctttggactacagcacagtcttaattcaggacagagtttagagtctgtaactctgaaaggcagagctccacggaagcagatgtcccttctgaacagttctgaattccagcctcaaattagaacagttgccaagagtcacagtgactcatgcattctttcttcaaacaacctccctaccaaggatcttctttcagctctgttagaacaaggcaataaactgcgtaatgccatggtgatttctgcaatgaaatcaagcccagagaccagcatgttgttggaccaagttcatcctcctattaatgaagattctcttagagcatcaacacagatcagagccttttctaggaatcggtttaaagaccacattgaagatcacctcctcccttcaactgagaatacattttggagacatgacacaaaagctgataccagagctatacagctgctattaggcagtgctgaattatcccaaggcaatttctgggatgggctaggctctcctccagattccccatctcctgggagtgatgtgtattgcatcagtgagctgaatgaccctcagtatgaccagagtcttctggagaatttattttatacagcacctaaatctgataccagcatcagtgatttcctcagtgaagaggatgatatcgtcccttctaaaaaaataagccagtcaacagctcttgccagatcatctaaggttctggagtcaagtgatcataagctgaagaagaggtcagcaggcaagagaaatagaaatttggttgaacaacagatgctctcagaaactccagaagatgcccaaacgatgacactaagtgtggatagactggcccttttgggtagaacacattcagtcagaatcatcatcgaaaccatgggagttcctccagatagtcctcagatgacccctggcaaaaaaagctatgctggtccaccacctaaggtgactacagcaaaaaagcgcactttctttgtagaatatcactttcctgtgggcttttcggaaagcggattgggaaagacagctttgatcactgaggttgttcgactcgcctccagtaaaattacagatggaaaggtgaagttccagcagcgatttgtgtttccagtacagtttggtggcccaatgatagagcactggtggaattccaacctcactttccaaatttatgtaaagaaaactccacagaaaaagccagaagtcattggatctgtgtcactttctttgcgagctgtcattcaatcagagctgctttctttcagtgatcagcttccagtgcaacaagaaaatggtcagtctccatttggccccctcaaggtaaccatggagcttattacagataacaaagatttcactggtatcaatactaagttaagtggcaacacccattataccccactttgtgctcctacaagtccaaataaggcactaccagaacttaaccaagatatgacctgtaccaaaaatccacaaaacttaaaccaaattcatgaggaaactgcaaagaaagcacagaacttggtgctccccaaccgaaagtcaccaagccctgtagcaccacatccttcaaccttcgtagctacgccagcctcccataatttagtcaatcagacaaatgggacaacaaaagagagtgctttgctgttgcatgtgctgttgatggtgccagatgggaaagattttattagtggagaatctgagaaacaatcaccatgcaatgtttatttaaattgtaaactcttcagcacagaggaagtcaccagatctgtcatcgcatggggcacaacacaaccggtctttaacttttctcaggtgattcctgtctctctgtcttccaaatacctggaaaggcttaagaacaatgtgatggtaattgaaacttggaataaggtgcggagcccaggacaggacaagctgctcgggctggtgaaacttcccctccaccagttttacatgtcattcaaagatgctaagatttctcgcctgctgctggatgcccagtacccagttgttgctgtcgacagctacatgcctgtgattgatgtgttttcaggccaccaaaatgggagtcttcgagtctttttagctatgggttcttcaaatcaaataatggcactacaaagattaaagaatgaagaaggaacactccctcccttcagccctaggccagcccatttcctggaccagccaactgcagcatctgttgctatggcagaggaccgaggaaatggactgatggagcactgctttgagatccatatagagatggttaaagggctagcccctcttcaggcaacagtctggggagaagcagattgttatgtccagtactactttccagttcaacactctcaatccagtgtgctgaaaggacctgagttccttgaaaatggaattactctgaagcccttcagaactgcaaccacactctgtgttccagatcccatctttaatagtgaacaccatcactctctcctgttgccagctgaggttccagtgcaaaggctcctactaagtgctttctctgcacagggcctcgtgcctggaggtggagtccagtttgaaatctggtgcagatactattatcctaatgtgagagaccagaaggtcgccaaaggaaccttgccattatcaaggatctgtgctatggtaaccacccagcatcgtgaggatgtgggaatacagacctttaatctccctttaacccccaggattgagaacaggaaagaattgaggaaccagtcatcaggtttactggatgtgggcctaaggtacaggcgtagtccaagaacagcagagggagttcttgctgcccgaactgtttccatctcagtccagattatcagagcctgtggtctgcaagcagcagccaaggctttggctgaacgggaacccgctctacagtttagtgccacagtcggggtcaatgcctctgtcaccactcatctctccttcctgccccagggagaacagcgccgaacccaccctgtggcctgttctttctgccctgagttctcccatcacgttgagttcacatgtaacttggtgactcagcactgtagtggagaggcctgtttcctagcagagttgttggagtttgcagaagttatttttgctgtctatcatgaaaataccaagtcagcaagtgatataatcagtattgagtcatgcaaagagtatctgcttggagtagtaaaagttccaacaaaagagctgctgatcaagagatctgggatcacaggatggtatcctatcattttaccagaagacgggggcctacctcatggcctggagctcatgcagaagatcgtgggtggtctggagctttcgatttccttcacgcatcgtggagatagagaacgggtgttggaagctgctgagcatttgggctggagctttgagaacagcctgaaagattttgtcagaatggatgaaggggagccagccactgtcaccatctccaccccaaggctgtggctgcccatccattgtgtgctgcttgctggccacaaccacattcataagaatacatattgctaccttcgctacaagttctatgatcatgaagccttttggacccctctcaagaagcctaaggaatctgtaaacaaaaagcagattatggtcactttcaaggcatccaaaagagcagaagtcaccaggggcccatcactgctttggtacttcagggaggagaggctagagatccaagtgtggcgagcttatggcaatgacagtgtggagagaccccatcagacagacagctggattggctcagcctatgtggacctggccagacttggggagaggtcagcgaggacgctaactgtcagtggtgtgtatcctctgtttggacgaaatgcttccaacctctcaggagctgccttgcgagttcatgtggttctttcctctctttcctcacaccttgagcccactcatgagctggactccatggactgcagcagccacagtgagtctgagcagctccccagaaggaatgatgaggtccagctctctccaccagaagtcatctcctgccaccagaagtctcctgcctccacccaggtcccctgcagcagcaccacagctgaagtccgcctgacgcaggagggccctgctgatttggatggaacgtttgcagtcagcatcctagtagaaagagcaatgcacttgagcttgaaagggagccccttgacagagcggaaagtatcgatacccagttgttgtgtatcctttgcaacagccgatgagtcatctcctgtatacacccaagtggttgaaaacacagattcccccatctggaattttcaacagcagtcaaggctatcaaaagagctgcttctggacccacaacaaaccctggtcttcaaagtttggcataaaggagatgaggagagggtgattggctttgcctcggtggacctctccccacttctctctggcttccagtttgtctgtggctggtacaacatcacagacttcagtggagagtgccaggggcagataaaagttgctgtctcccctttggagagtttgatacacttcaaagaagaaaggcaagcaaggcgtggagtggagacctcaaaatcactgatcccaatatacagtcccttttccttccctgcctctgatacgtatgctgcattctccagccacatggcaaggcagaccctagaccaacttgctcatgcctcctcaaaggagcttgatttctcctctcctgggagaagtgataccacaagaagccaagcatcacgccatgaagagcatgtgcagaacattcgccggtttcatgaatccctgcatcttcagggagaggcacccttgccatgtgatgacaaactgaccacatcacctttgtcctcccaaacctccattctgacttctctcaggaagaatctgagtgagcttgatcagattcagaggtacttccgccagaagctcaccaagcctttcctacccctcagccctcagactcaaacggccatctcacagcaccaggagagctgtagggaccatcttgggccaggtgccagcagcctagaccctgggagccagtgtatcctggagaaatccagtaacctggtgttgcaagtcagctccttaatcacagatctgcagactatcaccagggattcgcaagcagctttgagttctcaccgagccaggagtagaagcaacaaggccaccaccctcccagatgctcaggacacagaagcactgcaagaacgatgcacaatgccagatgagccattggtaagagctccagataaaggcacagattccccatcaccccctcctctcgaagagacttcaaatggaggaagaatgctccatgagtccctgaggcatgcagtacccattacaaggatgcagagcagtgaagacactgaggcaggcccagcctacagtgatgaggactatgaagaagacatcattgagcccaggaccttaaatgagatcaccacggtgacagacaaaactagcccttggtctagtgtcatatcagacacaagtgaggtcatcagccctcagcctgacgaggtgcagagggaaggcccctcttgtccttctccagggcctttctgcagagaggagcttatggtcaaaagtagctttctctccagcccagaaagggctgtcaacccccacctgcctaggcagggttctcctagccaaagtcttgttgcttgtgagtgtgaggcctctaaggccagggttggtggcgagtctgcctcagccaaccctcagcccatcccatgcccaacactctcaggagctcaacagagcagcacgtttgttggatggagctcaccacagacagatcagaacaaggagcccaagtcagaggccccagctgagaatgaagctgccaccagtgagctcggtgactctgctgatagcttcaagaagttgccgctaaatctagcctcccagagcagaagggaaaaccataagggaccacccatcgactcctctgacatcaggcagaggcaggtgacaactggatcagagacgtccacaaagcagagcctcctgctcccagggcccattgtggtgcccaacttctttttgcctccccagcagttggaggcttccctgcggatgctttcactctcagcaactttgccaccagcagccacaacagatcaggacaagagcgaagccaccaggggagctctctcccaaaggccttgtcgccccagacctaactcgctccccctcaacctgcctgaggaagaaactctcaggattgcacggatattttcttctcagtactcccagaaagactga

SEQ ID NO: 1081 - DNA, 461 bp, Homo sapiens
  source 1..461: mol_type = genomic DNA
gcataccaactcaccactcctgacaccatgaactactacggcaactactatggaggcctgggctacggctacggaggcttcgatgacctgggctatggctatggctgtggatgtggcagcttccgcagactgggctatggcggtggctacggaggctacggatacggctctggcttcggaggctatggataccgcagctgccgtccatcatgctatggaggatatggattctctggattttattgaaatccttccctgacaacctaacatgaggggacataagaagatcacccaaacctgactgcaataacaaacaaacgaggtcaccctggatcaagccaagatcaagagcagttagcatctaagaggtttaagaatacctatcattccataattctttgctttatgtctctggatgtgtcttacttgtacctttataactgtggggtttctctgttcct

SEQ ID NO: 1082 - DNA, 208 bp, Homo sapiens
  source 1..208: mol_type = genomic DNA
atgtcctacaactgctgctgtggaaacttctcctcccattcctgtgagggctacctgtgctactcaggctactcccgtggtggctcctcgtaccccagcaacctggtctacagcactgaacctttgatctcccagcacctgccagctgggttcctctctctgcaagggctttcaggagacttgctgggaaacccctagctgccagatg

SEQ ID NO: 1083 - DNA, 737 bp, Homo sapiens
  source 1..737: mol_type = genomic DNA
ctgtcttggaaacctacctagaacctccaccctctgacaccatggttaactcttgttgtggctctgtctgctctgaccagggctgtgatcaaggcctctgccaagagacctgctgccgccccagctgctgccagaccacctgttgctgccccagctgtgttgtatccagctgctgccgcccatcctgctctcagactacctgctgccagaccacttgctgtcgccccagctgctgccacccagtctgttgtcagaccacctgccgccccagctgtggtgtgtccagctgctgccgtccactctgttgtcagaccacctgccgccccagctgtggtgtgtccagctgctgccgtccactctgctgtcagaccacctgctgccgtgcaacttgctgccgccccagctgctgtggatcctcttgttgaacctcatattggactatcaaccatgagccagtcaccatcccatgatatgaaagtgtcatttatatcaacttgtccatgtgttaaatggccatcagctttattatcctgttattccactaagtaactggtgaaagggcatccatctacatttaataccactcatttttcccatggatctcttcccagcagcattcagacctcagatgcatgatgcagttagactaagcctctaagtttctgactgttatgcttgatttgaccttcaaaattacatattaactgttcttcaataaatattatcttaatatcagt

SEQ ID NO: 1084 - DNA, 775 bp, Homo sapiens
  source 1..775: mol_type = genomic DNA
gaactccggctgcgttaccgacctgcgagctgacgggcccggaccatggggtgctgcccgggggactgcttcacctgctgcacccaggagcaaaactgctgtgaagagtgctgctgtcagccgggctgctgtggctgctgcggctcctgctgtggctgtgggggctctggctgcgggggctctggctgcgggggcagctgctgcggatcgtcttgctgtggatctggctgcggaggctgtggaggctgcggaggctgcgggggtggctgctgtggatccagttgctgtgggtccagttgctgcggctccgggtgctgtgggcctgtgtgctgccagcccacacctatatgcgacacaaaatgaagacctttccctccaccactgatgcagtcccaccgaaagcctccatctgctccagggggacagcccctcgtgtccagaaccttccatacccccaagacagtgtcttgtctttctgtgatttgtagaggagggcttgttctccaacaccttctctggtatttcaaggcaccgagaacaagagccatactctgatgaaacattaaaactcggtcacaactaagtgatcccaagctcaagggtgaatccccaatactttacttattcacatgaagttcaatgtcttgtactataagacatcctcttcttcaaggtgtctttgggactgatcctccgccctggctttctgcagctttgagatgcaaaaaaggtccatcttctttgtgagcctcttaataaatttgagcatgctggc

SEQ ID NO: 1085 - DNA, 4362 bp, Homo sapiens
  source 1..4362: mol_type = genomic DNA
agagcgaagctgaggagtccagcgctcgccgacaggggcctgggctgtcccgagccggaatccagatcttacataagatggaagtctctcacactagatactgaacattaaatagaaaatctatttagtaaaatctaagttgccatggaagaaataccagtaaaagttgctgtaagaattagacctctgctttgcaaagaagctcttcataatcatcaagtttgtgtgagagttattccaaacagccagcaagttatcattgggagagatagagtcttcacttttgattttgtttttggcaaaaattccactcaagatgaagtttataacacatgtataaagcccctagtgttgtcactcattgagggctataatgcaactgtttttgcctatggacaaactggatctgggaagacatacaccattggagggggccatattgcttcagttgtggagggccaaaagggtatcattcctcgagctattcaagaaatatttcaaagcatctctgaacatcctagcattgactttaatgtaaaagtatcttatatagaagtgtacaaggaagacctaagagatcttctagaattggagacatccatgaaggatcttcacatccgagaagatgaaaaaggaaacacagtgattgttggggccaaggaatgccatgtggagagtgcaggtgaagtgatgagtcttttggagatggggaatgcagccagacatacaggtaccactcaaatgaatgagcactccagcagatcacatgcaatttttacaatcagcatttgtcaagttcataaaaatatggaggcagctgaagatggatcatggtattcccctcggcatattgtctcaaagttccactttgtggatttggcaggatcagaaagagtaaccaaaacggggaatactggtgaacggttcaaagaatccattcaaatcaatagtggattgctggctttaggaaatgtaataagcgctcttggggacccacgcaggaagagttcacatattccatatagggatgctaaaattacccggcttctgaaagattctctgggaggcagtgctaagactgtcatgatcacatgtgtcagcccctcctcctcgaattttgatgagtccttaaattctctcaaatatgccaacagagcacggaacattagaaacaaacccactgtaaacttcagccccgagtcagaccgtatagatgaaatggaatttgagattaaattgcttcgagaagctttgcaaagccagcaggctggtgtcagccaaactacccagatcaatcgagaagggagtcctgatacaaataggattcattctcttgaggagcaagtagctcagcttcaaggagaatgtctgggttaccagtgttgtgtagaagaagcctttaccttcctggttgacctaaaagatactgtcagactaaacgaaaagcagcaacacaaactgcaggagtggtttaacatgatccaagaggtcaggaaggctgtcctcacctcatttcgaggaatcggaggcactgcaagtctggaagaaggaccacagcatgttacagttctccagctgaagagagagcttaagaaatgccagtgtgtgcttgctgctgatgaagtagtatttaatcagaaggaactggaggtgaaggaactgaagaatcaagtgcagatgatggtacaggaaaacaaagggcatgctgtatctttgaaagaagcgcaaaaagtgaatagactgcagaatgaaaaaataatagaacaacaacttcttgtggatcaactgagtgaagaactaacaaaacttaacctgtcagtgacttcttcagctaaagaaaattgtggagatgggccagatgccaggatccctgaaaggagaccatatactgtaccatttgatactcatttggggcattatatttatatcccatcaagacaagattccaggaaggtccacacaagtccgcctatgtactctctggatcgaatatttgctggatttcgaacacgaagtcagatgctgttgggtcacatagaagaacaagataaggtcctccactgccaattttctgataacagtgatgatgaagaatcagaaggccaagagaaatctggaactagatgtagaagtcgttcatggattcagaagccagactctgtttgttcccttgttgaattgagtgatactcaggatgaaacacaaaagtcagatttggagaatgaagatttaaagattgattgtctccaggagagtcaagaattgaatttgcaaaaattaaagaattcagaacgcatacttactgaagctaaacaaaaaatgagagaacttacaattaacatcaagatgaaggaagatctgattaaagaattaataaaaacaggtaatgatgccaagtctgtaagcaagcagtattctttgaaagtaacaaagctagagcatgatgcagaacaggcaaaagtcgaactgattgaaacacaaaagcagctacaggagctggaaaacaaagatctttctgatgttgcaatgaaggtaaaattacagaaagagtttcgtaaaaagatggatgctgcaaagctgagagttcaggtcttgcagaagaagcaacaagatagtaagaaactggcatcactgtcaatccaaaatgagaaacgtgctaatgagctagagcagagtgtagatcacatgaaatatcaaaagatacagctacaaagaaaactacgagaagaaaatgaaaaaaggaagcaactggatgcagtaattaagcgggaccagcaaaaaatcaaagccttaaacacagatagtttgaaaatatcaactcgcctgaacttactggaacaagagttgtctgaaaagaatgtgcagctccagaccagtacagctgaggagaaaacaaagatttcagaacaagttgaagtcctccagaaagaaaaggatcagctccagaaacgcagacacaatgtggatgaaaaacttaaaaatggtagagtgttatcacctgaagaagaacatgttcttttccaacttgaagaagggattgaagctttggaagctgcaattgaatacaggaatgaaagtatccagaatcgccagaagtcacttagagcatcattccataacctctctcgtggtgaagcaaatgtcttggaaaagctagcttgcctgagtcctgttgagattagaactattcttttcagatatttcaataaggtggtgaatttgcgagaagctgaacggaaacaacagttatataatgaagaaatgaaaatgaaagttctggaacgggataatatggttcgtgaattagaatctgcactggaccatctaaaattgcagtgtgaccggagactgaccctccagcaaaaggaacacgaacaaaagatgcagttgctattacatcatttcaaagaacaagatggagaaggcattatggaaactttcaaaacatatgaagataaaatccagcagttggaaaaagatctttatttctataagaaaaccagccgggatcataagaagaaacttaaggaactggtaggggaagcaattcggcggcaactagcaccatcagagtatcaagaggctggagatggagtcctgaagccagaaggaggaggcatgctttcagaagaattaaaatgggcatccagacctgaaagtatgaaattaagtggaagagaaagagaaatggacagttcagcaagcagcttaagaacacagccaaatcctcaaaagctctgggaagatatcccagaattacctccaattcatagttctttagcaccccccagtgggcatatgttaggtaatgagaataaaacagaaacagatgataatcagtttacaaaatctcacagtcgactgtcatcccaaattcaggttgtgggaaatgtgggacgacttcatggtgtcacacctgtaaaactgtgtcgaaaagaattacgtcaaatttccgccttggaactatcattgcgacgttccagtcttggagttggcattggatcaatggctgctgattccatcgaagtatctaggaaaccaagggacttaaaaacttagacattgaataatagaacttttagtagatatgtaaaaagattcctttttctaacctgttaaaaactaaagctcaagttcactacctctttcctcagaataaaggaagaaggggaggaaggaatccctaattcttttatatgctatagatgtgtacatcttctatatatatttggggagttttagtttatattcccatagtaatcaaacatgttttccaatacttgataacatttaaatatttataaatacgcttaaatgtttttccaggcatatttgaagattaaaactagtaatagactaaaa

SEQ ID NO: 1086 - DNA, 2064 bp, Homo sapiens
  source 1..2064: mol_type = genomic DNA
gtcccggctccagaacgccgcggcactggggcgggaggggcccgccacgtccgccatcttgaaacaaccgccactcggggcgtcgcgcctgggccgccacgcctcggcctgcaggctcggtccccattggccgcaccacgcagaggcccgcccccgcctgcgcggccggcccctgcggggcgagagggtgggggcgaaggggaagctacgtcccggaggtgcggtgtggggcaccgggcggggccgcgggaaccggcgccccacggagctgctgctgtcagaccaaccccgggcccccatcatcactgcgccgcgctttcaggcgccgagaactaccgttcccggcatgccatgaaattggcctcggcgctgaggcggggtccggccctccacccgctcccgccgcgcgcgaatcgcggtcgcgagccatggaggaggaggcatcgtccccggggctgggctgcagcaagccgcacctggagaagctgaccctgggcatcacgcgcatcctagaatcttccccaggtgtgactgaggtgaccatcatagaaaagcctcctgctgaacgtcatatgatttcttcctgggaacaaaagaataactgtgtgatgcctgaagatgtgaagaacttttacctgatgaccaatggcttccacatgacatggagtgtgaagctggatgagcacatcattccactgggaagcatggcaattaacagcatctcaaaactgactcagctcacccagtcttccatgtattcacttcctaatgcacccactctggcagacctggaggacgatacacatgaagccagtgatgatcagccagagaagcctcactttgactctcgcagtgtgatatttgagctggattcatgcaatggcagtgggaaagtttgccttgtctacaaaagtgggaaaccagcattagcagaagacactgagatctggttcctggacagagcgttatactggcattttctcacagacacctttactgcctattaccgcctgctcatcacccacctgggcctgccccagtggcaatatgccttcaccagctatggcattagcccacaggccaagcaatggttcagcatgtataaacctatcacctacaacacaaacctgctcacagaagagaccgactcctttgtgaataagctagatcccagcaaagtgtttaagagcaagaacaagatcgtaatcccaaaaaagaaagggcctgtgcagcctgcaggtggccagaaagggccctcaggaccctccggtccctccacttcctccacttctaaatcctcctctggctctggaaaccccacccggaagtgagcacccctccctccaactccctaccagctccagagtggtggtttccatgcacagatggccctaggggtgacctccagttttgcgtgtggaccgtaggcctctttctagttgaatgaccaaaattgtaaggcttttagtcccaccgacattagccaggctcgtagtgaggcctccagagcaggttgtgctgtcccctgcctctggaagcaatggggaatttggaatcttgtgtaagtgcccaaataagtctgagtgctttcctcttcttcaacactcaaccctcaatcccttagcactgattgattagagaggtcccccaaagaaaccactggttttgacccatgaagcattagaactgcattgttcattcaggagccactagtcacatatgactatttaaatttaaagtaaattgtatgaaaaattcatttcttcaattgcattagccacattttgagtattcatgtggctggtagattctgtattagcacaaagatatggaacatttccatcaccacagaaagttctgttggacagcactgcattagaatattttcatactgctcttcctcaattaatttttgttgttaatgttgatgtcttcattggatgggtcataatgttccatgaaacctctcaagtacacaattgtatgttctttgtatcccttaccacaaatatctcgctctgctcatttcttttgcagcttcctataaagtttgtcttcctcatc

SEQ ID NO: 1087 - DNA, 492 bp, Homo sapiens
  source 1..492: mol_type = genomic DNA
gcaaataaagaacgcaggagccttgtctcctactgggctgtcagtgaggaaaaggaggaaagacaggttagctggggatgatgacggatctgaagcaaagccattcagtgaggctgaatgatggacccttcatgccagtgctgggatttggcacttatgctcctgatcatactcccaaaagccaggctgccgaggccaccaaagtggctattgacgtaggcttccgccatattgattcagcatacttataccaaaatgaggaggaggttggacaggccatttgggagaagatcgctgatggtaccgtcaagagagaggaaatattctacaccatcaagctttgggctactttctttcgggcagaattggttcacccggccctagaaaggtcactgaagaaacttggaccggactatgtagatctcttcattattcatgtaccatttgctatgaagggttcttcctgagagaggcagatttgagtgaggtgca

SEQ ID NO: 1088 - DNA, 1438 bp, Homo sapiens
  source 1..1438: mol_type = genomic DNA
agtgcgcgtgcgcagcggttgcctgggcgaccggggaagcgttgggctgtaaagactagggcgccagcggctggcgaagaaggaaagagggtactctctggctgggctggggccgtagcgacgtccgccgcgaacctgggccccccaaagctgcggggcgttcggtgtcgccgaagtaaacatgcaccctgagccctcggagcctgcgacaggtggtgcagcagagctggattgcgcgcaggagcccggcgtggaggagtctgcgggtgaccacgggagcgcaggccgagggggctgcaaggaagaaattaatgatcctaaggaaatatgtgtgggttcttctgacacatcctaccacagccagcagaaacagagtggtgataatgggtcaggtggtcacttcgcacacccaagagaagacagggaagatcggggccccagaatgactaaaagttccctgcaaaaactctgcaagcagcacaagctttatattaccccagcattgaatgatacgctgtatttacactttaaaggttttgatcgcattgagaacctggaagagtacacagggctgcgctgtctctggctgcagagcaatggaatacagaaaatcgaaaacctggaggcccaaactgagttgcgttgcctcttcttgcaaatgaacttgctccgtaaaattgagaacctggaacctctgcagaaactggatgctcttaacctcagcaacaattacatcaagaccattgaaaacctctcctgcctcccagtcctgaacacattgcagatggcccacaatcacctggagaccgtggaggacattcagcatctacaagagtgtttgaggctttgtgtccttgacctttcgcacaacaagctgagtgacccggagatcctgagcattctggaaagcatgcccgatttgcgtgtactgaatttgatgggaaacccggttatcagacagattcctaattacagaaggacagtcactgtacgactaaagcacttaacatacctggatgatagaccagtgtttccaaaggacagagcttgtgcggaggcctgggctaggggagggtacgcagctgaaaaggaggagagacagcagtgggagagcagggagcggaagaagatcacagacagcattgaagccttggccatgatcaagcagcgggcagaggagaggaaaagacagagagagagtcaagagagaggggagatgacatcttcagatgatggtgagaatgtgcccgccagtgcggaaggcaaggaggagcctcccggggacagagaaacaaggcagaagatggagctatttgttaaggaaagctttgaggccaaggacgagctctgcccggaaaagccaagtggagaggagccgcctgtggaggctaaaagagaggatggagaccctgctactgtcaccgcctgtgaaggttaa

SEQ ID NO: 1089 - DNA, 3004 bp, Homo sapiens
  source 1..3004: mol_type = genomic DNA
attgctttccaggggtcactctggcttcgactccgtcgctctcaattcgtcaccaggaggaagacggagctggctgcccagcccaaaggcccatgaggggatgcagttatgggctctgtcgccgtggaacttgtttgcttcattcttatgtacctacctttgcaccttgtaatcatcctttatgcctcagattgttattttgtgtcagtaagtaatccataaagtgccaacatgggaaagaaacggacaaagggaaaaactgttccaatcgatgattcctctgaaactttagaacctgtgtgcagacacattagaaaaggattggaacaaggtaatttgaaaaaggctttagtgaatgtggaatggaatatctgccaagactgtaagactgacaataaagtgaaagataaagctgaagaagaaacagaagaaaagccttcagtttggctgtgtcttaaatgtggccatcagggctgtggcagaaattctcaggagcagcatgccttgaagcactatctgacgccaagatctgaacctcactgtctggttcttagtttggacaactggagtgtatggtgttacgtatgtgataatgaggtccagtattgtagttcaaaccagttgggtcaagtggttgattatgtcagaaaacaagccagcattacaactccaaagccagcagagaaagataatggaaatattgaacttgaaaataaaaaattagaaaaagagagtaagaatgaacaagagagagaaaagaaggaaaacatggctaaagagaatcctcccatgaattctccttgccaaataaccgtgaaaggactcagtaatttgggaaacacatgtttcttcaatgcagttatgcagaacttgtcacaaacaccagtgcttagagaactactaaaagaagtgaaaatgtctggaacaattgtaaaaattgaaccacctgatttggcattaacagaaccattagaaataaaccttgagcctccaggccctcttactttagccatgagccagtttcttaatgagatgcaagagaccaaaaagggggttgtgacaccgaaagaactcttttctcaggtctgtaaaaaagcagtgcggtttaaaggctatcagcagcaagacagccaggagctgcttcgctacttattggatgggatgagagcagaagaacaccaaagagtgagtaaaggaatacttaaagcatttggtaattctactgaaaagttggatgaagaactaaaaaataaagttaaagattatgagaagaaaaaatcaatgccaagttttgttgaccgcatctttggtggtgaactaactagtatgatcatgtgtgatcaatgcagaactgtctccttggttcatgaatctttccttgatttgtccctcccagttttagatgatcagagtggtaagaaaagtgtaaatgataaaaatctgaaaaagacagtggaggatgaagatcaagatagtgaggaagaaaaagataacgacagttacataaaagagagaagtgatattccttctggaacaagtaagcacttacagaaaaaagcaaagaaacaagccaaaaagcaagccaagaaccaacgaagacaacaaaaaattcaaggaaaagttcttcatttaaatgatatttgtactattgaccatcctgaagacagtgaatatgaagctgaaatgtcacttcaaggagaagtaaatattaaatccaaccatatttcacaagagggtgttatgcataaagaatattgtgtcaaccagaaagatttgaatggccaagcaaaaatgatcgaaagtgtaactgacaatcaaaaatccacagaggaagtagatatgaaaaatatcaacatggataatgatctggaggttttaacatcttctcccactaggaatttaaatggtgcctacctaacggaagggagcaatggagaagtggacatttccaatggtttcaaaaacctaaatttgaatgctgctcttcatcctgatgaaataaatatagagattctgaatgatagtcatactcctggaacaaaggtgtatgaggttgtaaatgaagatccagaaactgctttctgtactcttgcaaacagggaagttttcaatactgatgagtgttcaatccaacattgtttatatcagttcacccgtaatgagaaacttcgagatgcgaataaactgctttgtgaagtatgcacacggagacagtgtaatggaccaaaggcaaatataaaaggtgaaaggaagcatgtttacaccaatgccaaaaagcagatgctaatttctcttgctcctcctgttcttactcttcatttaaagagatttcagcaggctggttttaacctacgcaaagttaacaaacacataaagtttccggaaatcttagatttggctcctttttgcacccttaaatgtaagaatgttgcagaagaaaatacaagggtactctattccttatatggagttgttgaacacagtggtactatgaggtcggggcattacactgcctatgccaaggcaagaaccgcaaatagtcatctctctaatcttgttcttcacggtgatattccacaagattttgaaatggaatcaaaagggcagtggtttcacatcagcgacacacatgtgcaagctgtgcctacaactaaagtactaaactcacaagcgtacctcctattttatgagagaatactgtaataatatcaaaagcactttttctggaaacacatttatggcttttataatggctgaaataacgataaaaaaagactaattaaaatcatgttcacttaacattaaatacatgccagaagaaatcatgtttatttaaatattgaagggaaaaatacctaaaaatgtacaaaggttttatattgtcatagtggtttttattcctgctttgtttctggaaaggaaatcctgaattacttaagtactttgtgtttaatatatctgggtgatggatcacaacacatcaataaactgacttaccctaaaa

SEQ ID NO: 1090 - DNA, 7546 bp, Homo sapiens
  source 1..7546: mol_type = genomic DNA
cgggcgccggggagagcgggcggccgggcggcaggcgggcgagcagcgatcgggcggccgagcgagcgagcaacgccggcgcagcgcggtgaccccagccccagccggcgcggagcaggagccggagccgagcggatctcggcgccctcgctgcgctcctcccggcccgagcctgccctacccggcggtggcggcggcgcgtcctccagcggcggcagcggcgctcgcagcgcccggactcacggcagctgtgttctgatttcgtactactgctggggctgccacctcctcctccagacgctctcagcagacttgagtcctggtccttctgcagaggcctgagcaggaggaagaggaggaggcccgttggcgtcggaccaatgctgcaaggggtgtgaggagaggagccgctgtttttcactgagctgccataccccgaaagcaggatggagctggagtgaggtggaggggccgcaagctgctgaccggcgtgtggaacactggtggtttgcagatcactgaggctggacaacgttcatggctctcgggtagaacctagtgaaacggccagaatgaattctatggacaggcacatccagcagaccaatgaccgactgcagtgcatcaagcagcacttacagaatcctgccaacttccacaatgccgccacggagctgctggactggtgcggagacccacgggccttccagcggcccttcgagcagagcctgatgggctgtttgacggtggtcagtcgggtggcagcccagcaaggctttgacctggacctcggctacagactgctggctgtgtgtgctgcaaaccgagacaagttcaccccgaagtctgccgccttgttgtcctcctggtgcgaagagctcggccgcctgctgctgctccgacatcagaagagccgccagagcgatccccctgggaaactccccatgcagccccctctcagctccatgagctccatgaaacccactctgtcgcacagtgatgggtcgttcccctatgactctgtcccttggcagcagaacaccaaccagcctcccggctccctttccgtggtcaccacggtttggggagtaaccaacacatcccagagccaggtccttgggaaccctatggccaatgccaacaaccccatgaatccaggcggcaaccccatggcgtcgggcatgaccaccagcaacccaggcctcaactccccacagtttgcggggcagcagcagcagttctcagccaaggctggccccgctcagccctacatccagcagagcatgtatggccggcccaactaccccggcagcgggggctttggggccagttaccctgggggtcctaacgcccccgcaggcatgggcatccctccgcacaccaggccgcctgctgacttcactcagcccgcggcagccgctgcagcagcggcagtggcagcagcagcagccacagctacagccacagccacggccactgtggcagccctgcaggagacacagaacaaggatataaaccagtatggaccgatgggtcccacccaggcgtataacagccaattcatgaaccagcccgggccgcgggggcctgcctccatggggggcagcatgaaccccgcgagcatggcggctggcatgacgccctcggggatgagcggccctcccatgggcatgaaccagccccggccgcccggcatcagcccctttggcacacacgggcagcggatgccccagcagacctacccgggcccccggccccagtcccttcctattcagaacataaagaggccataccctggagagcccaactatggaaaccagcaatatggaccaaacagccagttccccacccagccaggccagtacccagcccccaaccccccgaggccactcacctcccccaactacccaggacagaggatgcccagccagccgagctccgggcagtacccgccccccacggtcaacatggggcagtattacaagccagaacagtttaatggacaaaataacacgttctcgggaagcagctacagtaactacagccaagggaatgtcaacaggcctcccaggccggttcctgtggcaaattacccccactcacctgttccagggaaccccacaccccccatgacccctgggagcagcatccctccatacctgtcccccagccaagacgtcaaaccacccttcccgcctgacatcaagccaaatatgagcgctctgccaccacccccagccaaccacaatgacgagctgcggctcacattccctgtgcgggatggcgtggtgctggagcccttccgcctggagcacaacctggcggtcagcaaccatgtgttccacctgcggcccacggtccaccagacgctgatgtggaggtctgacctggagctgcagttcaagtgctaccaccacgaggaccggcagatgaacaccaactggcccgcctcggtgcaggtcagcgtgaacgccacgcccctcaccattgagcgcggcgacaacaagacctcccacaagcccctgcacctgaagcacgtgtgccagccgggccgcaacaccatccagatcaccgtcacggcctgctgctgctcccacctcttcgtgctgcagctggtacaccggccctccgtccgctctgtgctgcaaggactcctcaagaagcgcctcctgcccgcagagcactgtatcacgaaaatcaagcggaatttcagcagcgtggctgcctcctcgggcaacacgaccctcaacggggaggatggggtggagcagacggccatcaaggtgtctctgaagtgccccatcacattccggcgcatccagctgcctgctcgaggacacgattgcaagcatgtgcagtgctttgatctggagtcatacctgcagctgaattgcgagagagggacctggaggtgtcctgtgtgcaataaaaccgctctgctggagggcctggaggtggatcagtacatgtggggaatcctgaatgccatccaacactccgagtttgaagaggtcaccatcgatcccacgtgcagctggcggccggtgcccatcaagtcggacttacacatcaaggacgaccctgatggcatcccctccaagcggttcaagaccatgagtcccagccagatgatcatgcccaatgtcatggagatgatcgcagccctgggccccggcccgtccccctatcccctcccgcctcccccagggggcaccaactccaacgactacagcagccaaggcaacaactaccaaggccatggcaactttgacttcccccacgggaaccctggagggacatccatgaatgacttcatgcacgggcccccccagctctcccaccccccggacatgcccaacaacatggccgccctcgagaaacccctcagccaccccatgcaggaaactatgccacacgctggcagctctgaccagccccacccctccatacaacaaggtttgcacgtaccacaccccagcagccagtcagggcctccattacatcacagtggggctcctcctcctcctccttcccagcctccccggcagccgccacaggccgctcccagcagccatccacacagcgacctgacctttaacccctcctcagccttagagggtcaggccggagcgcagggagcgtccgacatgccggagccttcgctggatctccttcccgaactcacaaatcctgacgagctcctgtcttatctggacccccccgacctgccgagcaatagtaacgatgacctcctgtctctatttgagaacaactgagggccacccggtcggggccatccctccacactctgcatcctaccccacctacccaacacacttttccacctgggagcctgtgccctcagaccgccccgcaccagagccacgggctgtggggcggggagccctcccccgctgcagccctctcagaacagaggggtagggagggtgcaccagtgcaccaggaaggctgtgtgggtctggagcccacgtcccacctccacacccttggcttgggcccatgcccagcgcaggcctgaagaccaccctcccgagaggaaccagcccggtaagagggcacacgctgatgcggcttcccggtccctccgcgtgtgccgattccagatgaccttccagtgtccccaaggttcttccatcttctagactgtaaccctgcctccctgcttcctggtccagagcctccctccagtgactgtggagcctgagaaggcccccgggccccagcatgggccccgagccttggaggagcactggcagttggtggcagtgagaccagcccacccaccaccacccaccacagaaaagcacaaacctctgggaaagacaacgtctctcgggggccaggggtcatcggtttgacccctgacctataagccaagataccccataaacacactcagaaagcagagaaaaaggacaagagtctgtgtttgagagggggtctgccattcctgcttggggactggtggggaagagggccaggacatcttctgagccaggacgtccctgaggctccacctccaagctcagacagggcccaggcttggggaacagagagagcaggtgtacacccaaccaaagtgattgtgcccttggttggggggcgcgggcatataacctgtcagaagcaaacaggagcggcaacttctaactttgctccaagccactctctttttaaacagcaacaatttaaagctatgaagtcacctggagaaaaggaacgttgctcttggacagcaagcaaaccatttctctccgtctgttctgtttttctcctagtccctctcctgccacctctccaagacttccgtgggacacccacttccctctgtcctagttctctttgtccaatcagatggcaagggcagtgcgtggaaaggccggggaggtgcagaaaccagagcccagggcaatggtgtctgtccagcccctccctctgtccctgtgctccaagctgcccccggctgcagcccaggccatggacatgtgcaccagtatgtacctgcaggcatgggggggaggggggcgtgtttctgggcctgccccagacactgcccttggctgccagcctaccctgcctgcactcctccaccatcacaatctcacccaaactcctgctcactcaagcaaaagcagcctctggccttccctccaccgctttgctccatctggcttaccactctccagggcctcctggggagcctgtcctgtgttcactttgtttcaggctggtctgtgccccgtgagccacatggcctagggtgatgccaggttgtcccgtcactggggtcccatctgtaaattctttgcgcccttcccggctgctgcctggggccctttcctgctctcccgtccgctgtgggtggtccccagctctcctctgtgggttttaccggaaaggtggccccagctgttgacttccagtcactgtcccagacggcacaaggttttctgtaggaaagctgccattgccccggccccttttcttcctttgtcccgttgtcgaggttttttcaaatagcgtgttgttcagtatgcaaatcaattattttaagaatcgcttttgtaaatatctttgtgaatattttagtatcgtctttgataatattcaacattttcatgacctggttatagcctttgctggtgtttttaaaatacctggactcaatgacaaagaccgagtcttctttttttttaaacaaaaacaaaaaaagcaaccagggctatttgtacagttgaaggggtgaacagaatgggcggctgtgctgggagttggaagaccgggcagcccgctatttagagccatccctcagtcagctggcagggacaagccaacgccaggtagcatgtggccacccttgcccagtgtctgtggcctggcaagtggccacgccctgtgtcagaccatctgggaattaagctccagacagacttacagatgccttccttaggagttcttgcttcttgcgttgatactttgccccagaaaggcctgggattcattctggttcttatcagggtgtgtccacactctgctcacaggtggatccacggctttccagtgcggagagtcgagatgctccctgcagcccaggccccgggcacctcctgcaaccatctctgggctcagcacctgaggcgggtttcctgggtcccctctccagcaagcctccaccagcaagctcggcccagagcttcccttccggctggctctgaaccgtgcgtggtgcctacagcctgcagtctggagacaagctcttccggagtgctctgggagccaggccagggtgtgagggaggtgcagaggcatccggggcgggagcaagccccaggttgtgacaggtgcaggtagacaacgcccataaacagagatggtcctgaactctggagagatccttccctgatcctttcggacgactacttggagccataagtaacctcagcaaaaacgaggcctctgcaagccacttttccatgccaagcatccacccggcccacaggcatgtttctgccgccactccgcaagatggacagggagccagcaggcaggcgggaagggccaagtacaggcaatcacccccatcttcttggtttgaagctttatccatgtatcatgttccgtgtagccattttattttttaagaaactgctaatactttctccctaatggaagccctgatcccccagagagctacaggtctgctcccgacgggcctcgggcctgacccgtccacacagggccgtgtcaacagcagcgactcaagggacgtgtgtacatatgtaaatgagaaatagagacgtgtcaacagatgcattcatttctcttggaatgtgtattgtttttattttgcgaaacaaaacaaaacaaaaaaaaaagcttggaactccatcacgtggaaaaactagatcctgttggttatagcatttgtgagttctccacgtctgtctctctcgctcatgtaatatactctgaccctgagtggaaaggggtttttgttctgtttttattttacctacatgtactatttagcttcagtgtactagtcctgccacctgtgtatttttagggtgctatggaaataatgaaaagaaacggggatttcagaagaaaattgtaaccaaattcatactttgtataatttttgatatcatgatcacaggtgattcacacgtacacacataaacacacccaccagtgcagcctgaagtaactcccacagaaaccatcatcgtctttgtacatcgtatgtacaatgcaatcatttcatactttaaactggtcaaaaaactaattgtgatttctagtcttgcaaagctgtatgtagttagatgatgtgacaacctctaatatttatctaataaatatgtattcagatgaaacctgtatattaggtgttcatgtggttattttgtatttaaagatcaaattatttgactattgctagacatttctatactctgttgtaacactgaggtatctcatttgcccatgttaatttttttctaaataaattgacaaaaacaaa

SEQ ID NO: 1091 - DNA, 2377 bp, Homo sapiens
  source 1..2377: mol_type = genomic DNA
gacacccaggcagtccctgacgtgtcggggaggagccgggcgcggaggtacgctgagtggagctcggggctgcgtaggggagctgagccgagcggctgggcgggcctggccgggccggcggaggggagacgtcggttgagcggcggcgaacatgcgcttttgacacattggaggctttcttgatcatggatggtgaagatataccagatttttcaagtttaaaggaggaaactgcttattggaaggaactttccttgaagtataagcaaagcttccaggaagctcgggatgagctagttgaattccaggaaggaagcagagaattagaagcagagttggaggcacaattagtacaggctgaacaaagaaatagagacttgcaggctgataaccaaagactgaaatatgaagtggaggcattaaaggagaagctagagcatcaatatgcacagagctataagcaggtctcagtgttagaagatgatttaagtcagactcgggccattaaggagcagttgcataagtatgtgagagagctggagcaggccaacgacgacctggagcgagccaaaagggcaacaatagtttcactggaagactttgaacaaaggctaaaccaggccattgaacgaaatgcatttttagaaagtgaacttgatgaaaaggaatctttgttggtctctgtacagaggttaaaggatgaagcaagagatttaaggcaagaactagcagttcgggaaagacaacaggaagtaactagaaagtcggctcctagctctccaactctagactgtgaaaagatggactccgccgtccaagcatcactttctttgccagctacccctgttggcaaaggaacggagaacacttttccttcaccgaaagctataccaaatggttttggtaccagtccactaactccctctgctaggatatcagcactaaacatcgtgggggatctcttacggaaagtaggggctttagaatccaaattagcagcttgcaggaattttgcaaaggaccaagcatcacgaaaatcctatatttcagggaatgttaactgtggggtgctgaatggcaatggcacaaagttctctcgatcagggcatacatctttcttcgacaaaggggcagtaaacggctttgaccccgctcctcctcctcctggtctgggctcctcgcgtccatcgtcagcgccgggtatgctgcctctcagtgtgtgagtgcctagcctccaggtgggggctcctgccctcctccaacaacccaggacacccacgcctcacccctcggtgcctgggcccagccccgtgcccctccgtctgcctccgcacggctggcagagggcaggctgcatgcagtggcggctactgggccctgcccagccccggaactctgcgcgatatcaatactggctattttctcttctcgccgtagtgccgttggtttcacatgattgcacttttgtgggtcgcaaggtgatacatacgtgtattacttggtcactggatgcagaagtacccattcatcacacctgccccatagcccccactctgctgtactgataggatttagttgtgttttaggacattgcaaatcttctagaagttctcccccaaatcaggtcaatgtgtgccctcctgagctcccacccaggcatctccagtgctcatgatcatgtgtcccccaactccacccctcacagtttgggcctgtttctggcaaagagtcaggaaggttactgaattagggaacattttctgcaccttctgattttacttaagcagctaccattccatggacttgcctcccagagcagcacaatgcccgtctgagccccacgtggcaggagcctctgggacggggcacacacaggcccagcctctgtgctgtctcctcctccgtgcgcctcagactcggggtgagggaggcgggcagcctctcgccagccttcccgtccttcagttcaacgacatctttggagtgtttttgttttctcttccaagggccgtcccgttgtgttaggaagggtgagtggctggttccagggtgggccggtgccagctccggggtggactgaacagcggcggctgtccctgtgcatcctttgattactctcatgctgcatttactgtttacatttgttttattgtacataggtttgtaaacattattgcctgagatatttgtatataacttgggctttgtagcttttatttattcagaacgcatacggcatgttaatgactctgatggtgtcctcctctgggcagctgtataggatcatcatgtggttacaaaaaatacttccctcaaaaaaattcttttaatgtggaaacaataaatttcacagaaaaaaaggattgacgttgcttta

SEQ ID NO: 1092 - DNA, 3284 bp, Homo sapiens
  source 1..3284: mol_type = genomic DNA
cattcggggctggaactcgaacgctgacgttggctcctgagccgggcgctgcctcgcgcctgattggcgggtcctcggggccgccctccccagcgcaccacccctgggttccctcccgggtccgcagtggaaacactgccctctcccttcttgacccctagcccttccttccctccctccttccctcctgtcgccgtctcttctggcgccgctgctcccggaggagctcccggcacggcgatgggttctcgggcctccacgttactgcgggacgaagagctcgaggagatcaagaaggagaccggcttttcccacagtcaaatcactcgcctctacagccggttcaccagcctggacaaaggagagaatgggactctcagccgggaagatttccagaggattccagaacttgccatcaacccactgggggaccggatcatcaatgccttctttccagagggagaggaccaggtaaacttccgtggattcatgcgaactttggctcatttccgccccattgaggataatgaaaagagcaaagatgtgaatggacccgaaccactcaacagccgaagcaacaaactgcactttgcttttcgactatatgatttggataaagatgaaaagatctcccgtgatgagctgttacaggtgctacgcatgatggtcggagtaaatatctcagatgagcagctgggcagcatcgcagacaggaccattcaggaggctgatcaggatggggacagtgccatatctttcacagaatttgttaaggttttggagaaggtggatgtagaacagaaaatgagcatccgatttcttcactaaaggagaccaaactgttccttgcggtctagtatttaagaactggaacttgaaagtcctccttctaccaactccacctccaccccctcattccccttctcccaaagtactactgctgttgcatgacaaccccaaatatgttctgtcaacacaaacctgcctttggtgtataaacagggcattacagaatggtacaccctatatatttctgttcagtatccattcactagttcttcatttataaatatcatcttccccattctgctgctgaatgccacacatccatccagtctgagaaagtgagagaggcaatcatgccaagaacaagccagcaaagctctttcaccagatgtagactgtagccctgctgccttccctccagcgagtctgccagcatgcttcttcatcctttttatatgttctttgcttcctacttccctgtcttccaacatactgttcacttactctggcagtctttctgcttttcattaagcctcaaaatctcctctgttctacttggcaccacaagctatgtcctatatatgtatttctgacttggcaggatagttcaggggtctggcagtttttatttaccttcattattaaatgggcctctgggatgttgcctcttcaggagctttttggtaatcaatacttctctcagaagtatgagaccatcctctgcactctgctctgtcatcaaaggctgctgggtggagataccctttttgaaaggtggccttggtgagaggtatggagccaagtcttctaggttgcttgcccacatcactctatctctggcctctgattctcaactttgtacctgtgtggctcctcttgttagtgcaatgttgactgttgaaaaagcagcagtatgcttacaggtttgcttagtttggggacaccgttaccaccagaatggctgctctgacaatatgcctagggactttctcatggcttttatttaataaggaggctgggcaccctataaagcctcatgcattcacacctttgcagcatggtttatgcctcagtgttatgtgcactggaatgttttccacttcacatttccaagtagaaatattagtgttacggaagtgcctaatatcccagtccaaatttttttttttttttttttttttttttgagacagagtcttgctctgtcacccaggctggagtgcagtggtgcgatcgctcactgcaacctcagcctcctggatttaagtgattctcctgcctcagcctcccaagtagctgggattacaggtgtgcaccaccatgcccggctaattttttgtatttttagtggagacagggtttcaccatgttggccaggctggtctcgaactcctgacctcgtgatccgcctgcctcagcctcccaaagtgctgggattacaggtgtgagccaccacgcctggccccagtccaaaatatttaaagattgtttccttagtgtcttgaagttttgcacaaaattcttttttttgagatggagtctcactctgtcacccaggctggagtgcagtggcgtgatcttggctcactgcaacctctgcctcctgggttcaagcaattctcccacctcagcctcccaagtagctgggattacagacgtgtgccaccatacctgggtaatttttgcatttttagtggagagggagtttcaccatgttggccaggttggtcttgaactcctgacctcaggtgatcctcctgcctcggcctcccaaagtgctgggattacaggcatgagccaccgtgctcagccgcaaaattctttatgaattttacacttggcaaatgttaatgacggaagccatagtctgctcctaatacatgtccaaagcattgactgttgtgtcattagctgcctggttacattagctccctggcttcttgtttagaccactgctaatcccttaaaaacaagaggtctggcactagtagcacaacctaaggtggcattacagatctttgagcgagccacagcaacttttctgccaagtcagcttagtttagacttcagtgaatcaggctattgctatcctaatgtatgtctctatgagtgtatttagccacacatctgcccttggttgactttctgactcattgcttgcttgcttgtttccttgctttggaaaactattgaagattgctaaaaaataccactgcaaagtgatggaaaagggtggagaacaggggagtagccaggctggatggctcaaatataaatgaatgaggaattctttatgaagtatcagtcagattttatgattaagtgatgtaatataggaattatgtaaaagggaagaatgtctgatactgatctattagagaggtactttagaggcttcttgattggcataaagttcctaaggttatagattttccccccttttggctgtatagcaaagtgttttaatccacggttgtgccttattgttccattaaaatt

SEQ ID NO: 1093 - DNA, 876 bp, Homo sapiens
  source 1..876: mol_type = genomic DNA
accacccagtccagcacccaccatggctgacgcctgctgcaccaggacgtatgtgattgctgcatccaccatgtctgtctgctccagtgacgtgggccatgtcagccgagtctcctcccccagcacctgcactggctcctcctggcaggtggacaattgccaggaaagctgctgcgagccccgctcctgtgcctccagctgctgtacccctagctgctgtgccccagccccctgcctggccctggtctgtgccccagtgagctgtgagcccagcccctgccaatcaggctgcaccgactcctgcacaccttcatgctgccagcagtctagctgccagccggcttgctgcacctcctccccctgccaacaggcctgctgtgtgcctgtgtgctgcaagtccaactgctgcaagcccgtgtgctgcgtgtccatctgctctggagcttcctccccatgctgccagcagtctagctgccagtcagcttgctgcaccttctccccatgccaacaggcctgctgtgtgcccatctgctgcaagcccatctgctgtgtgcctgtctgctctggggcttcctctctgtgctgccagaagtctagctgccagccggcttgctgcaccacctcctgctgcagaccctcctcctccgtgtccctcctctgccgccctgtgtgccggcctgcctgctgtgtgcctgtcccctcctgttgtgtccctgcctcctcctgccagcccagctgctgccacccggcctcctgcctgtccttcctctgccgccccgcgtgctcccgcctggcctgctgaggcctctgctcaggccaggagtccagctgctgatgggcacgtcccccagggccagccggctccggtcctgtcct

SEQ ID NO: 1094 - DNA, 254 bp, Homo sapiens
  source 1..254: mol_type = genomic DNA
cctgaaccatccatttctgacaccatgatttactacagcaactattatggtggctatgggtatggtgggcttggctgtggctatggctgtggttatcgtggctatggatgtggttatggtggctatggaggctatggaaatggctactactgcccatcttgctatggaagatattggtcatatggtttctactgaacaattctagagctcaccagatttgtctgcttgtgaaacctggattctcatgctgctct

SEQ ID NO: 1095 - DNA, 1234 bp, Homo sapiens
  source 1..1234: mol_type = genomic DNA
acactcacttacacctcccccagctcacctcctccccaccccagcatggccgcgtccaccatgtctgtctgctccagcgcttactccgactcctggcaggtggacgactgcccagagagctgctgtgagcccccctgcagcgcccccagctgctgcgccccggccccctccctgagcctggtctgcaccccagtgagctgtgtgtccagcccctgctgccaggcggcctgtgagcccagcgcctgccaatcaggctgcaccagctcctgcacgccgtcatgctgccagcagtctagctgccagccggcttgctgcacctcctccccctgccagcaggcctgctgtgtgcctgtctgctgcaagactgtctgctgcaagcctgtgtgctgtgtgcctgtctgctgtggggctgcttcttcgtgctgccggcagtctagctgccagccagcttgctgtgcctcttcctcctgccagccggcctgctgtgtgcccgtctgctgcaagcctgtgtgctgtgtgtccacctgctctgaggattcctcttcatgctgccagcagtctagctgccagccagcttgctgcacctcctcctcctaccagcaggcctgctgcgtgcctgtctgctgcaagactgtctactgcaagcccatctgctgtgtgcctgtctgctctagggcttcctcttcacgctgccagcagcctagctgccagccagcttgctgcaccacctcctgctgcagaccctcctcctctgtgtccctcctctgccaccccgtgtgcaggtccacctgctgtgtgcccgtctcctcctgctgtgcccccacctcctcctgccagtccagctgctgccgcccggcctcctgcgtgtccctcctctgccgccccgcaagctcccgcctggcctgctacagcctctgctcaggcaagaagtccagctgctgagtgctcaatccttgtctcctgctgactgtgtctttgctgccaagcaggattctccagtctcaggagcccctggagtcctcagaatccaccagctccatcagtagccacagagctgctgcctgaaggggattttgagcgcgtcacactttcctccccactgtctgggaagagacaacccacaaatccctcagcaggtggactgtggctttctggagcccccttctccaaatgtgttgcttatacccaatgtgacaaagaagaactgctctaatcaataaattcttgagtcagg

SEQ ID NO: 1096 - DNA, 2479 bp, Homo sapiens
  source 1..2479: mol_type = genomic DNA
gtcgcacatgcgcacagagcccgggcggctacggaagcggtgagactgtctctcggctgcagccctggtgcgacccggcccgttgccgtagagatgggcagggctggatggagtggggtgcggtgagctgagctgaccctgcttcgccacggggactgcagtgaccccggcttgccggcagggcgggtaacaggttgagccagggtggggctgctcaggggcgtggagccgaggccaggatttctctgaagacccggcacaggctattcctttctgcgacgagcccattgctatggaaaccaaagcgttaggccagcggggattgaggctgcgggatcatgacgggtctctctcccgaagaaccttgcctaaggcttccccaagcggctacttcctgagcgaacccgcccacccgcctgaaggagagagttttccatggacacagcctagcagaaagacgcagccttcgtgcttcgctgactgctgaccactgacccaccgccttgatgacagcaccctcgtgtgccttcccagttcagttccggcagccctcagtcagcggcctctcgcagataaccaaaagcctgtatatcagcaatggtgtggccgccaacaacaagctcatgctgtctagcaaccagatcaccatggtcatcaatgtctcagtggaggtagtgaacaccttgtatgaggatatccagtacatgcaggtacctgtggctgactcccctaactcacgtctctgtgacttctttgaccctattgctgaccatatccacagcgtggagatgaagcagggccgtactttgctgcactgtgctgctggtgtgagccgctcagctgccctgtgcctcgcctacctcatgaagtaccacgccatgtccctgctggacgcccacacgtggaccaagtcatgccggcccatcatccgacccaacagcggcttttgggagcagctcatccactatgagttccaattgtttggcaagaacactgtgcacatggtcagttccccagtgggaatgatccctgacatctatgagaaggaagtccgtttgatgattccactgtgagccatcccacgagcccctgcattggagtcagaggtacagatctattgttgatcttacaccaagatccaaacttgaacattctacttttgttgatacagaaaaaaacagatgatgccttttatgagcacaaaaaagagttgctgtagcttttaactttataatccattttttttaagattaaactaattgtgagatggtgaagataaattttctgccctgtgagtgacactggccaggggataggttgaggcagatggtgcccagaagaaagagggcagcacccattgcacatggcaggcctggaatcctgcagccctccccaaaaacagattgacccaggaatgaatctgctacaattccacctcattctttcacacccagagccagagccttaagcatcatggtacctcttgcgcttcttacagtgagtgccaatctactagataaatggccttcaggcagtgctccaggaatcctggggggtcccaggccacctctgcttccaccttcactataagtggcccagttctggttttctagattgtacttatgcataagatagtttttaaagaaagcattccactgtgtaaatttttttttgtctttttttgaaactgtcctgctctgtcacccatcctagagtgcagtagtgtgatcatggctcactgtagccacaacctctcaggctcaagtgatcctcttaccttagcctcctgcgtggctgggactacagatgtttgccaccatgcccgcctcattttttttctttttttatagagatgagattttactatgtcgcccagactggtctcaaactcctggcctcaagcaatcctcacgcctcagcctcccaaagtgttgatgagccactgtaccccgataccactgtataaaaaatttaaaaaaaattgtgagtgctattgtacatggcaaagtttcaaagagctcttggccatccctcaccaaactttggcaaaagatggtgttagtccccttctccagggcacatgagaaaaacaggcctaacatcaggtctcagcggttcctctcacaggccttggcttggaaggctggagcttcggaccaaggcccagccctgtcacctcctcttcatgtgatgtggacccctgggagcatcagtgtcctcatctgtccaatgacagcccttttctcacagagttattgtgaagattcaacaatttcttggcatagtgcctggcacatggtgtgtgcttagcgcaaatggcagctctcatcatgaatgatagactctttcaccctgctggtcccaggtcggcacacacatccccataatggcatttctcctttctgtgcacagcactttattgttacaaagtactcttccaaaaagttaccctgtgtgtaaaaaaaaaaaaaaaaaaaaa

SEQ ID NO: 1097 - DNA, 199 bp, Homo sapiens
  source 1..199: mol_type = genomic DNA
caactgagcctacctttcttgaaaccatgagctttgataacaactaccatggtggccagggctatgccaaaggaggcctgggctgcagctatggctgtggtcttagcggctatggctatgcctgctactgcccatggtgttatgaaagatcttggttttctggctgcttctgagaaattagagattgctgatctgttta

SEQ ID NO: 1098 - DNA, 440 bp, Homo sapiens
  source 1..440: mol_type = genomic DNA
acaacagctaaccacttctgacaacatgagctactccggcagctactatggaggcctaggctacggctgtggaggattcggtggcctgggctatggctatagctgtggatgtggcagcttccgcagactgggctatggctgtggctatggaggctacagatacagctgctgccacccatcatgctatgggggatactggtcttctggattctattgaataaatacttgaaatatagtcttctgtgagattcccaattcttccaagaaactttattccataaccatatggaattccatattccataacaaaacagctgcttggatcacctgccttttgacaatagtgtgaagaaaacttgatcaactagatattggcatttgattagtgatgttctccagatattcacttttttattggctggagagccattatactctaa

SEQ ID NO: 1099 - DNA, 311 bp, Homo sapiens
  source 1..311: mol_type = genomic DNA
caaggacaacctccacaaccatcacgatgtgcggcagctactacggaaactactacggcgaccatggctatgggtgctgtggatacgaaggcctaggctatggctatggaagcctgcgctgtggctatagctcctgctgtggctatggtcatggctacggctcccgcttcttctgtggctgtggctatggatgcggctctggctactactattgaggacaccgtgggagactcatcctctatcctgtgacatcgggattcaccaattctgaaccccgtatgctctgagctcggggctggatgaagattatc

SEQ ID NO: 1100 - DNA, 5586 bp, Homo sapiens
  source 1..5586: mol_type = genomic DNA
aggttcggctgcgcgagcggagggaggcggttccctcttatgcttttcatctccatccccagccccacccacagccagggggcttgggttctgagctgatggggtacccccctctgcagagcgggatgagtgggtgttccggcagggatgtggtcattgacggccagtgagggcgagagtaccacggcccacttcttccttggagctggagatgaggggctgggcacccgtggaataggcatgaggccagaagagagtgacagcgagctccttgaggatgaggaggatgaagtgcctcctgaacctcagatcattgttggcatctgtgccatgaccaagaaatccaagtccaagccaatgactcaaatcctagagcgactctgcagatttgactacctgactgttgtcattctgggagaagatgtaatccttaatgaacctgtggaaaactggccatcctgccactgcctcatctctttccactccaaaggctttcctctggacaaagctgttgcttactccaagcttcgaaacccctttcttatcaatgatctggccatgcagtattacatccaagataggagggaggtgtaccggatcctgcaggaagagggtattgatctgcctcgatatgctgtgctcaaccgtgatcctgcccggcctgaggaatgcaacctgatagaaggtgaagaccaagtagaggtcaatggagctgtctttcccaagccctttgtggagaagccagtgagtgcagaagaccacaatgtttacatctactaccccagctcagctggaggaggaagccagcgtctctttcgtaagattggcagccgaagcagtgtttactctcctgagagcagcgtccgaaagacggggtcgtacatctatgaggagtttatgccaacagatggcacagatgtcaaggtgtatacagtggggccagattatgcccatgctgaagctagaaaatctccagctttggatgggaaggttgaacgagacagtgaggggaaagagattcgatatccagtcatgctgactgccatggaaaagctggtggccaggaaagtctgcgtagctttcaagcaaacagtttgtggatttgaccttcttcgtgccaatggtcattcctttgtgtgtgatgtcaatggctttagttttgtcaagaactcgatgaaatactacgatgactgtgccaagattctggggaacaccataatgcgggagcttgccccacagttccagattccatggtccatccccacggaggctgaggacattcccattgttcccaccacatctggcactatgatggaacttcgttgtgtcattgcaattattcgtcatggggatcgtactcccaagcagaagatgaagatggaagtgaaacacccaaggttttttgctctgtttgaaaaacatggtggctacaagacagggaaattaaaactcaagcgacctgagcagctccaggaggtgctggatatcacaaggctgttgttggctgaactggagaaagaaccaggtggtgagatcgaggagaagactggaaaactagagcagctgaagtctgtactggagatgtatggtcacttctcaggtataaaccggaaggtacaattgacttactaccctcatggagtaaaagcttctaatgaggggcaagatccacagagggaaactctggccccatctctgttgctggtactgaagtggggtggagaactgactcctgctggccgtgttcaggctgaggagctggggcgagcttttcgctgcatgtaccctggaggacagggtgactatgctggcttccctggttgtgggctgcttcgtctccatagcactttccgccacgatctcaagatctatgcctctgatgagggtcgtgttcagatgactgctgctgccttcgccaagggccttctggctctagaaggggagctgacacccattttggtgcaaatggtgaagagtgccaacatgaatgggctactggacagcgatggggattccttgagcagctgccagcaccgggtgaaggctcggctgcaccatattctacagcaggatgcgccctttggccctgaggactacgatcagctggctcccaccagaagtacttccctgctcaactccatgactatcatccagaatcctgtgaaggtctgtgatcaggtatttgccctgatcgaaaacctcacccaccagatccgggaacgaatgcaggaccccaggtctgtagacctgcagctctaccacagtgagacactagagctaatgctacagcgttggagcaagctggagcgtgactttcgacagaagagtgggcgctatgatatcagtaagatccctgacatctatgactgtgtcaagtatgatgtgcagcacaatgggagtctgggacttcaaggcacagcagagttgctccgtctctctaaggcactggctgatgtggtcattccccaggagtacgggatcagtcgggaggagaaactggaaattgctgtgggcttctgtcttccactgttgcggaagatactacttgacctgcagagaacccacgaggatgagtctgtcaacaagctgcatcccctgtactcccgaggcgtgctctccccaggtcgccacgttcgaacgcgtctctatttcaccagtgagagccatgtccactccctgctcagtgtcttccgttatggaggacttcttgatgagacccaggatgcacaatggcagcgagctttggattatcttagtgccatctcagagcttaactacatgacccagattgtcatcatgctttatgaggacaacacacaggatcccttatcagaggaacggttccatgtggagctacacttcagccccggagtgaaaggtgttgaggaagaaggcagtgccccggctggctgtggattccgtccagcctcttctgagaatgaggagatgaaaaccaaccaaggcagtatggagaacctgtgtccaggaaaggcatcagatgaaccagaccgggcattgcagacttcaccccagcctcctgagggccctggccttccgaggagatcacccctcattcgtaaccgaaaagctggttccatggaggtactttctgagacttcatcctcgaggcctggtggctaccggctcttttcatcttcacggccacccacagaaatgaagcagagtggcctaggctcacagtgcacagggctgttcagcaccacagtgctgggtggctcctccagtgccccgaatcttcaggactacgcccgcagccatggcaaaaagctaccacctgccagtctgaagcaccgagatgggtttgaagggtgttccatggtgcctaccatctaccctctggaaacactgcataatgccctttccctacgtcaagtgagtgaattcttgagtagagtctgccagcgccacactgatgcccaggcacaggcatctgcagccctctttgattccatgcacagcagccaggcctcagataacccattttctccaccacgtactcttcattcacctcccctgcaactccagcagcgctctgagaagcccccttggtacagcagtggcccttctagcactgtgtccagtgctggtccttcttcccctactacagtagatggtaactcccaatttggcttcagtgatcaaccctccctaaattcacacgtggctgaagaacatcaaggccttgggctgctccaggagacccctgggagtggagcacaagagctctccatagaaggggagcaagagctttttgaaccaaatcagtccccacaggtgccacctatggaaaccagccagccatacgaggaggtcagccagccatgtcaggaggtccctgacatcagccagccatgccaggacatttctgaggcgctcagccagccatgtcagaaggtccctgacatcagccagcaatgccaggagaaccatgacaatggtaaccacacatgccaggaggtccctcacatcagccagccatgccagaagtccagccaactgtgccagaaagtctctgaggaagtttgccagctatgtctggagaactccgaggaggtcagccagccatgccagggggtctctgtggaggttggcaagctggtccataagttccatgtaggggttggtagcttggtccaggaaacccttgtagaagttggcagcccagctgaagagatccctgaggaggtcatccagccataccaggagttctctgtggaggttggcaggctggcccaggagacttctgcgatcaatctgttatctcagggcatccctgagattgataaaccatcccaagagttccctgaggagattgatctgcaggcccaggaggtccctgaggagataaattagaagtcctgggtggtccctgaagtgattgatcagctgcctggagagggtattcctcaagcccagcatccatctggtgatccaaaccctcagagccagtctctagcccatgaccagcactcaccccttccaccagcaacatgtgattaattttctcattagtggtatcacactataccagccatttgagccagcaaccttttctgttggctaactcactggccagctctcaccagcggtgtctggggaagtagttctctttgtatgaagcatacctgtgccagagctgtggttgaggaggagccagttttaggttcgaagaagccattggctcctcacttagccattagacttgaataggatttccttggggtgggttggtctgtcattacccagccttctctgagcatcctaggaaatcacagattgttaaaggaaatgccgcttcactgctgaagacaccatctggcgacagcaaatgcaaaagaggggactctagggtcttcacttttctggggaaatgttcacgacttctcaaggtacgcttagaccatatgtgcattcaggggactcttgtctttgccagcactcctcaggtgagcccgggatggctatctgaaatgtctggaaaatagagtcccttccccaaacatctgacatggccactaaatctttagacttgccttatagatccttccatatcatccccaagtgccccttctgcctcagtcctgttcctctgggcaatagctctagggaaaagtaggtattagactgctgtgcaaaattcagagcaactacttaaaatgctctagaggattcttagccagtctgtgaaagtgggcctcctctgtggtggggctgtttggcttaggagatgctgtagtagtagagataatcaggttctattttaagcaatcagcagagatcaatattgtacagatacaagcaaaggtttaataaatatatatatatatatttatttctgtagttgtgccagggacagactggccaaagaccaaacactgcagggtccccaagaaatttgtccttatatcattgtgtctgagggccagatatgattatgaagctttttccaaagatccagggatgggaatgggagtgggtaggaggggtaatgcggtcattggagtcgggggctggaacattatgagtgctcaataaatataaactaatgagaatggtggtgatgga

SEQ ID NO: 1101 - DNA, 2311 bp, Homo sapiens
  source 1..2311: mol_type = genomic DNA
gatgtcacgtccggcggcggcggcagcggcagcggcagcggcgctgagttttgtctcccgggccgtctgggcgcgcgcgggtgtcccagaatgaaatatgactgaggactctcagagaaactttcgttcagtatattatgagaaagtggggtttcgtggagttgaagaaaagaaatcattagaaattctcctaaaagatgaccgtctggatactgagaaactttgtacttttagtcagaggttccctctcccgtccatgtaccgtgcattggtatggaaggtgcttctaggaatcttgcctccacaccacgagtccatgccaaggtgatgatgtatcgtaaggagcagtacttggatgtccttcatgccctgaaagtcgttcgctttgttagtgatgccacacctcaggctgaagtctatctccgcatgtatcagctggagtctgggaagttacctcgaagtccctcttttccactggagccagatgatgaagtgtttcttgccatagctaaagccatggaggaaatggtggaagatagtgtcgactgttactggatcacccgacgctttgtgaaccaattaaataccaagtaccgggattccttgccccagttgccaaaagcgtttgaacaatacttgaatctggaagatggcagactgctgactcatctgaggatgtgttccgcggcgcccaaacttccttatgatctctggttcaagaggtgctttgcgggatgtttgcctgaatccagtttacagagggtttgggataaagttgtgagtggatcctgtaagatcctagtttttgtagctgtcgaaattttattaacctttaaaataaaagttatggcactgaacagtgcagagaagataacaaagtttctggaaaatattccccaggacagctcagacgcgatcgtgagcaaggccattgacttgtggcacaaacactgtgggaccccggtccattcaagctgaacgcacccgctggttgtggaccgtctgccaggcaccacaatcattcctggacccccgagggcctctgagtttgagacgctggctgagatcaaatgataagaattccaatttttgttttcctaagtctttcatctgctaatctacccaacatgaaccacgggccacatgaagggccagacacattcttaagcggctcacagcctagaggtgcacatctgtgattacaatgtgcaaggtaaaactggatcaacagtttccaaggactggcatgtaataaaatatcctcaaaacaacaagcaagttgggcgtgacttagactttcactgcccatgtagaaggcactgtacattcttgcagcatctcagttggccagcaagaggtgagtcagaaaaaaaccattcagcagccacatggaagtggggctcactgggcacaaggcaaaactgtgaagaagataaagtgtctgtggttctgcattgactctattccctggagtcctcccctctcgagttcctagaattatgttatcactcttgctctatctcattcctatcaagacctgttttagaaatgggtgccacagactcagttacattcaaatgtaaacccattcattcatttagcaagttacttattagtgccagtgctgtgtcaggttctacattaggtaccagagtacagtgatgagcaaaaccagtccctgcccttctggaacagagaagactggaagaggatgggggtagccattaatcaaacagtcacagaaatgagtgcaaaatgtagctggagtaagggcttccatggtgaggcacttggtgcagggatctctggatctgaccaaatcaggaggtcaggaaaggcttccaggaggaagtgacactgtgcccagagctcagggatggaagaaggatgctccttctgggcagagagtaaggagagaagattggtgggaaggagggcaggggccagatgccgtgggtgtgatttggatctgtgtccctgccaatcacatgttgaattgtagtccccagtgttggaggtggagcctggtgggacatgattggatcatgggggtagtttttcatgaacggtttagtaccaaccacttggtgctgttctagtgagttgagtgcattctcgcgagatctggttgtttaaaagtgtgtagcacccttccctcttgctcctgctcctccaatgtgagactccttgctttccctctgttttccaccatgattggaagcttcctgaggcctcaccagaggcagatgccagcatcatgcttcctgtgcagcctgcagaactgtgagccaattaaacctcttttcgttat

SEQ ID NO: 1102 - DNA, 1260 bp, Homo sapiens
  source 1..1260: mol_type = genomic DNA
tttccttcccaggtgtcgccgcctgctttctgcagccgctgcctgggaggggttccgaggttctgggcagccacagccccggaggccttacaggagcgacctggcaattcccgccgccggccgccagaggaagctgctttgctgctgtcgttgcccagcaactcgtagcccggaagcagtaccccgtctcgctcggttccgcggcggccacgctccgggagacttccggcagggcgggcgcggggtcttggcgaacggtcttcggaagcggcggcggcgcgatgaccacgctacgggcctttacctgcgacgacctgttccgcttcaacaacattaacttggatccacttacagaaacttatgggattcctttctacctacaatacctcgcccactggccagagtatttcattgttgcagaggcacctggtggagaattaatgggttatattatgggtaaagcagaaggctcagtagctagggaagaatggcacgggcacgtcacagctctgtctgttgccccagaatttcgacgccttggtttggctgctaaacttatggagttactagaggagatttcagaaagaaagggtggattttttgtggatctctttgtaagagtatctaaccaagttgcagttaacatgtacaagcagttgggctacagtgtatataggacggtcatagagtactattcggccagcaacggggagcctgatgaggacgcttatgatatgaggaaagcactttccagggatactgagaagaaatccatcataccattacctcatcctgtgaggcctgaagacattgaataaccctgggcagtggttcttaggcagatactctagatgctttatggacaatattattttcattggatgattctggagctctattaggagaaaagtaatcattttaggtcttaaagacttcaagaaaatacaggttatcaatttattttaaatctcattgtttccagttagcaatatcatacctattaaagctgttcattgtaacaaaattcaatcaaaaaggcagctaggtcagaaggaaacataccactctcatggttcatagtattcactgtatgtatgctagggaaaagacttgctccagtctcctcctcagttctgtgcctgagaaccactgctgcatatatttgtttttaaattttgtattgaactgttaattgaagctttaaaagcatatatgaaatgtataaatctaagatgtataatacattattgactctatgaa

SEQ ID NO: 1103 - DNA, 3357 bp, Homo sapiens
  source 1..3357: mol_type = genomic DNA
gcggccgccgtagttgaatctcctcggcgccggaagccccgccactccgcttcctggttcatgtgcggccttcgttccctcgctatctcgaccttgacttcgcatgtgcatccgccgaagtctttctagatcaatcggccccatctctcgtcttcccgattcggccatgacctcacccgtatcctcgacgtaggacctcggacttcatttccgccaccccgacacttccggaatccccggaagcgacccgttgccatggcgactatgtacacagccaggcagccccgcgtggggagtgcaggtggtttcggttgcggcagtcgcgtcccgggagcgtcgctgcctggtgaacgctagaatgggtactaggaaaaaagttcatgcatttgtccgtgtcaaacccaccgatgactttgctcatgaaatgatcagatacggagatgacaaaagaagcattgatattcacttaaaaaaagacattcggagaggagttgtcaataaccaacagacagactggtcgtttaagttggatggagttcttcacgatgcctcccaggacttggtttatgagacagttgcaaaggatgtggtttctcaggccctcgatggctataatggcaccatcatgtgttatgggcagacgggagctggcaagacatacaccatgatgggggcaactgagaattacaagcaccgggggatcctccctcgtgccctgcagcaggtttttaggatgatcgaagaacgccccacacatgccatcactgtgcgtgtttcctacttggaaatctataatgagagcctgtttgatctcctgtccactctgccctatgttggaccctcagtcacaccaatgaccatcgtggaaaaccctcaaggagtcttcattaagggcttgtcagttcacctcacaagtcaggaggaggatgcattcagcctcctttttgagggtgagaccaacaggattatagcctcccacactatgaacaaaaactcttccagatcacactgcattttcaccatctacttagaggcccattcccggaccttatcagaggaaaagtacatcacttccaaaattaacttggtggatctggcaggctcagagaggctggggaagtctgggtctgagggccaagtcctgaaggaagccacctacatcaacaaatcgctctcattcctggagcaggccatcattgcccttggggaccagaagcgggaccacatcccctttcggcagtgcaagctcacccacgctctgaaggactcgttagggggaaactgcaatatggtcctcgtgacaaacatctatggagaagctgcccagttagaagaaacgctatcttcactgagatttgccagcaggatgaagctagtcaccactgagcctgccatcaatgaaaagtatgatgctgagagaatggtcaagaacctggagaaggaactagcactactcaagcaggagctggctatccatgacagcctgaccaaccgcacctttgtgacctatgaccccatggatgaaatccagattgctgagatcaactcccaggtgcggaggtacctggaggggacactggacgagatcgacataatcagccttagacagatcaaggaggtgttcaaccagttccgggtggttctgagccaacaggaacaggaagtggagtccactttgcgcaggaagtacaccctcattgacaggaatgactttgcagccatttctgctatccagaaggcggggcttgtggatgttgatggccacctagtgggtgagcctgaaggacaaaactttggactcggagtcgcccctttctctaccaaacctgggaagaaagccaagtccaagaagacattcaaagagccactcagctccttggcaagaaaggaaggtgccagcagccctgtgaatgggaaggacttggattacgtttccacctccaagacccagctggtcccatcctccaaagatggggatgtcaaagacatgctttcgcgggaccgggaaacttccagcattgagccccttccctcagactccccgaaggaggaattacgcccaattaggcccgacaccccaccctccaaaccagtggcctttgaggagtttaagaatgagcaaggtagtgagatcaaccgaattttcaaagaaaacaaatccatcttgaatgaacggaggaaaagggccagcgagaccacacagcacatcaatgccatcaagcgggagattgatgtgaccaaggaggccctgaatttccagaagtcactacgggagaagcaaggcaagtacgaaaacaaggggctgatgatcatcgatgaggaagaattcctgctgatcctcaagctcaaagacctcaagaagcagtaccgcagcgagtaccaggacctgcgtgacctcagggctgagatccagtattgccagcacctagtggatcagtgtcgccaccgcctgctcatggaatttgacatctggtacaatgagtcctttgtcatccctgaggacatgcagatggcactgaagccaggcggcagcatccggccaggcatggtccctgtgaacaggattgtgtctctgggagaagatgaccaggacaaattcagccagctgcagcagagggtgcttcctgagggccctgattccatctccttctacaatgccaaagtcaagatagagcagaagcataattacttgaaaaccatgatgggcctccagcaggcacatagaaaatagaacctcatcgccagtaccttaaaggacaagaccagcaactcccacctactgtagtggagctgctcaaccacctgcccagagctgcagccccctctactccaatgctgggacccagcacagagaacacatttggcctgcatgttgggaggagcatcctccaaggacaaccttgctcatctccacagagcactttgggttttaattcactgtcttatatgcagggacaggataaaataactttctagtttggactttcagtgctcatctgagaactttgtcttatttcctgtctgaaaggacatattctctatgtatgtgtgaggtcagaactgagtctcaagtaggaaggcagaaaagtagctcagccaggctcctcctggcaggcctttgtcacactggtcagcccctttcctggatagacatcctagggtgggggtggtgagctcggtctgaggagctctgcttctcacagctccctcagaccctaagttctctcaagacatcttttctgtgtttctgagccagtgaagaagacaggaggaggccctccttcatttggcaaccaggggaggataaggtctagccacagagaccagaaagggatgaggcagagctggctccatgta

SEQ ID NO: 1104 - DNA, 3771 bp, Homo sapiens
  source 1..3771: mol_type = genomic DNA
gattgggccgctgtcaggtgtcgctgcctgcaggttcggctgcgcgagcggagggaggcgggactcaagagtagccttcctcgaggacctgcctttcccatttgctgcctgaagttaatgtttcttgctggccaaatcagggacatgccggcattagcgggatgagtgggtgttccggcagggatgtggtcattgacggccagtgagggcgagagtaccacggcccacttcttccttggagctggagatgaggggctgggcacccgtggaataggcatgaggccagaagagagtgacagcgagctccttgaggatgaggaggatgaagtgcctcctgaacctcagatcattgttggcatctgtgccatgaccaagaaatccaagtccaagccaatgactcaaatcctagagcgactctgcagatttgactacctgactgttgtcattctgggagaagatgtaatccttaatgaacctgtggaaaactggccatcctgccactgcctcatctctttccactccaaaggctttcctctggacaaagctgttgcttactccaagcttcgaaacccctttcttatcaatgatctggccatgcagtattacatccaaggtgacaggagggaggtgtaccggatcctgcaggaagagggtattgatctgcctcgatatgctgtgctcaaccgtgatcctgcccggcctgaggaatgcaacctgatagaaggtgaagaccaagtagaggtcaatggagctgtctttcccaagccctttgtggagaagccagtgagtgcagaagaccacaatgtttacatctactaccccagctcagctggaggaggaagccagcgtctctttcgtaagattggcagccgaagcagtgtttactctcctgagagcagcgtccgaaagacggggtcgtacatctatgaggagtttatgccaacagatggcacagatgtcaaggtgtatacagtggggccagattatgcccatgctgaagctagaaaatctccagctttggatgggaaggttgaacgagacagtgaggggaaagagattcgatatccagtcatgctgactgccatggaaaagctggtggccaggaaagtctgcgtagctttcaagcaaacagtttgtggatttgaccttcttcgtgccaatggtcattcctttgtgtgtgatgtcaatggctttagttttgtcaagaactcgatgaaatactacgatgactgtgccaagattctggggaacaccataatgcgggagcttgccccacagttccagattccatggtccatccccacggaggctgaggacattcccattgttcccaccacatctggcactatgatggaacttcgttgtgtcattgcaattattcgtcatggggatcgtactcccaagcagaagatgaagatggaagtgaaacacccaaggttttttgctctgtttgaaaaacatggtggctacaagacagggaaattaaaactcaagcgacctgagcagctccaggaggtgctggatatcacaaggctgttgttggctgaactggagaaagaaccaggtggtgagatcgaggagaagactggaaaactagagcagctgaagtctgtactggagatgtatggtcacttctcaggtataaaccggaaggtacaattgacttactaccctcatggagtaaaagcttctaatgaggggcaagatccacagagggaaactctggccccatctctgttgctggtactgaagtggggtggagaactgactcctgctggccgtgttcaggctgaggagctggggcgagcttttcgctgcatgtaccctggaggacagggtgactatgctggcttccctggttgtgggctgcttcgtctccatagcactttccgccacgatctcaagatctatgcctctgatgagggtcgtgttcagatgactgctgctgccttcgccaagggccttctggctctagaaggggagctgacacccattttggtgcaaatggtgaagagtgccaacatgaatgggctactggacagcgatggggattccttgagcagctgccagcaccgggtgaaggctcggctgcaccatattctacagcaggatgcgccctttggccctgaggactacgatcagctggctcccaccagaagtacttccctgctcaactccatgactatcatccagaatcctgtgaaggtctgtgatcaggtatttgccctgatcgaaaacctcacccaccagatccgggaacgaatgcaggaccccaggtctgtagacctgcagctctaccacagtgagacactagagctaatgctacagcgttggagcaagctggagcgtgactttcgacagaagagtgggcgctatgatatcagtaagatccctgacatctatgactgtgtcaagtatgatgtgcagcacaatgggagtctgggacttcaaggcacagcagagttgctccgtctctctaaggcactggctgatgtggtcattccccaggagtacgggatcagtcgggaggagaaactggaaattgctgtgggcttctgtcttccactgttgcggaagatactacttgacctgcagagaacccacgaggatgagtactcccgaggcgtgctctccccaggtcgccacgttcgaacgcgtctctatttcaccagtgagagccatgtccactccctgctcagtgtcttccgttatggaggacttcttgatgagacccaggatgcagaccgggcattgcagacttcaccccagcctcctgagggccctggccttccgaggagatcacccctcattcgtaaccgaaaagctggttccatggaggtactttctgagacttcatcctcgaggcctggtggctaccggctcttttcatcttcacggccacccacagaaatgaagcagagtggcctaggctcacagtgcacagggctgttcagcaccacagtgctgggtggctcctccagtgccccgaatcttcaggactacgcccgcagccatggcaaaaagctaccacctgccagtctgaagcaccgagatgagctcttgtttgtcccggccgtaaaacgattttctgtgtcgtttgcaaagcatccgactaacgggtttgaagggtgttccatggtgcctaccatctaccctctggaaacactgcataatgccctttccctacgtcaagtgccacctatggaaaccagccagccatacgaggaggtcagccagccatgtcaggaggtccctgacatcagccagccatgccaggacatttctgaggcgctcagccagccatgtcagaaggtccctgacatcagccagcaatgccaggagaaccatgacaatggtaaccacacatgccaggaggtccctcacatcagccagccatgccagaagtccagccaactgtgccagaaagtctctgaggaagtttgccagctatgtctggagaactccgaggaggtcagccagccatgccagggggtctctgtggaggttggcaagctggtccataagttccatgtaggggttggtagcttggtccaggaaacccttgtagaagttggcagcccagctgaagagatccctgaggaggtcatccagccataccaggagttctctgtggaggttggcaggctggcccaggagacttctgcgatcaatctgttatctcagggcatccctgagattgataaaccatcccaagagttccctgaggagattgatctgcaggcccaggaggtccctgaggagataaattag

SEQ ID NO: 1105 - DNA, 308 bp, Homo sapiens
  source 1..308: mol_type = genomic DNA
cctcagaagcatcttcttgaaacccatctcaattctctcctcttgacaacatgtgttgcaactactacggcaactcctgtggctatggctccggctgtggctgtggctatggctctggctctggctgtggctgtggctatggaactggctatggctgtgggtatggctgtgggtttggctcccattatggctgtggttatggaactggctatggctgtggatatggctctggctctggctactgtggctaccggccattttgctttagaagatgctattcttcctgctaaaacatcactgtcggagga

SEQ ID NO: 1106 - DNA, 1941 bp, Homo sapiens
  source 1..1941: mol_type = genomic DNA
cttctccctggtcaaccgctctgcaaacaaccatcaatctgatcccacaggcctgagaaagtctgctctccagtacctgctgctgatctgtttcagccgacaagaggcaccatgaaattggaattcacggagaaaaactacaatagcttcgtgctgcagaacctgaacagacagaggaaacgcaaagagtactgggacatggccctgagtgtggacaaccacgtcttctttgcacatcgcaatgtgctggctgctgtctccccactggtgaggagcctcatctccagcaatgacatgaagaccgctgatgagcttttcatcaccattgacaccagttacctgagcccggtcacagtggaccagcttctggactacttctatagcggcaaggtggtgatctccgagcaaaatgtggaggagctgcttcgtggggctcagtatttcaacacaccacgccttcgagttcactgtaacgacttccttattaagtccatctgccgtgccaactgcttgcgctacctcttcttggctgagctgtttgagctcaaagaggtatcagacgtagcttactctggcattcgggacaacttccactactgggccagtcctgagggctccatgcacttcatgcgctgtccacctgttatctttggccgcctgctccgtgatgaaaaccttcacgtgctcaatgaagaccaggcgctcagcgcactcatcaattgggtgtacttccggaaggaggatcgggagaagtatttcaagaagttcttcaattacatcaatctcaatgctgtctccaataagacgctggtgtttgccagcaacaagctggtgggcatggagaacacctcatcccatacaaccctgattgagagtgtcctgatggaccgcaagcaggagcggccatgcagcctgctggtctaccagcggaaaggggccctgcttgattccgtggtcatcctcggtggccagaaggcccacggccagttcaatgatggagtgtttgcttatatcatccaggagaacctgtggatgaagctctcagacatgccctatcgggcagcagcacttagtgccacctctgctggtcgctacatctacatctctggtggcaccactgagcagatttcagggctgaagacagcctggcggtatgacatggatgacaactcctggaccaagttgcctgacctgcccatcgggcttgtcttccacaccatggtgacctgtggggggacagtgtactcagtgggcgggagcattgccccaaggcggtatgtctccaacatctatcgctatgatgagcggaaggaagtctggtgcctggcaggaaagatgagcatccccatggatggcaccgccgtgatcactaaaggagacaggcatctgtacattgtcactggacggtgcttggtgaaaggttatatctcccgggtcggggtagtggactgctttgacaccagcactggggacgtggtccagtgtatcaccttccccattgagttcaaccatcggcccctgctctctttccaacaggacaacatcctctgcgtgcacagccaccggcagagtgtggaaatcaatctgcagaaggtgaaggcaagcaagacgaccacctcagtgcctgtcttgcccaacagctgccccttggatgtgtcccatgctatatgctccattggagacagcaaggtgtttgtatgtgggggtgtcaccactgccagcgatgtccagacaaaggactacaccatcaatccaaatgccttcttgctggaccaaaagacaggcaagtggaagaccctggctcctccaccagaggcactggactgtcctgcctgctgtctagccaagctaccttgcaagattcttcaaaggatttaaacattttaagtgggagaataagtaaatgcattattattcacgatttaatgagagaaagagagg

SEQ ID NO: 1107 - DNA, 2332 bp, Homo sapiens
  source 1..2332: mol_type = genomic DNA
ggtgggcccgcggaggaaagatactggggagtgggagccgcggggttcagagcgatgattcccccacaggaggcatccgctcgacggcgggagattgaggacaagctgaagcaggaggaggagactctgtccttcatccgagacagcctggagaagagcgaccagctcactaagaacatggtgtctatcttatcatcctttgagagccgccttatgaagctggagaactccatcatccctgtgcacaagcagacggagaatctgcagcggctgcaggagaatgttgagaagacgctgtcctgcctggaccatgtcatcagctactaccatgtggccagtgacactgagaagatcatcagagagggccccacaggtaggctggaagagtacctgggaagcatggccaagattcagaaggcagtggagtatttccaggacaacagcccagacagcccggaactcaacaaagtgaaactgctctttgagcgcgggaaggaggccctggagtccgaatttcgcagcctgatgacgcggcacagtaaggtcgtctcgcccgtgctcatcttggatctgatcagtggtgacgatgatctggaggcccaggaggacgtgaccctggagcacctgcccgagagcgtgctccaggatgtcattcgcatctcccgctggctggtggaatatggccgcaaccaagatttcatgaacgtctactaccagatacgctccagccagctggaccgctccatcaaaggactgaaggagcatttccataagagcagttcttcctctggggttccctactcccctgctatccccaacaagaggaaagacacacctaccaagaagccagtcaagcggccagggacgatccgtaaggctcagaaccttctgaaacagtattcccagcatggtctagatgggaaaaaggggggctctaacctcattcctctggaagggcttcttccctgtaccccaaggggcggcctgcctggcccctggataaacgctgcttgtgtttgtgcggccgacatctcgccaggtcacgagcatgatttccgagttaagcacctgtccgaggccttgaacgacaagcacgggccgctggccgggagagatgacatgctggacgtggagaccgatgcctacatccactgcgtcagtgccttcgtcaagctggcgcagagcgagtaccagctgctggccgacatcatccccgagcaccaccagaagaagaccttcgactccctgatacaggatgccctggatgggctgatgcttgaaggggagaacatcgtgtctgctgcccggaaggccattgtgcgacacgacttctccacggtgctcaccgtcttccccatcctgcgacacctcaagcagaccaagcctgagtttgaccaggtgctccagggcacggctgccagcacaaagaacaagctgcctggcctcatcacatccatggagaccatcggtgccaaagcgctggaggacttcgcagacaacatcaagaatgacccggacaaggagtacaacatgccgaaggacggcaccgtacacgagctcaccagcaatgccatcctcttcctgcagcagcttttggacttccaggagacggcaggcgccatgctggcctcccaagagaccagctcttcggccaccagctacagctctgagttcagcaagcggctgctaagcacctatatctgtaaagtgctgggcaacctgcagttgaacttgctgagcaagtccaaggtgtacgaggacccagctctgagcgccatcttcctgcacaacaactacaattacatcctcaagtccctggagaagtctgaactgatccagctggtggcagtgacacagaagactgctgagcgctcctaccgggagcacattgagcagcagatccagacctaccagcgcagctggttaaaggtgactgattacatcgcagagaagaatctacctgtgttccagccgggagtcaagctccgggacaaggagcggcagattatcaaggagcgttttaagggcttcaatgatggcctcgaagaactgtgcaaaatccagaaggcctgggctattccagacacagagcagagggacaggattcgccaggcccagaagaccattgtcaaggagacctacggggcctttctacagaagtttggcagcgtgcccttcaccaagaacccggagaagtacatcaagtacggggtggagcaggtgggcgacatgatcgatcgccttttcgacacctctgcctgagcctgctgctagccctgcctggttccaccagactggcgtgtcattggacagataaaccagtgttagcttg

SEQ ID NO: 1108 - DNA, 378 bp, Homo sapiens
  source 1..378: mol_type = genomic DNA
atggccggagctggaccgaccatgctgctacgagaagagaatggctgttgcagtcggcgtcagagcagctccagtgctggggattcggacggagagcgcgaggactcggcggctgagcgcgcccgacagcagctagaggcgctgctcaacaagactatgcgcattcgcatgacagatggacggacactggtcggctgcttcctctgcactgaccgtgactgcaatgtcatcctgggctcggcgcaggagttcctcaagccgtcggattccttctctgccggggagccccgtgtgctgggcctggccatggtacccggacaccacatcgtttccattgaggtgcagagggagagtctgaccgggcctccgtatctctga

SEQ ID NO: 1109 - DNA, 1141 bp, Homo sapiens
  source 1..1141: mol_type = genomic DNA
gcggccgcggagccccacccgctcctactccagtcctctcacgcccactgacttaccctgcgcacgcgcgctgaggctccgtggggccgccgcgggccccgccccgaggtgggagggcctgacgcatccacagctggccaatcggcggatggcctcgcgcgcccgccccctccccctgcccccggcgccgggctccacgtgccagtgtttgtgtacgtgcggccgtggcggggctggacagggtccgggtcgttgaggattaggctgctcgggcgtaaccggagctggggcgcggctgccaagggccggcccggaagtcccagcggtctttaaattctcccgtgctagggccagcctgcgcattcttacctgtcggggtgcggcgagtgtctcacctctctgcacttccaaggactcttgtcatctgccttaggcgggaaatgctgttgctggattgcaaccccgaggtggatggtctgaagcatttgctggagacaggggcctcggtcaacgcacccccggatccctgcaagcagtcgcctgtccacttagccgcaggaagcggccttgcttgctttcttctctggcagctgcaaacgggcgctgacctcaaccagcaggatgttttaggagaagctccactacacaaggcagcaaaagttggaagcctggagtgcctaagcctgcttgtagccagtgatgcccaaattgatttatgtaataagaacgggcaaacagctgaagatctcgcttggtcatgtggatttccagactgtgccaagtttcttacaacaattaaatgtatgcagacaataaaagcaagtgaacaccctgacaggaatgattgtgttgccgtgctcagacagaaacggagtctcggaagtgtagaaaataccagtgggaaaaggaagtgctgatgtcacgtgggttatgaagaagtctgaagaacgccttcatttcatgcaaatctataagctcctgcttttggctttaccatatgttgtgtctaatctccttctgagaaggacgaaaaactttcttccaagtgaagatccatttaagaacacatgtatttacatgcctataatatgctggttgtgtatgctttgtcttttaagttattaaaggaacgtctaaaaaa

SEQ ID NO: 1110 - DNA, 9766 bp, Homo sapiens
  source 1..9766: mol_type = genomic DNA
ggctgaaggcgatccggagtggggccccagcaattcggattgagccttctccctccacccgcttccgtcggccgggcccctcccgcccggccccgcgggcctccccacccggccccggcgctccccaccgccccccctgcgcccgcccctcccccttcgctttccttctccccccgcctcggctccgacatgaggggccggcggggcaggccgcccaagcagcccgcggctcccgctgcggagcgctgcgccccggccccgccgccaccgccgccgccgcccacgtccggacccatcggggggctccgctcgcggcaccgcggcagcagccggggcaggtgggccgccgcccaggctgaggtggcgcccaagacgcggctgagctcgcccagggggggcagcagtagccggaggaagccgccgccgccgccgccggccccccccagcaccagcgccccgggccggggggggcgaggaggcgggggcggcaggacggggggcgggggcggcggcggccacctggcccggaccaccgcggcccggagggccgtcaacaaagtggtgtacgatgaccacgagagcgaggaggaggaggaagaggaggacatggtctccgaggaggaggaggaggaggacggcgacgccgaggagacccaggattctgaggacgacgaggaggatgagatggaagaggacgacgatgactccgattatccggaggagatggaagacgacgacgacgacgccagttactgcacggaaagcagcttcaggagccatagtacctacagcagcactccaggtaggcgaaaaccaagagtacatcggcctcgttctcctatattggaagaaaaagacatcccgccccttgaatttcccaagtcctctgaggatttaatggtgcctaatgagcatataatgaatgtcattgccatttacgaggtactgcggaactttggcactgttttgagattatctccttttcgctttgaggacttttgtgcagctctggtgagccaagagcagtgcacactcatggcagagatgcatgttgtgcttttgaaagcagttctgcgtgaagaagacacttccaatactacctttggacctgctgatctgaaagatagcgttaattccacactgtatttcatagatgggatgacgtggccagaggtgctgcgggtgtactgtgagagtgataaggagtaccatcacgttcttccttaccaagaggcagaggactacccatatggaccagtagagaacaagatcaaagttctacagtttctagtcgatcagtttcttacaacaaatattgctcgagaggaattgatgtctgaaggggtgatacagtatgatgaccattgtagggtttgtcacaaacttggggatttgctttgctgtgagacatgttcagcagtataccatttggaatgtgtgaagccacctcttgaggaggtgccagaggacgagtggcagtgtgaagtctgtgtagcacacaaggtgcctggtgtgactgactgtgttgctgaaatccaaaaaaataaaccatatattcgacatgaacctattggatatgatagaagtcggaggaaatactggttcttgaaccgaagactcataatagaagaagatacagaaaatgaaaatgaaaagaaaatttggtattacagcacaaaggtccaacttgcagaattaattgactgtctagacaaagattattgggaagcagaactctgcaaaattctagaagaaatgcgtgaagaaatccaccgacacatggacataactgaagacctgaccaataaggctcggggcagtaacaaatcctttctggcggcagctaatgaagaaattttggaatccataagagccaaaaagggagacattgataatgttaaaagcccagaagaaacagaaaaagacaagaatgagactgagaatgactctaaagatgctgagaaaaacagagaagaatttgaagaccagtcccttgaaaaagacagtgacgacaaaacaccagatgatgaccctgagcaaggaaaatctgaggagccaacagaagttggggataaaggtaactctgtgtcagcaaatcttggcgacaacacaacaaatgcaacttcagaagagactagtccctctgaagggaggagccctgtggggtgtctctcagaaacccccgatagcagcaacatggcagagaagaaggtggcatctgagctcccccaggatgtgccagaagaacctaacaagacatgtgagagcagtaacactagtgctaccactacctccatccagcctaatctggaaaacagtaacagcagcagtgaactaaattcttcccagagtgaatctgctaaggcagctgatgatcctgaaaatggagaaagagaatctcatacacctgtctctattcaggaagagatagtaggtgatttcaaatcggagaagtccaacggggagctaagtgaatctcctggagctggaaaaggagcatctggctcaactcgaatcatcaccagattgcggaatccagatagcaaacttagtcagctgaagagccagcaggtggcagccgctgcacatgaagcaaataaattatttaaggagggcaaagaggtactggtagttaactctcaaggagaaatttcacggttgagcaccaaaaaggaagtgatcatgaaaggaaatatcaacaattattttaaattgggtcaagaagggaagtatcgcgtctaccacaatcaatactccaccaattcatttgctttgaataagcaccagcacagagaagaccatgataagagaaggcatcttgcacataagttctgtctgactccagcaggagagttcaaatggaacggttctgtccatgggtccaaagttcttaccatatctactctgagactgactatcacccaattagaaaacaacatcccttcatcctttcttcatcccaactgggcatcacatagggcaaattggatcaaggcagttcagatgtgtagcaaacccagagaatttgcattggctttagccattttggagtgtgcagttaaaccagttgtgatgctaccaatatggcgagaatctttaggacataccaggttacaccggatgacatcaattgaaagagaagaaaaggagaaagtcaaaaaaaaagagaagaaacaggaagaagaagaaacgatgcagcaagcgacatgggtaaaatacacatttccagttaagcatcaggtttggaaacaaaaaggtgaagagtacagagtgacaggatatggtggttggagctggattagtaaaactcatgtttataggtttgttcctaaattgccaggcaatactaatgtgaattacagaaagtcgttagaaggaaccaaaaataatatggatgaaaatatggatgagtcagataaaagaaaatgttcacgaagtccaaaaaaaataaaaatagagcctgattctgaaaaagatgaggtaaaaggttcagatgctgcaaaaggagcagaccaaaatgaaatggatatctcaaagattactgagaagaaggaccaagatgtgaaggagctcttagattctgacagtgataaaccctgcaaggaagaaccaatggaagtagacgatgacatgaaaacagagtcacatgtaaattgtcaggagagttctcaagtagatgtggtcaatgttagtgagggttttcatctaaggactagttacaaaaagaaaacaaaatcatccaaactagatggacttcttgaaaggagaattaaacagtttacactggaagaaaaacagcgactcgaaaaaatcaagttggagggtggaattaagggtataggaaagacttctacaaattcttcaaaaaatctctctgaatcaccagtaataacgaaagcaaaagaagggtgtcagagtgactcgatgagacaagaacagagcccaaatgcaaataatgatcaacctgaggacttgattcagggatgttcagaaagtgattcctcagttcttagaatgagtgatcctagtcataccacaaacaaactttatccaaaagatcgagtgttagatgatgtctccattcggagcccagaaacaaaatgtccgaaacaaaattccattgaaaatgacatagaagaaaaagtctctgaccttgccagtagaggccaggaacccagtaagagtaaaacaaaaggaaatgattttttcatcgatgactctaaactagccagtgcagatgatattggtactttgatctgtaagaacaaaaaaccgctcatacaggaggaaagtgacaccattgtttcttcttccaagagtgctttacattcatcagtgcctaaaagtaccaatgacagagatgccacacctctgtcaagagcaatggactttgaaggaaaactgggatgtgactctgaatctaatagcactttggaaaatagttctgataccgtgtctattcaggatagcagtgaagaagatatgattgttcagaatagcaatgaaagcatttctgaacagttcagaactcgagaacaagatgttgaagtcttggagccgttaaagtgtgagttggtttctggtgagtccactggaaactgtgaggacaggctgccggtcaaggggactgaagcaaatggtaaaaaaccaagtcagcagaagaaattagaggagagaccagttaataaatgtagtgatcaaataaagctaaaaaataccactgacaaaaagaataatgaaaatcgagagtctgaaaagaaaggacagagaacaagtacatttcaaataaatggaaaagataataaacccaaaatatatttgaaaggtgaatgcttgaaagaaatttctgagagtagagtagtaagtggtaatgttgaaccaaaggttaataatataaataaaataatccctgagaatgatattaaatcattgactgttaaagaatctgctataaggccattcattaatggtgatgtcatcatggaagattttaatgaaagaaacagctccgaaacaaaatcgcatttgctgagttcttcagatgctgaaggtaactaccgagatagccttgagaccctgccatcaaccaaagagtctgacagtacacagacgaccacaccctcagcatcttgtccagaaagcaattcagttaatcaggtagaagatatggaaatagaaacctcagaagttaagaaagttacttcatcacctattacttctgaagaggaatctaatctcagtaatgactttattgatgaaaatggtctgcccatcaacaaaaatgaaaatgtcaatggagaatctaaaagaaaaaccgtcatcacagaagtcaccacgatgacctccacagtggccacagaatcaaaaactgtgatcaaggtagaaaaaggcgataagcaaactgtggtttcttccacagaaaattgtgcaaaatccactgtcacaaccaccactacaacagtgaccaagctttccacaccctccacaggcggcagtgtggacatcatctctgtaaaggagcagagcaaaaccgtggtcaccacgacagtgacagactccctgaccaccacgggaggcacactggttacatctatgactgtgagcaaagagtattccacacgagacaaagtgaaactgatgaaattttcaagaccaaagaagactcgttcaggtacagctctgccatcctatagaaaatttgttaccaagagcagcaagaagagcatttttgttttgcctaatgatgacttaaaaaagttggcccgaaaaggaggaatccgagaggtcccttattttaattacaatgcaaaacctgctttggatatatggccatatccttctcctagaccgacctttggcatcacttggaggtatagacttcagacagtaaagtccttagctggagtgagcctgatgttacggttactgtgggcaagtttgagatgggatgatatggcggccaaggctcctccaggaggagggactacacggacagaaacatccgaaactgaaatcacaacaacagaaataattaagaggagagatgttggtccttatggcattcgatctgaatattgtatcaggaaaatcatttgtcccattggagttccagaaacaccaaaagaaacgcctacacctcagaggaaaggccttcgatcaagtgcactgcggccaaagagaccagaaacgcccaagcaaactggccctgttattattgaaacctgggtagcagaagaagaactggaattgtgggagatcagggcatttgctgagagagtggagaaagaaaaggcacaagcagttgagcaacaggctaagaaacgactggagcagcagaagccgacagtgattgcaacttccactacttccccaacaagcagtacaaccagcaccatctctccagcacagaaggttatggtggcccccataagtggctcagttacaactggaaccaaaatggtactaactactaaagttggatctccagctacagtaacattccaacaaaacaagaactttcatcaaacctttgctacatgggttaagcaaggccagtcaaattcaggcgttgttcaagtacagcagaaagtcctgggtatcattccatcaagtacaggtaccagtcagcaaacctttacttcattccagcccaggacagcaacagtcacaattaggcccaatacctcaggctctggaggaaccacaagcaattcacaagtaatcacagggcctcagattcgccctggtatgaccgtgattagaacaccactccaacagtcaacactaggaaaggcaattattcgaacacctgtgatggtacagccaggtgctcctcagcaagtgatgactcaaatcatcagggggcagcctgtctccactgcagtctccgcccctaacacggtttcctcaacacctgggcagaaaagcttaacttcagcaacgtccacttcaaatatacagtcttcagcctcacaaccccctcgcccccaacaaggacaagtgaagctcaccatggctcaacttactcagttaacacagggccacggtggcaatcaaggtttgacagtagtaattcaaggacaaggtcaaactactggacagttgcagttgatacctcaaggggtgactgtactcccaggcccaggccagcagctaatgcaagctgcaatgccaaatggtactgttcagcgattcctctttaccccattggcaacaacagccaccacagccagcaccaccaccaccactgtttccacgacagcagcaggtacaggtgaacaaaggcagagtaaactgtcaccccagatgcaggtacatcaagacaaaaccctgccaccagctcagtcatcaagtgtgggtccagcagaagcccagccacagactgctcagccttcagctcagccccagccccaaacccagccccagtccccagctcagcctgaagttcagactcagcctgaagttcagacccaaacaactgtttcatcccatgtcccttctgaagcacaacccacccacgcacagtcatccaagccccaagttgcagcacagtctcagcctcaaagtaatgtccaaggacagtctcctgttcgtgtccaaagtccatcacagactcgaatacgtccatcaactccatcccaactgtctcctggacaacaatcccaggttcagactacaacctcacaaccgattccaattcaaccacatacatctcttcagataccttcccaaggccagccacagtcacaaccccaggtggtgatgaagcataatgctgtaatagaacatttaaaacagaaaaagagcatgactccagctgaaagagaagagaatcaaagaatgattgtctgtaaccaggtgatgaagtatattttggataagatagataaagaagaaaaacaggcagcaaaaaaacggaagcgtgaagagagtgtggagcagaaacgtagcaagcagaatgccactaagctgtcagctctgctcttcaagcacaaagagcagctcagagccgagatcctgaagaagagagcactcctggacaaggatctgcaaattgaagtgcaggaagagctgaagagagacctgaaaattaagaaagaaaaagacctgatgcagttggctcaggccacagcagtagctgcaccctgccccccagtgacaccagctcctccagcccctccagcccctccaccttcacctccccctccacctgctgtgcaacacacaggccttctgtccacgcccaccttacctgctgcttcccagaagaggaagcgggaagaggaaaaagactccagctcaaagtccaagaaaaagaaaatgatctctactacctcaaaggaaactaagaaggacacaaagctttactgtatctgtaaaacgccttatgatgaatctaaattttatattggctgtgatcggtgtcagaattggtaccatgggcgctgcgttggcatcttgcaaagtgaggcagagctcattgatgagtatgtctgtccacagtgccagtcaacagaggatgccatgacagtgctcacgccactaacagagaaggattatgaggggttgaagagggtgctccgttccttacaggcccataagatggcctggcctttccttgaaccagtagaccctaatgatgcaccagattattatggtgttattaaggaacctatggaccttgccaccatggaagaaagagtacaaagacgatattatgaaaagctgacggaatttgtggcagatatgaccaaaatttttgataactgtcgttactacaatccaagtgactccccattttaccagtgtgcagaagttctcgaatcattctttgtacagaaattgaaaggcttcaaagctagcaggtctcataacaacaaactgcagtctacagcttcttaaagttcagcgtgttaacctaacataaaacacagcaagaatctggttgtctgaactattttaaattaaggagccagatgtttttagtcaggctatcctgacaagacttgacctaaacttcgtttttattggtcataacagtccaattatattcttggccaattttgtccaacggacaagaaaaaagcaaagtcaacgacaccattatcttgtcaagatcagatggttttactattgtggcagaagcgagaaaactttgtttattgaaaaaaaaagaaaaagaaagcaagaaaaaaagatactatggggtcaagtgtaactccatggaaatgccacgtctgctcttcagtgaagaagctggtttagagtctcacagaaaacttttgactgtatttatttattgttgcaaaaaagacgcttttttattgctgccctcatttgtcagctaattattttttcttataaaatccagccccggttacatataatcatctgtatcttatcatgattcctgtaggtaaaagtacaagacgacctctagatgtcttttctttctatgaaaggagctgctatgtacacatgtgcacacacacacaactgggaatcaacaatgagtttattgttcatggtagattaaaattaagcttgcataaaggttgggctaagtggtcctggactacagactctgttgccttgaatataacagtacaatttgtcaattactctgcaccaggctaaaatgagtaaaatctatttgaaggtatcttgtttgtaaacatttgtcagattctaatttttttcttttgtattaaaattcaactatggatgtatatgaaacaaaataaatggagataatttttctcccaca

SEQ ID NO: 1111 - DNA, 3121 bp, Homo sapiens
  source 1..3121: mol_type = genomic DNA
atgaacttccaggcgggcggggggcagagcccgcagcagcagcagcagctggccggcgggcccccccagcagttcgcgctctccaactccgcggccatccgggccgagatccagcgcttcgagtccgtgcatcccaatatctacgccatctacgacctgatcgagcgcatcgaggatttggcgctgcagaaccagatccgggagcacgtcatctccatcgaggactcgtttgtgaacagccaggagtggacgctgagccgctccgtaccggagcttaaagtgggcatagtggggaacctgtctagcgggaagtcagccctggtgcaccgctatctgacggggacctatgtccaggaggagtcccctgaaggggggcggtttaagaaggagattgtggtggatggccagagttacctgctgctgatccgagatgaaggaggcccccctgagctccagtttgctgcctgggtggatgcagtggtgtttgtgttcagcctggaggatgaaatcagtttccagacggtgtacaactacttcctgcgtctctgcagcttccgcaacgccagcgaggtgcccatggtgcttgtgggcacgcaggatgccatcagcgctgcgaatccccgggttatcgacgacagcagagcccgcaagctctccacagatctgaagcggtgcacctactatgagacgtgcgcgacctacgggctcaatgtggagcgtgtcttccaggacgtggcccagaaggtagtggccttgcgaaagaagcagcaactggccatcgggccctgcaagtcactgcccaactcgcccagccactcggccgtgtccgccgcctccatcccggccgtgcacatcaaccaggccacgaatggcggcggcagcgccttcagcgactactcgtcctcagtcccctccacccccagcatcagccagcgggagctgcgcatcgagaccatcgctgcctcctccacccccacacccatccgaaagcagtccaagcggcgctccaacatcttcacgtctcggaagggtgctgacctggaccgggagaagaaggctgccgagtgcaaggtggacagcatcgggagcggccgcgccatccccatcaagcaggggatcctgctaaagcggagcggcaagtccctgaacaaggagtggaagaagaagtatgtgacgctctgtgacaacgggctgctcacctatcaccccagcctgcatgattacatgcagaacatccacggcaaggagattgacctgctgcggacaacggtgaaagtgccagggaagcgcctgccccgagccacacctgccacagccccgggcaccagcccccgtgccaacgggctgtccgtggagcggagtaacacacagctgggtgggggcacaggtgccccccactcggccagcagcgcatccctgcactctgagcgccccctcagcagctcggcctgggctggcccgcgccctgaggggctgcaccagcgctcctgctccgtttccagcgccgaccagtggagtgaggccaccacttccctgcccccaggcatgcagcaccctgccagtggcccagctgaggtactcagttccagccccaagctggatcctcccccatctccccactccaaccggaagaagcaccggaggaaaaagagcaccgggaccccccgaccagacggccccagcagtgctactgaagaggcagaggagtcgtttgaatttgtggtggtgtccctcactgggcagacgtggcacttcgaggcttcaacggcggaggagcgggagctgtgggttcagagtgtgcaggcccagatccttgccagcctgcaaggctgccgcagtgccaaggacaagactcgactggggaaccagaacgcagctctggctgtgcaggccgtccgcaccgtccgcggcaacagcttttgtatcgactgcgatgcacccaatccagactgggccagcctgaacctgggtgccctgatgtgcattgagtgctcaggcatccaccgacacctgggggctcacctgtcccgggtgcgctcccttgacctcgatgactggccgcctgagctgctggctgtcatgactgccatgggcaatgccctcgccaacagcgtctgggagggggccttgggtggctactccaagccagggcctgatgcctgcagagaggagaaggaacgctggatacgggccaagtatgaacagaagctcttcctggccccactgccaagctcagatgtgccactggggcagcagctgctccgggccgtggtggaagatgacctgcggctgttggtgatgctcctggcacatggctccaaagaggaggtgaatgagacctatggggacggggacgggcggacggctctacatctctccagtgccatggccaacgttgtcttcacgcagctgctcatctggtacggggtggacgtgaggagccgggacgcccggggcctgactccactggcatatgctcgccgggccggcagccaggagtgtgcagacatcttgatccagcatggctgccctggggagggctgtggcttagcgcctacccccaacagagagcctgccaatggcaccaacccctctgctgagctgcaccgtagtcctagcctcctataaggcccaggaagagggcagaggggccagaaggactccatggcccaaagaccctcctccctgcaggcactgtgggaacagacacagagatggagaagcagggacatgctgagaggacgaagccaaggaaattagggaggagagtcaaagggatcaaggagagttggggatttgagctgcagcagagagggatgagggatttagccctctgccctaaggtgccattgaaaagggacaggacccttcggaggtgcctgtgaggagaggggagcaggacctctccctcctccagatccctgcctcctagtgccagcccctcacacgccttcatcctgaaacaggaagaggacggcaccaagttgggggtgctggatgaaagagacgaggggtgatctgtgagtcccatgtaaactttgtacattggaatatttatgtttgtgtacatatttgatgtgtgtgtgtatgatgagccaataaaccagactgtgtgcgtggc

SEQ ID NO: 1112 - DNA, 2157 bp, Homo sapiens
  source 1..2157: mol_type = genomic DNA
gctgggcctggaacacggagcagtggctgccctgcgaggaggtcctagagcagctccagcaggatggcggctccagcgtctctaaggcctgcagggggtccagccccatggggggcgccctaggcctccgacagctccccatctgtgctcctgcctgccggccatcctcaggccactcgccatgggcggctgcttctccaaacccaaaccagtggagctcaagatcgaggtggtgctgcctgagaaggagcgaggcaaggaggagctgtcggccagtgggaagggcagcccccgggcctaccagggcaatggcacggcccgccacttccacacggaggagcgcctgtccacccctcacccctaccccagccctcaggattgcgtggaggctgctgtctgccacgtcaaggacctcgagaatggccagcgttctgtcccgtggtcgggtgcgctgcccctggcacggcgcctgcttcaacatcagcactggggacctggaggacttccctggcctggacagtctacacaagttccaggtgaagattgagaaggagaaggtgtacgtccgggccagcaagcaggccctacagctgcagcgaaggaccaaggtgatggccaagtgtatctctccaagtgctgggtacagcagtagcaccaatgtgctcattgtgggtgcaggtgcagctggcctggtgtgtgcagagacactgcggcaggagggcttctccgaccggatcgtcctgtgcacgctagaccggcaccttccctacgaccgtcccaagctcagcaagtccctggacacacagcctgagcagctggccctgaggcccaaggagtttttccgagcctatggcatcgaggtgctcaccgaggctcaggtggtcacagtggacgtgagaactaagaaggtcgtgttcaaggatggcttcaagctggagtacagcaagctgctgctggcaccagggagcagccccaagactctgagctgcaaaggcaaagaagtggagaacgtgttcactatccggacgccagaggatgccaatcgcgtggtgaggctggcccgaggccgcaacgtggtcgtcgtgggagccggcttcctggggatggaggtggccgcttacctgacggagaaggcccactctgtgtctgtggtggagctggaggagacgcccttcaggaggttcctgggggagcgcgtgggtcgagccctcatgaagatgtttgagaacaaccgggtgaagttctacatgcagacggaggtgtctgagctgcggggccaggagggaaagctgaaggaggttgtgctgaagagcagcaaggtcgtgcgggctgacgtctgcgtggtgggcattggtgcagtgcccgccacaggcttcctgaggcaaagcggcatcggtttggattcccgaggcttcatccctgtcaacaagatgatgcagaccaatgtcccaggcgtgtttgcagctggcgatgctgtcaccttcccccttgcctggaggaacaaccgcaaagtgaacattccacattggcagatggctcatgctcaggggcgcgtggcagcccagaacatgttggcgcaggaggcggagatgagcactgtgccctacctctggaccgccatgtttggcaagagcctgcgctacgcgggctacggagaaggcttcgacgacgtcatcatccagggggatctggaggagctgaagtttgtggctttttacactaaaggcgacgaggtgatcgccgtggccagcatgaactacgatcccattgtgtccaaggtcgctgaggtgctggcctcaggccgtgccatccggaagcgggaggtggagactggcgacatgtcctggcttacggggaaaggatcctgagctcacatgcagtagacttgggcaggcaaagggggcaccaagggcacaggccaagccttgggggcaggtgccaatctccagtcccaggatcccccagggcagaacctgagccctcccagtgcttgccttcagccacctggctcccctcctgggaggcctctgctggatccagaagatgctcaaccctcaaggcctctgctgccactgacagctggcactggaggcaggacaagccctgcctcttctccctctattgggactggtcccctgaagaaccctgcaacacgtt

SEQ ID NO: 1113 - DNA, 3081 bp, Homo sapiens
  source 1..3081: mol_type = genomic DNA
ctccgccgagctctgccccggcgagacgaggcgcctccgtcgccaagccgcgccgtcgcggggctcccgggagcggcccttagcgaccccgcccgggccccctcagcttacaaaacactacacagcaaaataatgatctgctagactgctaacccgagcatccagcttccacaatgcctgtgcaggcagctcaatggacagaatttctgtcctgtccaatctgctataatgaatttgatgagaatgtgcacaaacccatcagtttaggttgttcacacactgtttgcaagacctgcttgaataaacttcatcgaaaagcttgtccttttgaccagactgccatcaacacagatattgatgtacttcctgtcaacttcgcacttctccagttagttggagcccaggtaccagatcatcagtcaattaagttaagtaatctaggtgagaataaacactatgaggttgcaaagaaatgcgttgaggatttggcactctacttaaaaccactaagtggaggtaaaggtgtagctagcttgaaccagagtgcactgagccgtccaatgcaaaggaaactggtgacacttgtaaactgtcaactggtggaggaagaaggtcgtgtaagagccatgcgagcagctcgttcccttggagaaagaactgtaacagaactgatattacagcaccagaaccctcagcagttgtctgccaatctatgggccgctgtcagggctcgaggatgccagtttttagggccagctatgcaagaagaggccttgaagctggtgttactggcattagaagatggttctgccctctcaaggaaagttctggtactttttgttgtgcagagactagaaccaagatttcctcaggcatcaaaaacaagtattggtcatgttgtgcaactactgtatcgagcttcttgttttaaggttaccaaaagagatgaagactcttccctaatgcagctgaaggaggaatttcggagttatgaagcattacgcagagaacatgatgcccaaattgttcatattgccatggaagcaggactccgtatttcacctgaacagtggtcctctcttttgtatggtgatttggctcataaatcacacatgcagtctatcattgataagctacagtctccagagtcatttgcaaagagtgtccaggaattgacaattgttttgcaacgaacaggtgacccagctaacttaaatagactgaggcctcatttagagcttcttgcaaacatagaccctaatccagacgctgtttcaccaacttgggagcagctggaaaatgcaatggtagctgttaaaacagtagttcatggccttgtggacttcatacaaaattatagtagaaaaggccatgagacccctcagcctcagccaaacagcaaatacaagactagcatgtgccgagatttgcgacagcaagggggttgtccacgaggaacaaattgtacatttgcccattctcaggaagagcttgaaaagtgtaacccccgtggactatatcttcattgttgtctcctttcctcagtggctagcttgggcactgtacataatgagctctacaagcagcagcattgtgatagagagaagataagtgtgtgtgcagtgaaaagagcagaaacatgcttctcttctcagtttttttccccacttgaagtgcctagagaagaggattaaggagtcctaaggaaaaaagatgctgtttgtacccaatcgaactagttctatatacagaatttcacatcaagataatttgggagactccaggaaatacattcagcttgtccatacctgaaatagagctttttagctaaaaggggagcttttgagaaagttcgactaaaaaagtcagagaagaaactgtggtttcattgccattccaccctcaattagtgcccaggctgaaaatccattttcttctttctcataccttcaaacagacttcacattcttcatctgcagtacctagttcagaactttattatattttgccagacttgtaatagtagcagtaaaaataataatagccaaactaggtgtagtggctcatgcctgtattcccagcagtttgggaggcaaaggcaggaggataccttgagtccaggagtttgagaccagcctgggcaacatagtgagacctcacctctacaaaaaaataaacaaaattggctgagcatagtggcatacgcctgtcatcttagctactcaggaggctgaggtgggaggattgcttgaactcgggaggtcaggtctgccgtgaactgagattataccactgtattccaacccgggcagcagagcaagactctgtctcaaaaatataaataaataaaaataataaaataataaatatataaaatatcactcattcaaaaataataataatggcaaaattattggtcacatttttagtgtttcacatggtaatccagttggttttactgcttcagtggctttttatccagtatcttcctatatctcaatctgtcttttccatttccactattttctttttaaaatatgtgtgtctcctttaaattcttaattagttcctcagtacatcacagaatctcatcctgattttatcctctagctctactctgccatttgtatactttgtttttaaggtatattcaattaatcactgttgattactatataaatttcttttactcttcttttcacttgtctatattgtttattccatattgtattattttctctctcctctttatctggataactatttctaatcatactcagatattatcttccctccacagacttccctaggcagtgttaattgcatccttcaccatgctgccatagcactccatacatagtagtttaaaaattatggtatagttagctgggtgtggtggcaagcacctgtaatcccagctgctcgggaggctgaggcgggagaatggcttgaacttgggaggcagaggttgcagtgagccgagatggcgccactatactcctgtgtggacgacagagcaagattccgtctcaaaaaaataaatataaataaataaataaaaattatggtatagttataaaa

SEQ ID NO: 1114 - DNA, 971 bp, Homo sapiens
  source 1..971: mol_type = genomic DNA
gattagggccaacatggccgccgccgccgcttggagctgaagtgccgccgccgccgggcagccacggggaatccgcccgcatcgccgccctcgccggccgggcggccgtggggcccagagcgccggaggccagggctggggcggcaccgcgcagcggccacggggtcccgttagagcagcgcccggcggctatgccgagagcccggagcggccggaggagcagaggggccggcgggagggaggaaacctttctgcgagtacgagccaaccggcagacccgactgaatgctcggattgggaaaatgaaacggaggaagcaagatgaagggcaggtatgtcccctgtgcaaccgccccctggcaggatcggagcaggagatgagtaggcatgtggagcattgcctttctaagagggaaggctcctgcatggctgaggatgatgctgtggacatcgagcatgagaacaacaaccgctttgaggagtatgagtggtgtggacagaagcggatacgggccaccactctcctggaaggtggcttccgaggctctggcttcatcatgtgcagcggcaaagagaacccggacagtgatgctgacttggatgtggatggggatgacactctggagtatgggaagccacaatacacagaggctgatgtcatcccctgcacaggcgaggagcctggtgaagccaaggagagagaggcacttcggggcgcagtcctaaatggcggccctcccagcacgcgcatcacacctgagttctctaaatgggccagtgatgagatgccatccaccagcaatggtgaaagcagcaagcaggaggccatgcagaagacctgcaagaacagcgacatcgagaaaatcaccgaagattcagctgtgaccacgtttgaggctctgaaggctcgggtcagagaacttgaacggcagctatctcgtggggaccgttacaaatgcctcatctgcatg

SEQ ID NO: 1115 - DNA, 2529 bp, Homo sapiens
  source 1..2529: mol_type = genomic DNA
agcgggcgccggacgacctgtggcccaatggcggcggcgcgcgggcacgctgggggccggccagacgggccgacttttccagaagacccggatagttcctcccggccacgccgcgccggctctgggcactcagcatcgtttccttttcctccgctggagcagctatggcggcggtgaagaccctgaaccccaaggccgaggtggcccgagcgcaggcggcgctggcggtcaacatcagcgcagcgcggggtctgcaggacgtgctaaggaccaacctggggcccaagggcaccatgaagatgctcgtttctggcgctggagacatcaaacttactaaagacggcaatgtgctgcttcacgaaatgggccttcatcctagaataatcactgaaggatttgaagctgcaaaggaaaaggcccttcagtttttggaagaagtcaaagtaagcagagagatggacagggaaacacttatagatgtggccagaacatctcttcgtactaaagttcatgctgaacttgcagatgtcttaacagaggctgtagtggactccattttggccattaaaaagcaagatgaacctattgatctcttcatgattgagatcatggagatgaaacataaatctgaaactgatacaagcttaatcagagggcttgttttggaccacggagcacggcatcctgatatgaagaaaagggtggaggatgcatacatcctcacttgtaacgtgtcattagagtatgagaaaacagaagtgaattctggctttttttacaagagtgcagaagagagagaaaaactcgtgaaagctgaaagaaaattcattgaagatagggttaaaaaaataatagaactgaaaaggaaagtctgtggcgattcagataaaggatttgttgttattaatcaaaagggaattgaccccttttccttagatgctctttcaaaagaaggcatagttgctctgcgcagagctaaaaggagaaatatggagaggctgactcttgcttgtggtggggtagccctgaattcttttgacgacctaagtcctgactgcttgggacatgcaggacttgtatatgagtatacattgggagaagagaagtttacctttattgagaaatgtaacaaccctcgttctgtcacattattgatcaaaggaccaaataagcacacactcactcagatcaaagatgcagtgagggacggcttgagggctgtcaaaaatgctattgatgatggctgtgtggttccaggtgctggtgccgtggaagtggcaatggcagaagccctgattaaacataagcccagtgtaaagggcagggcacagcttggagtccaagcatttgctgatgcattgctcattattcccaaggttcttgctcagaactctggttttgaccttcaggaaacattagttaaaattcaagcagaacattcagaatcaggtcagcttgtgggtgtggacctgaacacaggtgagccaatggtggcagcagaagtaggcgtatgggataactattgtgtaaagaaacagcttcttcactcctgcactgtgattgccaccaacattctcttggttgatgagatcatgcgagctggaatgtcttctctgaaaggttgaattgaagcttcctctgtatctgaatcttgaagactgcaaagtgatcctgaggattacagctgtggaatttttgtccaagcttcaaataattttgaaagaaattttcccatatgaaaaaaggagagaacactggcatctgttgaaatttggaagttctgaaattatagtatttttaaaaattgcactgaagtgtatacacataaagcaggtcttttatccagtgaacaggatgttttgctttagcagcagtgacataaaattccatgttagataagcatatgttacttaccttgttattaaatatttcttgaaaagcaaattttaatggtttaattttatgtggacgtatgttaaattatccaactaccctattgttaagcatttggttttaaaatttttatgctaatataaatgctcaagtaatttaaaatattgaaagcatccctgttggtataaatttctgagtaaatgcattggatcagttggactttgaacgcctttgaaatggctttgctaaaatgctcccgccacaaagttgtaggaaatgggaagaggagtcaactagaggcaagggagttgagagagctgcaactgtaaagggcaagaacaggcagaggtaaaaagatgatggaaggtgtggtgactaagggccacggttattgggtgaaatttgagattgtaggccaactgtattttcaagcttctgaacttaggcaaaatattcatcgcaaagtctctagcgtcatatttttctcacccaaattacgtttccacgagattatttatatatagttggtctatctctgcagtccttgaaggtgaagttgtgtgttactaggctgtgttttgggatgtcagcagtggcctgaagtgagttgtgcaataaatgttaagttgaaacctc

SEQ ID NO: 1116 - DNA, 1733 bp, Homo sapiens
  source 1..1733: mol_type = genomic DNA
tggctttgctcctctttctgggaaggggttgcccggctgtgctgccaccatgtcttttcgactttctggtggatccaggaggatctgctcgcgaactgggtctggtaggctgtccggtggaggaacaggcttcgtggctgggaatgtgtgtgttggatcgggagcaagaagcagcttttcttgtactcttgagggcatctcttctggaggaagcttctgcaatagcggtggagggttgggaagtggtgcctgtgctggttttcttggcaatgagcacagcctcctctctgggaatgaaaaggtgaccatgcagaatctcaacgaccgcctggcatcctacctggaccatgtgcatgctctagaggaggccaacgcagacctggagcagaagatcaagggctggtacgagaaatgtgagcctggctcttcccgggaacacgatcatgactatagcagatacttctcagtcatagaagatcttaaaaggcagattatttctgcgaccatctgcaatgccagcattgttctacaaaatgacaatgccagactgaccgctgatgacttcaggctgaagtatgaaaatgagctggctctgcaccacagtgttgaggccgacaccagtggtcttcgcagagtgttggatgaactgaccctttgtacaaccgacctggagatacagtgtgagaccctcagtgaggaattgacctacctcaaaaaaagtcatgaggaggaaatggaagtcttgcaatatacagctggggggaacgtgaacgtggagatgaatgcaaccccaggagtggacctaactgtcctgttgaacaacatgagggctgagtatgaggacttggctgagcagaaccgcaaagatgctgaagcctggttcaacgagaggagtgcaacgctgcaacaacagatttccgatcatgagggagcagccacagcagccagaaatgagctgaccgaattaaaacgcaatctgcaaaccctggaaatagaacttcagtccctcatggctgtgaaacattcctatgaatgctccttggctgagactgaaggaaattactgcaatcaactccagcaaattcaggatcagataggggtgatggaggaacaactgcaacagattcgaacagaaacagaaggccagaagctggagtatgaacagcttcttgatgtaaaaatatttttagaaaaagaaattgacatttattgcaacttactagatggagaagaaagaaaaagcaaatccacatgttacaaatcaaaaggatacaggcctgtgaattctggaaatcaagccaaagactcaacagaagaaactattgttaaaacagtggttgaggaactggatcaaattggcaatctcctttcactgagagtccactcagttgaagaaaagtcctctaaaataagcaacattacagtagagcaacgagtaccttctaaagcaccataatgaggaaaaagttatttggaaagaaagaaagaaagagagagagagagaaagaaagaaagaaaggctgcctttgcaaaaatcctactggtcaaataacctaaggaaattattcatttctgttcttaaaagggctagaatttgttctccttctcttccttttctcatgttctatgcatgtaatccttttccagagtagaaaaatcctgctctgtccctaatttttgtttttattttgggggccttttttgacatttcattaaaaattcttctattgcaa

SEQ ID NO: 1117 - DNA, 4290 bp, Homo sapiens
  source 1..4290: mol_type = genomic DNA
ttccggcttccccgccccgccccgtccccgggcgtctccattttggtctcaggtgtggactcggcaagaaccagcgcaagagggaagcagagttatagctaccccggccgcggagccggctcactgcactacccccgcccccttctttcctccagacgccgaagtcgcgggcgctcatggcgggcctggaggtactgttcgcatcggcagcgccggccatcacctgcaggcaggacgcgctcgtctgcttcttgcattgggaagtggtgacacacggttacttcggcttgggtgtcggtgaccagccgggtcccaatgataagaagtcagaactgctgccagctgggtggaacaacaataaagacctgtatgtcctccggtatgagtataaggatgggtccagaaagctccttgtgaaagccatcaccgtggagagcagcatgatcctcaatgtgctggaatatggctcacagcaagtggcagacttgaccctgaacttggatgattatatcgatgcagaacacctgggtgacttccacaggacctacaagaacagtgaggagcttcggtctcgtattgtgtctggaatcatcacacctatccatgagcagtgggaaaaggctaatgtaagcagtccccaccgggagttcccccctgctaccgccagagaggtggacccactccggattcctccacaccacccacacaccagtcggcagcctccctggtgtgatcccctgggcccgtttgttgtcgggggagaagacttagacccttttgggcctcggagaggtggcatgattgtggatcccctgagatctggcttcccaagagcacttattgacccttcctcaggcctcccgaaccgacttcctccaggcgctgtgcccccaggagctcgctttgacccctttggacccattgggaccagcccacccggacctaacccagaccatctccccccgccgggctacgatgacatgtacctgtgaaggcctcaagaatgtaacatcccaggcttccctccattctcctggagctgccaccgctgtccccatcagcaaccatgttcttgcaggctgggggcaagggattctgctcatgtgtttgcagaccggctgggatagcctccccaccccttatcagagccaagacacctgctgcagctctccacctagctgcagatagctcccaaagagaaatcagtgtgtctctttcaccatcagctcctcccctttcaccaccagctcctctccacttcccaagggagactccggcaaccttcagcaacatatatcctcgaccagatgcagtgctataagaacagaacgcattttggatgttattattaagaaccaaatgtcaatacagaattcatgttgccggtttcccacttttctttttacattaatgcatagctgcttccatttatgagactttagagtttgagtttctgtagggctgaatgactctttttcctgcccagggcccattcttgcttctcaggcaccttccgtttattaattgccattgctcctgacatcactaagatgggtccccttctggctgcatgaatggaaatgagtgactggaaatcccataggccacaagaatgactttcacaagggcaggaacattgtggaaagactgcatcattctgatgaggcaaaatcctccagctattcctgtctgggccagttttgtaggtccatctgtgcatgggcagcagtagtcaaaaagccaaggaaaaaacagagcagacctgaaggctaatcttatttttgccactaacttagtgaatgaccctaagcaagttccttctcctcttagggccttgtgccaagcctatgaaattggaggtggctttcctgctctaaagcattttgatgtctcattctgtgtttggtaacccctataaactggggcagaggaaaagaatgatggttcaaggccatacttcccttgaaccttgtgtggttcttgcctaactctgtggtttttggaccccatggggcccagacagagcacaggagcatgggctgcctctgagtgtggtgttgaacttcgggaggagcagggagccctgcaccttgtgtcctggcccacctgacctttggtgttctccggatccttttcagcccgaggcctgacagacgcgggcagtgatgagccctgttctggagtggaaagagcacgatagagcaccaggctaagaggcacgagatcaaggcggtagtcacttccgctctgcagctagcatttcaaccatatgtggatcctttcatttctcagctccctggattccttcccctaaattaggacctattatttacctgtaggtaagcaagctactgtagctcttctgaggtatctgccaggctgttttctgtagcctcagattgcctatctgcttagcctgagaacaggtagatgaaaactaaactgatgcctaggcccagggtcagtctcagatggaagctgggcctgggtggggaggctagcatgcgtggctccctgggtatttctgtcagtccccatggcaagcagtgatttagtaaaacaccccagagtcagggaagccaaccaccttgaaacctttagaacatctctgctttggagaaagacccagagatcaggcagaggtgcagattcaatcattactcataacctttgagagatggcaaatgggaggagtgttagtctttgttttggaattggaccattcttgcaaccaaaaggacttagagcagtttgctcataaagacatcctttattataaaaggaagtatttaaaggatgatagagaccatcagatagaagcagggaaggtagataacttttaggaccttgatgtgaggaaaagataaaatttaaacaataaatttgccacttagattttctagcagcaaagtccgaaaagatagttatatacaaaattctgttttctgaaaacaaaattgtgattcaccttcagaattggccattttttttgtgagtttccttgcatcaaggacactgagaaacacagtcattgtcttaggtgttctatgggaggaagtgaatagagcctttaggaacttcctggtcaagcttatggtgcttattttgatctgggccacttccctccttccagtcatgagtaatcatcaaggagcaagttggagtgtttcaggtgtatattttgtagaacccaaaagattggagccttaacaataaacatcagcactaagtgacctgttcctccttttttaaatagcagctttattgagatataatttacatacccataatttacatacctgtttaaagtatacaattcagtggatttagtatgttcacagtgttgcacatccaccaccatttctaattcctgaacattttcaccacctcaaaaagaaaccacacacccattggcatgactccccattcccttgctcccagccccaggcaaccactaacatctgtctctaaagattttttttttttttctggacagttctcataagtggaatcactcagtattatggccttttgtgtctggcttctttcatttcatgtgatgttttcaagattcattcatgctgtagcatgtatccatggtatggatatatcacattttgcttatccttttatcagttgatggacagttgggttgtttctacaaaaaggctattatgagtaatgcagccaagaacatttgtgtaccagtttttgagttttcagttgtttgagtttcagatgttttcagttcatttgggtatataccaaggagtggaattgctggttcacatggtagctctatattctactttgtgaggaattgtcagactgttttccacggaagctgcaccattttacatttccactggtaatttatgagggttccagtttccccacatcttcaccaactcttgttatttttcatgcttatggccatcctagttagcgtgaagtagcatctcattgtggtcttctcttccattttttaaaaaagaattttgacctacaccaagcaaggcagagaccagagtcagtcccccttggggagcaatctgtggttttgataatcaccaccttgggatgaacatggctggtgagctgcagagcagttgatttgacttttggggatggttctaggctggatgtgatacagggcaggttttgtctctagagaaagttctcatgaccttcaggtctaatgagattcagatcatcactttggtttggtttgaaatttctttgtttatccagtgaattacaagtagaataaagatctggttctaaattgtc

SEQ ID NO: 1118 - DNA, 753 bp, Homo sapiens
  source 1..753: mol_type = genomic DNA
atgagtgagaacgccgcaccagacttttattacgttgccatggatttcggaggtcatgggctctcgtcccattacagcccaggtgtcccatattacctccagacttttgtgagtgagatccgaagagttgtggcaggtggcgtcgtgggcggaatgtttttctgtaccttccccgagatggtggataaacttatcttgctggacacgccgctctttctcctggaatcagatgaaatggagaacttgctgacctacaagcggagagccatagagcacgtgctgcaggtagaggcctcccaggagccctcgcacgtgttcagcctgaagcagctgctgcagaggttactgaagagcaatagccacttgagtgaggagtgcggggagcttctcctgcaaagaggaaccacgaaggtggccacaggtctggttctgaacagagaccagaggctcgcctgggcagagaacagcattgacttcatcagcagggagctgtgtgcgcattccatcaggaagctgcaggcccatgtcctgttgatcaaagcagtccacggatattttgattcaagacagaattactctgagaaggagtccctgtcgttcatgatagacacgatgaaatccaccctcaaagagcagttccagtttgtggaagtcccaggcaatcactgtgtccacatgagcgaaccccagcacgtggccagtatcatcagctccttcttacagtgcacacacatgctcccagcccagctgtag

SEQ ID NO: 1119 - DNA, 701 bp, Homo sapiens
  source 1..701: mol_type = genomic DNA
gaggtaaaggccgcgcttgggtgtccctgggtggtcgggtccccgagttgggaggggcggaaggctgaacctccagcttgagccggacaagccgattcccagcgttgagagggtagagatgaactgtgtgtgaggccaaactggatcggtcaacatggtcttccccctccccactccccaggagcccatcatggcgacgccccctaagcggcgggcggtggaggccacgggggagaaagtgctgcgctacgagaccttcatcagtgacgtgctgcagcgggacttgcgaaaggtgctggaccatcgagacaaggtatatgagcagctggccaaataccttcaactgagaaatgtcattgagcgactccaggaagctaagcactcggagttatatatgcaggtggatttgggctgtaacttcttcgttgacacagtggtcccagatacttcacgcatctatgtggccctgggatatggttttttcctggagttgacactggcagaagctctcaagttcattgatcgtaagagctctctcctcacagagctcagcaacagcctcaccaaggactccatgaatatcaaagcccatatccacatgttgctagaggggcttagagaactacaaggcctgcagaatttcccagagaagcctcaccattgacttcttccccccatcctcagacattaaagagcctgaa

SEQ ID NO: 1120 - DNA, 4114 bp, Homo sapiens
  source 1..4114: mol_type = genomic DNA
aggcaaagccatgactacagtagtggtacatgtggactccaaagctgagctcactaccctgctggagcagtgggaaaaggaacatggcagtgggcaggacatggtacctatccttaccaggatgtctcaattgattgaaaaagaaactgaagagtatcgtaaaggggatccagacccatttgatgatcgacatcctggtcgagctgatccagagtgtatgctgggccacttgctgagaatactcttcaagaatgatgatttcatgaatgcactggtgaatgcatatgtgatgacaagccgagagccccctttaaacactgcagcttgcagactcctattagacatcatgccagggctggaaactgctgtcgtctttcaagaaaaggagggaattgtcgagaatcttttcaaatgggcccgagaggccgatcaaccattgaggacatattctactggactgttaggaggtgctatggaaaatcaagacattgctgccaactatagagatgaaaattcacagctggtggcaatagtgcttcgaagactgagggagctacagctacaggaagtggctttgcggcaggaaaacaagcgtcccagtccacggaagctctcttctgaaccccttttgcctctggatgaggaggctgtggatatggactatggtgacatggctgtagatgatgctgaaattcagaagtcagcacttcagattatcatcaattgtgtgtgtggcccagataaccgaatatccagtattggtaaatttatctctggtactcctcggagaaagctgcctcagaaccctaaaagcagtgagcacaccctggccaagatgtggaatgtggttcagtccaacaacggcatcaaggtgctcctgtccttactgtccattaagatgcccatcacagatgcagaccaaatccgggccctggcctgcaaagccctagtgggcctgtctcgcagtagcactgtccggcagatcatcagtaaactgccccttttcagcagctgccagatccagcagctgatgaaggagcctgtgctgcaggacaagcgcagtgaccatgtcaagttctgcaagtatgctgctgaactcattgaacgggtgtcaggaaaaccacttctcattggcactgatgtttccctagcacgactgcagaaagcagatgttgttgcccagtcaaggatctccttccctgagaaagagctgcttttgttgatacgaaaccatcttatttctaaagggcttggagaaacagcaaccgtgctgacaaaagaggctgacctgcccatgactgctgcctcccattcttctgcctttaccccagtcactgctgctgcttctcctgtctctctaccccgaacccctcgtatcgctaatggcattgcaactcgtctgggcagccatgctgctgtgggtgcctctgcgccttctgcccctactgctcatcctcagccacggcccccccagggtccgctagctctgcccggcccatcttatgcaggcaactcccctttgattggtagaatcagttttatcagagagaggccatcaccctgcaatggcaggaaaatcagagtgttgcggcagaagtcggaccatggtgcctacagccaaagcccagccataaaaaaacagctggacagacatcttccttccccacctacgctggacagtataatcacagagtatcttagagaacaacatgctcgctgcaagaatccagttgccacctgcccacctttctccctctttactcctcaccaatgtcctgagccaaaacagaggcggcaagcgccaataaactttacgtcaaggctaaaccgcagggcatcatttccaaagtatggaggggtggatggcggatgctttgataggcaccttatctttagcagattccgtcctatttcagtgttccgggaagccaatgaagatgagagtggcttcacctgctgtgcattctcagcacgggagcggttcctgatgcttggcacctgcacagggcagctgaagctctataatgtgtttagtggacaggaggaggccagctataactgtcacaactcagccatcacacatcttgaaccttccagggatgggtccttgctgctgacatctgctacttggagccagcctttgtctgcactttggggaatgaagtcagtatttgatatgaagcattccttcacagaagatcactatgttgagttcagtaagcactcccaggatcgggtcatcggcacaaaaggagacattgcccacatttatgatattcagactggcaacaagctgttgactctgtttaacccagatcttgccaacaactacaagaggaactgtgccacctttaatcctacagatgatcttgtcttaaatgatggcgtcctctgggatgtccgctctgcacaggccatccacaagtttgacaagttcaatatgaacatcagtggtgttttccatccaaatggactggaggtgatcattaatactgagatttgggaccttcgaacttttcatcttttgcatactgttcccgctctggatcagtgtcgcgtggtgttcaatcacacgggaacagtgatgtatggagctatgttgcaggcagatgatgaagatgacttaatggaagagaggatgaaaagcccctttgggtcatccttccgaacatttaatgcaactgactacaaacctatagcaaccattgatgtgaaacggaacatctttgacctgtgtacagacaccaaagactgctatcttgctgtcattgagaatcaaggcagcatggatgccctgaacatggacacagtatgcaggctgtatgaagtgggcaggcagcgtctggcagaggatgaggatgaagaggaggaccaggaagaggaagaacaggaggaagaagatgatgatgaagatgatgatgacaccgatgatttagatgagcttgacactgaccagttgctggaggcggagttggaggaggacgacaataatgagaacgcaggggaagatggggacaatgacttctctccctctgatgaggagctagcaaaccttctagaggagggagaggacggggaggatgaagactctgatgcagatgaggaggtggaactgatcctgggggacactgacagctctgacaactctgatttggaagatgacatcatcttatctctgaatgagtgaggagccatcactgcttggaagagattcttggcaggcgagaaactgagtcaaatgaattcagaacatattcccttctctttctcccagggctgtctgtcttttaaggagctgcatgccctgcattcagaagattatggcttagagagcctcattggcacccgagggtccttccagaatcaataaccaccacaaaaatgacaacagggactaggccctactctgcaccccccacatccaccccccaccatttcctaggatggacatatctttcaaggggaaaaaaaaaccatgtctctggggtatttcacaatatattttctttgtatagtgttctttacttaaagaacaagaaatagttttttataaaactttaaaaaggaaaaaaaaacaggcatttataactgagggtatgaacttatatccaccaggtctcttgtccctgcacttcattttctttggaagaaaatgatgtctaaagaacaatatagaggcatttttacatacgtatttaaatgaaaaggaaaatcgtggtttcttaaattgataaggattaagaatattttattataaatataatatatgattttttaacctgttttgttgcctcatatgctgtcaggttaatttgttttccttcgtgccagaggtggggaggaaggcactctgtctgctgggtaaatgcctaaattcactcaccttcatggtttgggggcagcatggtcattgtggatattggttttgtggagttgagggaacttaggatataagttcactccctctatttttctttgtgattcagtttttcaaaaatctttttttcttccctttctccccattgtggaaattacaaatcaaaggcctttttctttaatgtaaagtgtatttatttaaaaaaaatacaaaataaactacaagtctgtctttgtt

SEQ ID NO: 1121 - DNA, 3610 bp, Homo sapiens
  source 1..3610: mol_type = genomic DNA
ctgcagggtatctggcctaggccccgcccctccccgcccagcgccccgcccctgcaacgtgtaggcctcggctccaacgaggccccatggctccgtccccgccccatcgccccgcccctcccgggagccctgtcttctgccgtgcgctgagtgtccgcgtcgccctcgccgcagtcgcgggcaccccgctcggcgtcggtgcctgagggaggccgcgatggcggccgaggccctggcggcggaggccgtggcgtcgcgcctggagcggcaggaggaggacatccgctggctgtggtcggaggtcgagcgcctgagggacgagcagctgaacgcgccctacagctgccaggcggaggggccgtgcctcacgcgggaggtggcgcagctccgggccgagaactgcgacctgcgccaccgcctgtgcagcctgcggctgtgcctcgccgaggagcggagccgccaggccacgctggagagcgcggagctagaggcggcgcaggaggccggcgcacagcctcctcctagtcaaagccaagacaaggacatgaaaaagaagaaaatgaaggaaagcgaggctgacagcgaggtgaagcatcaaccaattttcataaaagaaagattgaagctttttgaaatactgaagaaagaccatcagctcttacttgccatttatggaaaaaagggggatacaagcaacatcatcacagtaagagtggctgatgggcaaacagtgcaaggggaagtctggaaaacaacgccttaccaagtggctgctgaaattagtcaggaactggctgaaagcacggtaatagccaaagtcaatggtgaactgtgggacctggaccgcccattggaaggggactcttctctagagctgcttacatttgataatgaggaagctcaagctgtgtactggcactccagtgctcacattcttggggaggccatggagctttactatggaggccacctgtgctacggtccgcccattgaaaatggattttattatgacatgttcattgaagacagagcagtgtccagcacagaattgtcagccctggagaatatatgtaaagccatcataaaagaaaagcaaccttttgaaagactagaagtcagcaaggaaatcctcctggaaatgtttaagtacaataaatttaaatgccgcattctgaatgagaaagttaacactgcaactaccaccgtgtacaggtgcggtccattaattgacctttgcaaaggtccacatgtaagacacactggaaaaattaaaaccatcaaaatttttaagaattcctcaacatattgggagggcaatccggaaatggaaacattgcagaggatctatggaatatcctttcctgataacaagatgatgagagactgggaaaagttccaagaggaagcaaagaaccgagatcacaggaagatcgggaaggaacaagaacttttctttttccacgatttgagtcctggaagctgttttttccttcccagaggagccttcatttataatacgcttacagatttcatacgagaggaatatcacaaacgggacttcacggaggtgctctctcccaatatgtacaacagtaaactctgggaagcctcaggccactggcagcattacagcgagaacatgtttacctttgagattgaaaaggacacttttgccctcaaacccatgaattgtccagggcactgtctaatgtttgcccatcgtccacgatcttggagggaaatgcctattagatttgctgattttggagttctgcatagaaatgaactgtcggggactctcagcggcttgaccagagtgaggcgcttccagcaggacgatgctcacattttttgcacagtggagcagattgaagaagaaataaaggggtgtttgcagtttttgcaatctgtttactcaacatttggcttctcctttcaattaaacctgtcaacaaggccggaaaacttcctaggagagattgagatgtggaatgaggctgagaagcaactgcagaacagcttgatggactttggagaaccgtggaaaatgaacccaggagatggagcattttatggccctaaaattgacataaaaatcaaggatgctattggcagataccatcaatgtgctacaattcagctggacttccaactgcctattagatttaatctcacatatgttagtaaggatggggatgataagaagagacctgtgatcattcatcgagccattttgggatcagtggaaagaatgatagccattctttcagaaaactatggcggaaaatggcctttctggctatctcctcgtcaggtgatggtcatccctgtggggccaacttgtgaaaaatatgcacttcaggtatccagtgaattttttgaagaaggatttatggctgacgttgacttggatcacagttgtacactaaataagaaaatacgaaatgcacagctggctcagtataattttattttggtggttggagaaaaggaaaagatagataatgctgtaaacgtgcgaacaagagacaacaaaattcatggagagattttagtaacttctgccattgataaactgaagaatctcaggaagacacggacactcaatgctgaggaggccttttgaagtccttccctgatatttgcttctgtgtaactttgttttgacccttaaaaatgtatttttcttaacatgttagtacttctacgactttggagccactgatgggtccactcatggcctcagctgagaaaggagacgatgaacgtgtagctgacatgcacgaagtttaatttactcatgtccacgggggacgtttagagggcacgtgggaaattttccagcaatcaatgccttgagaaacttaaatggggaaatattattcatcgagaaagtgaaacaaaacactaggaaatgattatgaaatgttagtgattttcaaaagatgggcttcaaataaaagtctgcagagttttttttaaataggagggaaaatcttattttctaatatgtctcaggtatttttatgacttctactaaaattcacactgaaactttatcttctaaactggaatcattacttaattttaactaaccaacaaccacaaaagcagcagctactgctaaatattggattactgacaaaggaattcagttttgtggaatctggtgtttgcactataggttaagagttgccatttaaatgtttcttattcataattaggttttgttccgctttagaaaaaaataaattcccaaatgaattgcatcagtgtttccagcgtttcagctgtgggcttctaccaccactaagccgctcacctagagttgttacttttttgatgggatgacattccatggatttatgtactgaaatggatttcagattttaaagagaggaatgctctacgtgctcagaactgaattaaaatggcattatgtcaatagagaattcagctaccaaacaagaagtattgtttattttgcgatatgctgtgaaattcaaaagaaatgtaagaaataatctcttttcaatatactgatcatttagttaacttcctgagggatgtgaacagtgaaacagttggcaaacaaaacaatatatatcag

SEQ ID NO: 1122 - DNA, 2492 bp, Homo sapiens
  source 1..2492: mol_type = genomic DNA
gcgggcaggcgactcctgtcccgggtggaggcggcggagccggagccgggggagggggcagcggctgtctcacggaccacggcggcgcccgcagctcctcaccgcagcacccccactgcaggcccgaggagctttccggagcttcccacactcctggggagaagacttcttagccagcttgatgtttaaaattcagctggagcccttaaaacttcgagcgtggacgctgaatgggtttgtaaagtttcgaaacaaggagaccagtgctggtccagtggctgtgatgggaaaagattattacaagattcttgggatcccatcgggggccaacgaggatgagatcaagaaagcctaccggaagatggccttgaagtaccacccagacaagaataaagaacccaacgctgaggagaagtttaaggagattgcagaggcctatgatgtgctaagtgaccccaagaaacggggcctgtatgaccagtatggggaggaaggcctgaagaccggcggtggcacatcaggtggctccagtggctcctttcactacacctttcatggggacccccatgccacctttgcctccttctttggtggctccaaccccttcgatatcttctttgccagcagccgctccactcggcccttcagtggctttgacccagatgacatggatgtggatgaagatgaggacccatttggcgctttcggccgttttggcttcaatgggctgagtaggggtccaaggcgagccccagaaccactgtaccctcggcgcaaggtgcaggaccccccagtggtgcacgagctgcgggtgtccctggaggagatctaccatggctccaccaagcgcatgaagatcacaaggcgtcgcctcaaccctgatgggcgaactgtgcgcaccgaggacaagatcctgcacatagtcatcaagcgtggctggaaggaaggcaccaagatcaccttccccaaagaaggcgacgccacacctgacaacatccctgctgacatcgtctttgtgctcaaagacaagccccatgcacacttccgccgagatggcaccaacgtgctctacagtgccctgatcagcctcaaggaggcgctgtgtggctgcactgtgaacattcccactatcgacggccgagtgatccctttgccctgcaatgatgtcatcaagccaggcaccgtgaagagactccgtggggagggccttcccttccccaaagtgccaactcagcgaggagacctcattgttgagttcaaagttcgcttcccagacagattaacaccacagacaagacagatccttaagcagcacctaccctgttcctaggctctgccccagccagtccagagcctaccacagcaatacccccaacactcactccactcaatgtgcacccagcttgatgtccactggacactggcaactttttctaaaatgcaaaaaaaagccactggttttcaggaaaatgttcctgtccctgaccccttttagagctgggctgcctggggggagtgggagggaggtggggagagctagcccaggccaggggtcaatgttcatgtcactagctttcaatccagtttccactgcagtggctggagagtgacctgagtgctacttgaagatatgtagagattccttatccatgcctgtacatagcatgtcctcctcccctcagctttgctaataccagtcccctcccttccctttggcttcctgctgttgggggtggaaaagactagaaaggacattgctttctcagccccacccccaggtccacagtgtccaaggtaatggcacacatattcatgcacaagaagcactcacctagagctgtctgtgcctctctgggagaaaggagagaggataagaagggaaagttcacaacctgtgaacagggacttgagcacgagacacttttcatctggagcaggggggtgagctcctcagcagcctccgtaacagctgccctgcctacacctgcagagctggaggttctgtcctccctgctgctctcaggagtgttcaagggtggagggcagggaatggggcctgaggtattaaggctaagaggtgggggacagggcccatctaccagccttcatcaggaagggaaagggctttggggtcaggtggcagctattccccaccaagagattcagggtcacaggtttttccccacacctctgaactcagggcctagccacccccaaacttccaaatcccacttttgtgatatgtgaagctactcatttcttacccttggaggctgtgtggggaatttccagcccttttatgcctgtgtgatcccaccccacccccatagttgtataaaggtcatagtgaagaagctgggggaagactgcttcagccagatcctggggtggggtctttaggttttctcactttgacaacccccgaatgtttttatagtagtttttttgtatttttttgtaatgacagtattatgtaaaaaataaagtatttt

SEQ ID NO: 1123 - DNA, 1627 bp, Homo sapiens
  source 1..1627: mol_type = genomic DNA
agtgcgttacttacctcgactcttagcttgtcggggacggtaaccgggacccggtgtctgctcctgtcgccttcgcctcctaatccctagccactatgcgtgagtgcatctccatccacgttggccaggctggtgtccagattggcaatgcctgctgggagctctactgcctggaacacggcatccagcccgatggccagatgccaagtgacaagaccattgggggaggagatgactccttcaacaccttcttcagtgagacgggcgctggcaagcacgtgccccgggctgtgtttgtagacttggaacccacagtcattgatgaagttcgcactggcacctaccgccagctcttccaccctgagcagctcatcacaggcaaggaagatgctgccaataactatgcccgagggcactacaccattggcaaggagatcattgaccttgtgttggaccgaattcgcaagctggctgaccagtgcaccggtcttcagggcttcttggttttccacagctttggtgggggaactggttctgggttcacctccctgctcatggaacgtctctcagttgattatggcaagaagtccaagctggagttctccatttacccagcaccccaggtttccacagctgtagttgagccctacaactccatcctcaccacccacaccaccctggagcactctgattgtgccttcatggtagacaatgaggccatctatgacatctgtcgtagaaacctcgatatcgagcgcccaacctacactaaccttaaccgccttattagccagattgtgtcctccatcactgcttccctgagatttgatggagccctgaatgttgacctgacagaattccagaccaacctggtgccctacccccgcatccacttccctctggccacatatgcccctgtcatctctgctgagaaagcctaccatgaacagctttctgtagcagagatcaccaatgcttgctttgagccagccaaccagatggtgaaatgtgaccctcgccatggtaaatacatggcttgctgcctgttgtaccgtggtgacgtggttcccaaagatgtcaatgctgccattgccaccatcaaaaccaagcgcagcatccagtttgtggattggtgccccactggcttcaaggttggcatcaactaccagcctcccactgtggtgcctggtggagacctggccaaggtacagagagctgtgtgcatgctgagcaacaccacagccattgctgaggcctgggctcgcctggaccacaagtttgacctgatgtatgccaagcgtgcctttgttcactggtacgtgggtgaggggatggaggaaggcgagttttcagaggcccgtgaagatatggctgcccttgagaaggattatgaggaggttggtgtggattctgttgaaggagagggtgaggaagaaggagaggaatactaattatccattccttttggccctgcagcatgtcatgctcccagaatttcagcttcagcttaactgacagacgttaaagctttctggttagattgttttcacttggtgatcatgtcttttccatgtgtacctgtaatatttttccatcatatctcaaagtaaagtcattaacatcaaaa

SEQ ID NO: 1124 - DNA, 439 bp, Homo sapiens
  source 1..439: mol_type = genomic DNA
cacagcccgcggccccgagcctgagcagatgggcctggcaccctgctgcacccaggcactgtgtggcctggccctgcggcatcacagccacctgcagcagatcagactggagttccatagactttctgaagaaaacactttgttgaaaaacgatctgggaagggttcggcaagagcttgaagctgcagaaagtactcacgatgcacagaggaaggaaattgaggttttaaagaaagacaaggaaaaggcctgctctgagatggaggtgctcaacagacagaatcagaactacaaggatcaattatcccagctcaatgtcagggttcttcaactgggacaggaggcttctacccaccaggcccaaaacgaggagcatcgtgtgaccattcagatgttaacacagagcctggaggaggtggttcgcagtgggcagcagcag

SEQ ID NO: 1125 - DNA, 7018 bp, Homo sapiens
  source 1..7018: mol_type = genomic DNA
gaggccggcgcgctggcgggcgaggagcggcggcggtggcggccgctggacatgggaaagcggaaccaccaaaaggagtgatgatcaacgatctcatgataaatctggatgctagttctcatgcctcaggacatcctactgggaacgacacaccagctcctgggatcagactttcatctacttaggacccctctttgcccagactactaaagccagtcttcactagccacgaatggctacccaaaggaaacacttggtgaaagattttaatccttacattacctgctatatctgtaaagggtatctgatcaagccaacaacagtgacggaatgcctccatacattctgtaagacttgtattgttcagcactttgaagatagcaatgattgcccaaggtgtggcaaccaagttcatgagacaaatccattagaaatgttgaggttggacaatacattagaggaaattatatttaagctggtccctggactacgagaacaagaacttgagcgtgaatctgaattttggaagaaaaataagcctcaagaaaatggacaagatgatacttcaaaagctgacaaaccgaaagtagatgaagaaggtgatgaaaatgaagatgataaagattatcacagaagtgacccacaaattgctatctgtctagattgtttacgaaataatgggcaatcaggggacaatgtagtaaagggtttaatgaagaaattcattcgatgttctacacgtgtaactgtgggaactattaaaaaatttctaagtttaaaactaaaacttccaagttcttatgagttggatgtgctgtgcaatggtgaaattatggggaaggatcatactatggaattcatctacatgacaagatggcgactaagaggcgaaaactttcggtgtctgaactgctcagcttcgcaagtctgctctcaggatggccctttgtatcagtcataccctatggtactgcagtatcgaccaagaattgatttcggttagaccaaggggcccagacctcactgagatgaatcctgcactatttgtttactcgtcaacagattgcacagttaacggtgtgtggactagaggaacacaaccagattttcagcatgcaaataaggccattgtctatctctaaattgtcagttgcattcatgttgtttctattaggagcaaaccaagtgccattctgctactgaaccatctgcataaggtatttgtgttgtctcaaagtgtgcaagtcatggtaaaaatcagttagctgtgccgccatgattcacccttctgaatattttgcttgcctgttccaagattgttctaatgtttaattacactagtaaaatggctcaatttttgtggtgttgcagttttcacatacttactcttttattcttgtttaaatagcgtactctacaagaaactaataattatatcttgaaattattttgtatggaagtatatttagaaaagtggtttttgagccactgtcttgttcttgataagctttttgtgtgaaaaaaagttcattcttgagtgtgcaagtccttttgccaagaattccaattattctgtaacattagagcacaatataattgtagacattctaagcatctgtccgtgtagtctaccaattgcacaaggaaggcatgttagccctccagattgaaaatgtatgtgacctcttgaactgaagttagattcccaaccattcaaaatgttggcagctgatcacatttacttctgataaaagtaatgtgtaagtaaggttaatcttctttcataatgccttatgacaagcaggtgctgcttcatgaaacgtcattgtatagcccatttcatgtatcattacattgttgctgttatttaatgagtgcattatttctctttttaagttggccttaggtatatgtcattgtggcatgcagagggttatgacgattttaaatattaggatttttagagcacataacattagctattttatggatttcaaaagtctcaaaacagttgtagattaaaactgttagttacctttcacatttccaaactatgtgcataaaatagaataaatgcagtatagaactatgctaaccaaaattaataggttaagggtattttattttaaatcctgtagtaattggggaaatgagaagattattattttatacatgagttcattaagatcagaaatacaaaatgtcctgtattttgcagttttgttaagtcttccattcgttttaggattagtctgcaagtcaaagaaagtcttgttaccttaaattatatgaaaactgtcattttaaatcttttaatatttacagttttcaaaaaccttacttggaaattgctttgaaacaaacaagctaacctttgaaacttaggaaaaaatcttgaaagttaggaaaaatatttgagaaatatgacgagcacaatctgtgtgttacacacatttagtttttatactgcatatgtggtaaatgtgtcacattttccagtaaaatgtatcagaaatcaatgccttctgaatttcaaaatgattcttagaaataagatattgtacaactctagcaaacatacaaagtacagctaaatcttaatatatttcactatgtaaaaggctgaaacttcataattatctgttccttctatctttttttgagtcaaaaagtctattaaatttttctgttgttgttccaactttggtgaaaaaggttatggcaatactttaactttgttttgttacattgtttttgttcttggaatggctcacaagcagaatttaaaaggcagattttcattaactataaatggctgaaaaaactgaatttactatctagctacagaaattatttttctatggtgtgaaactgttcccagacatccctaagaacttttacaaattattataaatttgtcacacctaggtcagcgattaaaatagtgttttgcaaatggaattttaattaactcaaaatgaattaagagtgcattttaaaaatcacaagtgagactttgatgttttggccccccagccaaaacttaatggtcataaatgaattttatctacaaaatctctttaaatttggctggttgccttgtcatatgtaatttcactattttccaaggaaatatataggaagcaattatgaaactgagaatagttttatatagaattcttttatttactgataatgcattaacatttttattgaaatgcaatggaatatgtgccaaaacacgtgaaaagcttacataaagaaaggcatcagttgtcgtttggagaaaggtacacatttttttgatggtcctaagtgatatggtattactactagaatcacagatttcttcaactgacttattttggtatattcaactacagctttctaaggataggactactttcatgtctagtaatacactgtattccccgttaattatcccttaagtcagattgtagaatttgcaagaaactaggtatagaaaaaatgtacaggcaacttttgtggttagctttataaatttagggtgcttataaaatgataaaatgaattctttaaataacctataggaatcatctgaatctgtaacatcagagactaaaactaaaagttttctttaatctgttgtttcttaagcaataaactgaaagacctttacttccataaaagattttgttatctcttttatctgccttagaaattataagtataaaagggtcaagggaacttagatataaagaatgactgtggtttataaacattactttaattgaagtaatcacatcagttaatagagaaatcaaaatatgtatggccttttctctagattagcaaaacagctttacaaagtatgaaaaaataaactaaaatgctcattgatgaggtaatactcagtctggagtacaggtaacttgggtaatgccttttaactactcttagaggagtatattatttctttatacattaaacatctatcccatagtaatgtgccacattttataaacgtaatgactttgctcaactacattacacactcaaatgtaatctaaatttaaactgattatttaaggaaaaaaagtgtgttatataatattgtgaactgtttagctttactgaaatatttaagagaaagtgcctcattactaaagtgcatttctgttttaaatttactgcataaagtttgagttatctgtacctgtctcttatgaatggtttcatatctaaataggctcttgtaagttaatttttttggaagattttcataagaatatagatatcaccaaagacattttacagtaaattaataaccatgttggagagacggttttaacagtttggaggttggaaatttttagattgcaatttaattttatatagttaggcaataaccttgattaattgctaaaatatcaccaaagaaaggctttaaactgaattttcttggtgagatcagtcaaatgcaggcttttcttgcaataatcagaacacacttcctttcaaatatgttcattgtttttcagcatcatctaacagatcttagtaaatctaaatcctcaaagatgagaaagaggtaaacacaacaaatagccttcctctgcatgaaaagtgagagaaatacatactttgaaaagaaagttcagatttttaatttgagagggtttttatttcatggaggcagtgttaactaaaattaagcttagatttagctcctgtattattcataatatgagaaattttattaaaggcagactttggtaaaagtgccaacacacttacttgtatagaaaagacttcattctatgggatttatataagtaagtgctttctctatattcaaaatatttcataaggacctgtggtttttttccccttaaaaagcaactctaggccgggcacagtggctcatgcctgtaatcccagcactttgggaggccaaggcaggtggatcacttgaggtcaggagttcgagaccagctggttaacatggtgaaaccccatctctactaaaaatacaaaaattagccaggtgtggtggcacgcgcctgtaatcccagctacatgggaggttgaggcaggagaatctcttgaacccaggaggtggaggttgcagtgagccgcaattacaccactgcactccagcctgggtgacacagcgagtctccatctccaaaaaaaattcaactcttggtcttgtttctcagcacttagtttattgttattagaatttagccatacagccaactttgacaaaatgggtcacagaacaagcatgtacatcaagaggaagttccatatcccccttgtaccatttctccttgggaactcatgctatgggctaccttaaaggtaaaactcatcttatggagtctttctgataggtcactaggtaaaactccttggatagggtgaaaatggatgcacactctattacatactctggtttatcataaggaattttccagaaagctaagctttatactaataagatattggttggtagtaggaacttcaaaaatgaatgagtttgccataactttaattttctggattagaaacacaaaacttgaaatgcaattatcaatattttgtaatatatattcctacagtttgggtagaaataaggaacatgtctgctagatctggtttatgaaaaagtgaaaaatattaaatacaccagagactcaaaccctttcaaggcacacaataactgttctggatttacctgacaaacctagttgagtagcattttgacagaaaatatcagactgaaagttcattcaaatgtacttaaatgtacaatacagtgttcaatagtttttattgcagtgatgtttttccaataatttaagtaattctcttcctagtataatacagttttcataaataatgtttacttgctttctttatattttcaaataaaattaaaatgctcgagcacttcctttcagaaagttataaaattaaaaataattattttaaatgctcattcaaatgtgtctgtatacttgctatgcccctttttctataattccaaactgagactgatttttcagagatttttaactttaataattttaaatctagaatcaagtgaaacagatatgttaaatactgagtctagttttcttccatcttatggagcttcatggaataagaaactaatctagtgcaaatgaagattaaatatttctgggtgatggagagatagtcaacaaatttatttatccatcctctgcacatcagtccactggagcaggagttctacacattaaaaatgtaatgggatcagcctagcattgtttggtgttcttttgttgtattttttagaatgggggtgggggcctaagtgtccttatgaagctgtggtccacgacaggagcttgttgggggagtaccagggttctgctgctttcctgcatctgagcaacacaacagagatcatcagttttaaatagagtagccctcacaatcaaaatatcatagaatatattgtaaagttatgttgctaattttcctttgaaatataaaatattttaagctttttgtcaaaagtggtaacatcttaatacaaataaaaacctttttgtggttgtaagatttagcttataaatcattcaaattgaagtgaaagaattaccaggtcattgttaatgacttagtctattaagaatatatgtatttttgtaaaggaaaagcacttgtagatatttaatcagtacaagatatgtcttttgcagaaataaaatgctgcttagagattctccttaaatattttttatttttgtgctcaaatgtattttctgttgatctatggaatgttctgtacaaagctgtataattgtactgttgggctagatactttttttttttaatctggacttagccaagtatatttcaccatgttaaaatacagtatctttgttattaaaaattaaattgcataatttattattgtttgtcatctttaatattagtcactgtagattgcagccttcattaaaaatatctcctttaa

SEQ ID NO: 1126 - DNA, 6924 bp, Homo sapiens
  source 1..6924: mol_type = genomic DNA
ggtagcggggacgcttaggcagggcctgcgcccagtttagaggccaatgcttctcccgtcctttgcatggcacccaagaaggagaaaggaggaactgtgaacaccagttctaagatatgggaaccctcgctcatagctgcacagttcaatcagaacgattggcaggcctccattgcttttgtggttgggaaccagattgaagatgatcttctcatccaagcccttaccgtggctgtccaggtccctcagcgtaaactcttcagtatggtgtcgtggcaagacattctccagcagattaatgaaataaatacacttgttggatctgcttcatctaaaaaggcaaaaaaacctgtaggtggtaatgctcctttatattatgaggtgttaacggcagcaaaagcaattatggatagtggagagaaattaaccttaccactgatagggaaactcttgaaatttcaacttctccagattaaatttaaggaccaacagcgacgggaaaatgaaaagaaggtaatagaagacaaacctaagttagaaaaggataaagggaaagcaaaatctcccaaggagaaaaaggctccaagtgccaagcctgccaaaggaaagggaaaggatcagcctgaggcaaatgcaccagtgaaaaagaccacccagttaaagcggagaggagaagacgaccacaccaatcgttacattgacgatgagccagatgatggtgcccaacattacattatagttgtgggctttaacaatcctcagctattagcaattatggctgagcttggcattcctataaccagcgtgattaaaatatcttcagagaattatgaacctctgcagacacacctggcagcagttaaccagcagcaggaagttcttcttcagtcagaagatctagaagcagaaaaattgaagaaagaaaatgccataaaagagcttaaaactttctggaagtacttggaaccagtcctgaataatgagaaacctgaaacaaatctctttgatgttgctcgacttgagtacatggtcaaagcagctgattttccttctgactggtcagatggtgagatgatgctgaaattgggcactgatatttttgaaaatattgcctgcttgatgtatgacatcctggattggaaaaggcagcaccagcactatttggaaagcatgcagcttattaatgttccacaagtggttaatgagaaacctgtattagaagccatgccaacttcagaggctccacaacctgctgtaccagctcctggaaagaagaaagcacagtatgaagaaccgcaagctccaccaccagtgacttcagtcatcacaactgaagtagacatgagatattacaattatttgctgaatccaattcgagaggaattcatttctgtgcccctgatactgcattgtatgctggaacaggttgttgcaactgaagaagatctcgtcccacccagtctgcgggagccatcccccagagcagacgggctagaccacagaatcgcagctcacattgtgtcccttctgccctcactctgtctctcagagagggagaaaaagaatcttcatgacatatttttatctgaagaagaaaatgaaagcaaagcagtgcccaaaggccccctcctactgaactatcatgatgcacacgcccacaagaagtacgcactacaggaccaaaagaattttgatccagttcaaattgagcaggagatgcagtccaagttgccactgtgggaatttcttcaattccctctacccccaccatggaacaacactaaacgtctagctacaattcatgagcttatgcacttttgtacgagtgatgtcttgagctggaatgaagtagaacgagccttcaaggtgtttacttttgagagcctgaagctctctgaggttgatgaaaaagggaaactgaaaccttctgggatgatgtgtgggtcagattctgaaatgttcaacataccgtgggacaaccctgccagatttgctaaacagataaggcagcaatatgtcatgaaaatgaatactcaagaggccaagcagaaagcagatattaaaatcaaagacagaacactatttgtggatcagaatttgtcaatgtctgtgcaagataatgaaagcaaccgagaaccttcagatcctagtcagtgtgatgctaacaatatgaagcattctgacttgaataatctcaaactctcagtccctgataatagacagctgttagagcaggagagcatcatgaaggctcagccccaacatgagtctctggagcagaccacaaacaatgagatcaaagatgatgcagtcacaaaggctgattctcatgaaaagaaacccaagaagatgatggtggaagcagatttagaggacataaagaaaacacagcagcgcagtctaatggactggagttttactgaacattttaaaccgaaagtactgcttcaggtccttcaagaagcccataagcaatataggtgtgttgattcttactaccacacccaagacaactctttacttttagtctttcacaatccaatgaatagacaacgtttgcattgtgaatattggaacattgctctccactccaatgttggattcaggaattatttggaacttgttgcaaaatctattcaagattggattacaaaagaagaagctatatatcaggaatctaaaatgaatgagaaaatcatcaggaccagagctgagctggaattgaaatcttctgctaatgccaaacttacttctgctagcaaaattttttccattaaagaatctaaaagtaacaaaggaatcagcaaaacagagatatcagatcaagaaaaagaaaaagagaaggaaaagattcctttcattttagaaggctctctcaaggcatggaaagaagagcaacatcgattagcagaagaggagcgcttaagggaagaaaagaaagcagagaagaagggtaaagaagctggtaaaaagaaaggcaaggataacgcagagaaagaggatagtaggtctttgaagaaaaaatcaccttacaaggagaaatctaaagaagaacaagtcaagatccaagaagtaacagaagagtccccccaccaaccagaacctaagataacttacccgtttcacggatacaatatgggaaatatacccactcaaatctcagggtcaaattactacctgtatccttctgatggggggcagattgaagtggaaaagacaatgtttgaaaaaggcccaacttttatcaaagtgagagtggtaaaggacaaccacaattttatgattcatttaaatgaccctaaggaaattgtgaaaaaggaagagaaaggggattattatttagaagaggaagaagaaggagatgaggaacaaagtcttgaaacggaagtatcagatgcaaagaataaagctttcagcaagtttggatctttttctgccaccttagaaaatggaatctgcctctcgataagttactatggatcaaatggaatggcaccagaagataaggatcctgatttagaaacaatattgaatatcccttcagcactcactccaacagtggttcctgttatagtgaccgttcctcaaagcaaagctaaagggaaaataaaaggcaaagaaaaacccaaagaatcccttaaagaagaagaacacccaaaagaagaagagaaaaaggaagaagaagtagaaccagaacctgttttacaagagactttggatgttcccaccttccagagcctaaatgtgtcttgccccagtgggctcctgttgactttcattggacaagaatctacaggtcaatatgttatagatgaggaacccacctgggacatcatggtccgtcagagctacccccagagggtgaagcactatgagttctataaaacggtgatgccacccgcagagcaggaggcttcaagggttatcaccagtcaaggcactgttgtcaaatatatgttggatggatccacacagattctctttgcagatggtgctgtgagcaggagtcccaattcaggtcttatttgtcctccttctgaaatgccagcaacgcctcacagtggagatttgatggactctatttctcagcagaaatcagaaacgataccatctgagattaccaacacaaagaaaggaaaaagtcacaaaagtcagtcatcaatggcccataagggtgaaatccatgaccctcctccagaggcagttcaaactgtaactcctgtggaggttcacataggcacctggtttacaaccacacctgaaggaaatcggatcggcaccaaaggattagaaagaatagcagacttgaccccattgttatcctttcaggccacagatcctgtcaatggaacggttatgacaactcgagaagacaaagttgtcatagttgaaaggaaagatggtactcggatagtggatcatgctgatggtaccagaatcacaaccttttatcaagtttatgaagatcaaattattctgccagatgatcaagaaacaaccgagggtcctcggactgtcaccaggcaggtgaagtgtatgcgggtagaaagctcacgctatgccactgttatcgccaactgtgaggacagtagctgctgtgccacctttggagatggaacaactattattgcaaagccacagggaacataccaggtgttacctccaaacacaggctctctttatattgacaaggattgttcagctgtgtactgccatgagtcaagcagtaatatatactatccttttcaaaagcgtgagcagctgcgagctggcaggtacatcatgaggcatacttcagaggttatctgtgaggttctggatcctgagggaaacacttttcaggtcatggctgatggtagcatatcaactatattacctgaaaaaaaattggaagatgatttaaatgagaaaactgagggctatgatagtctgtcctctatgcaccttgaaaagaatcatcagcaaatctatggtgaacatgtccccaggttttttgttatgtatgctgatggatcaggaatggaacttcttcgagacagtgacatagaagaatatctatctttggcatataaagaatcaaatactgttgttctccaagagccagtgcaggaacagccaggcaccctaaccatcacagtccttcgccctttccatgaagcatcaccatggcaagtaaaaaaggaagatacaattgtccctcctaatctccggtcaaggtcatgggaaacatttccctcagttgagaaaaaaactccaggacctccgtttggtactcagatttggaaaggcctttgcattgagtccaaacagctagtgagtgccccgggtgccatactcaagagccccagtgtgctacagatgcgccaattcattcagcatgaggtcataaagaatgaggtgaaactgaggctgcaggtttcccttaaggattacataaactatattctaaagaaagaagatgagctgcaggaaatgatggttaaagattccagaactgaggaggagagaggcaatgctgctgatctcctcaagctggttatgtctttccctaaaatggaggaaactacaaaaagtcatgttactgaagttgcagctcacctaactgatttattcaagcagtctttggctacgcctccaaaatgcccaccagacacatttggtaaagatttctttgaaaagacatggagacacacagcatcctcaaaacgctggaaagaaaagatagacaaaacgaggaaggaaattgagacaacacagaattacctaatggatattaagaaccgcataataccacccttttttaaatctgaattgaaccagttatatcagtctcagtataatcacctggacagtctttccaaaaaactgccttcttttacaaagaaaaatgaagatgcaaacgaaacagctgttcaagatacatctgatcttaatctagatttcaagccacataaggtttcagaacagaaatcctcaagtgtgcctagtcttccaaaaccagagatttctgcagataagaaggatttcactgctcagaaccaaactgaaaatttaacaaaatctcctgaagaagcagaatcttatgagcccgtgaaaattccaacccagtccttgctgcaggatgttgcgggacaaacaagaaaagaaaaagtgaagttgcctcattatttgctgagttccaagcctaagtctcaacctcttgcaaaggtgcaagattctgttggaggaaaagtgaacacatcctctgttgcatctgctgccattaataatgcaaagtcatccctttttgggttccatcttctcccatcatcagtcaagtttggagtgcttaaggaaggacatacctatgccacagttgtaaagctcaagaatgttggagtggacttctgcaggtttaaagtaaagcagcccccacccagcacaggactgaaagtgacttacaaacctggacctgtggcagctggtatgcagacagaactgaatatagagttatttgccacagctgttggagaggatggggccaagggatcagcacacatctctcacaatatcgagattatgacagagcatgaggttctgttcctacctgtggaagcaactgttttaacaagcagcaattatgataaacgaccaaaagactttccccagggaaaagaaaatccaatggtccagagaacttctacaatttattcctccacacttggagtcttcatgtctcgtaaagtttctccacattagtttcttctcggtacaactcaatagcctccataatcctctcagcctacagaggatgagaaaggaaagaagtcatcacaacatactccatcatcccaggacactgaaactggaagaactgaccagaaatttgccaaatgaaatagcttcaatctgtttaataaagacgtgcgaatagagtgccaaaaa

SEQ ID NO: 1127 - DNA, 7582 bp, Homo sapiens
  source 1..7582: mol_type = genomic DNA
agacagtaaggagccaggggaacagagagaattgtggggcagcaccgctccttgggtccccactccccatttctcattgcttggaaatccatgccaagatgcctgccttccttggtctaaagtgtctggggaaattgtgcagctctgagaaaagcaaagtcacctcatctgagagaaccagtgccaggggctcgaacagaaagagactgattgttgaggaccggagggtctctgggacctccttcaccgctcataggcgtgccactatcactcatttgctgtatctctgtcccaaggactactgcccacgtgggcgtgtatgtaacagcgttgatccttttgtggcccaccctcaggaccctcaccacccatcagagaagcctgtcattcactgccataaatgtggggagccttgcaagggtgaagtgcttcgggtccagaccaaacatttccacatcaagtgtttcacctgcaaagtgtgtggctgtgacctggcacaagggggcttcttcataaagaacggagagtatctctgcaccctggactaccagcggatgtacgggacacgctgccatggctgtggggagttcgtggagggcgaagtggtgactgctctgggcaagacctaccatcccaattgctttgcttgtactatctgcaagcgcccgtttccacccggagaccgagtcacattcaatgggagagactgcctttgtcaactctgtgcacagccgatgtcgtccagtccgaaagaaaccaccttctccagcaattgtgccggctgcggaagagatatcaagaatgggcaggcgctgctggcgctggataagcagtggcacttggggtgctttaaatgcaagtcctgcgggaaggtcctcaccggggagtacatcagcaaggatggtgctccgtactgtgaaaaggactaccagggactctttggggtgaaatgtgaggcgtgtcaccagtttatcacagggaaagtcctggaggcaggtgacaaacattaccaccccagctgtgcacgatgcagcagatgcaaccagatgttcacagaaggagaggaaatgtatcttcaaggctccaccgtttggcatcccgactgtaagcaatctacgaagaccgaggaaaagctgcggcctaccaggacatcctcggaaagtatttattctaggccaggctccagtattcctggctcaccaggtcatactatctatgcaaaagtagacaatgagatcctggattacaaggatttagcagccattccgaaggtcaaggcaatttatgacattgaacgtccagatcttattacctatgagcctttctacacttcgggctatgatgacaaacaggagagacagagccttggagagtctccgaggactttgtctcctactccatcagcagaagggtaccaggatgttcgggatcggatgatccatcggtccacgagccagggctccatcaactcccctgtgtacagccgccacagctacactccaaccacgtcccgctctccccagcatttccacagacctggcaatgagccgtccagcggccggaactcccctctcccttaccggccagacagccgccctctaactccaacttacgctcaggcccctaaacatttccatgttccagatcaaggaatcaacatttaccgaaagccacccatctacaaacagcatgctgccttggcagcccagagcaagtcctcagaagatatcatcaagttttccaagttcccagcagcccaggcaccagaccccagcgagacaccaaagattgagacggaccactggcctggtcccccctcatttgctgtcgtaggacctgacatgaaacgcagatctagtggcagagaggaagatgatgaggaacttctgagacgtcggcagcttcaagaagagcaattaatgaagcttaactcaggcctgggacagttgatcttgaaagaagagatggagaaagagagccgggaaaggtcatctctgttagccagtcgctacgattctcccatcaactcagcttcacatattccatcatctaaaactgcatctctccctggctatggaagaaatgggcttcaccggcctgtttctaccgacttcgctcagtataacagctatggggatgtcagcgggggagtgcgagattaccagacactcccagatggccacatgcctgcaatgagaatggaccgaggagtgtctatgcccaacatgttggaaccaaagatatttccatatgaaatgctcatggtgaccaacagagggcgaaacaaaatcctcagagaggtggacagaaccaggctggagcgccacttagcccctgaagtgtttcgggaaatctttggaatgtccatacaggagtttgacaggttacctctttggagacgcaacgacatgaagaaaaaagcaaaactcttctaagtcccactcgtgaatggcaattagagaaaggactgacagtggcggtgccccataggatgtcatattgaggcccaaacttgattggagaatttgcaaactaccgtcgctcagcaacaccaaaaagagaaagtctggttaaaacaccatgagtcaaatgtcgggccagccaacagtaacacttgccaagaagcatggcgtagaaatttctatgttccgaaacacagagtagtgtccacatgtgagcttttcacattaccttatgtatacaacaggagctgcgttgttttcttctttttcttttcctttatctgttgtccaacaacagtgctgactgtccggataagagctggcaagtgcccttaggatgccgcatgggaaaaatcggttatcataatttcaaagtataaatatatttattaagtagcgctgcggctaagaaggaagagtgaggggtctgtccatggggtggcagtgatttcacacccgcctttcttgaatggcttcgtgttactcagccgtgccctggcaggaatggaactccatcagggaacagggcagctctgtttgaatggggtgaaaaacagcaaaattaattcttagcaagctccttgttctctactgttcaccgggacctggctggcaaatgacttagctattagtatatttaaaaactgttcaaaagcaaaagagaaggaacaggaatgaaaggaaaccttcccttaactctttctgcttcccatagcaggtctggttcctgctccccgcctaggacaggagctgtctggagctccacctttgcaaagaaaggaaaaacacaaattgcccccagattggcccagtggcatgccattaggtgattttgcataggggccatatcattcatggccaaaaaaaaccaaaaagcaaaaaacaaaaacaagtcccatgtcctactgactctagttcttccagtcgttatcctctgctgtctctctggcatcctatgaatcagatcaagcccatgctgttgttggtttttaaggtttctttcaataataggctaaggaaagacatgtttttctcttttaaatctctgcaactccaaagtagactccttcgaacgtatttaatttggccttttcagctttcttcttgcccagctctgtcgaattcatgggtgtgtgtgcacatgttggtttcactcacccagagtaattttgtgagcatgcatgtgctttttaatttctgcttgaatgtttgtcctgctgtgttgcagcttctaaagacattgtcaccgagtgtgtgtgactcaaagatcaagagtgaggctaaactgcgaccccaacatcacttccttcatggaaaggtgttggcgctgatgtagctcatggaaggatcagactgggaaccacagaggaaggatgaggtgggatgtggaggtcagagcatctcacgagagtccctcaggctctgcaacactagattcgaatatgagcctagggtttccccaacacgtgcgtgcatatgaaaccacatcatgattcccgacgtgagttagatgagggagagtttgtgtaactccacacccaggagggtaagccactttattatcatgctttggggctgtgcttaagaatttaagctctgttttaaagccgaagaagaaaacatttgaatttaccttcatatgccactaagaacaaaagctctgaagttcttcctgctggcaccaaatattaggattacaagctgtctctctgacaccagtggtaaaaaagcaagtagaatagtttctgagtctgtgttgcagcctctgacacgtggctcaccgctgtcatttgggggatggaatgaacagtcactgttctatagcatcctcctgtgctcttacctaaggaatctaaattgtcctagccttccattgctatgcactgaatgaggactactctcgtgtgtgtgtgtgtgtgtgtgtgtgtgtgtgtgtgtgtgtgtgtgtgtgttggatctactaacatgtttagcaaatggctctgacagggtggccatgagcagatgagaccagctcttgcttggttggaagccacactgcagtttgcagtttagcctttggtgtctcagtggcttcttgcttattccatgctttttctatcccatcctctctctgtgccctcctgcaatggcagccttggcacaatgcctgggtgtcctcatccttgctttactctggaaagtgtggggatggagaggatggtgcatttccagtgcttccttacctgtcaataacaatggtggccacctgggtcccagcacttggctggtggagagatttttttcattatggagctaataaagggtccctacgttttacattgattaatgaattatcacccagacatgtgcagatgaaatgtcaatataagaaaaatcaaggtatttgggaaacatgggcataatcaggtagttttgctaaaattcctcttccttggtctacataaagaagacatgggtctgtcatagaatggggacattagactgaaaactgggacaacccccttccttattttatagagactaggagttaaggggcctgcctaagattgcagtgataaagaactgaaccctaaatcagctcccactaatgaaaccctgctttccttgtatcttttaaactcagttctgcatccaacttgagaagaaaaaaagcttctttccatatcaagtaccatatgagttcatttaaactgcaccttgcagaaatgcattgccagaaagcaccagtagcctcctatctgcaagcagagtagtgctctgctctggggaggggtcattggaaaccataatgcagagtgggccccctactccatttcccagcaaaaggctccagctggagggatgggttgtggggcaacctggttcctgctaactgccagattgaatgtgtgggctagaatgcctgcacatttagttaaactgggctcagcatgcttgtcctcaaaatgtccatcctggtcacagcacacaagatggctattggtctgcttttaccctaccctgtactatacatgaaaattccagttattaacacactcaaactggtggagcttgttcaccctaggaaggggattgtatatatggcaggcttccctggtgccgatgtaaagggctacatttgggaacatttgacttccttgggactcttaagtgcataatgatggcatgaagtaaaaggggcctcaatgatgataggaaaatcagttcttttaaaatttcttcaagaaaatccaggctatcacatagtctttctgtgtgacttattaggagataggaagagcattgggaaacttgcacagctagctatgcatctacattttggtttggggttagttatgaaatgttcttaatatgacgtgttcaataacttcacataaacttcctgttctccaaaacctcaaagagatagagttaatgagttgttgtttttttttaaatgggggtagttttctatctgtcatgggctctagcatctactccgctacccaattctgtcatctccaagctgagtttcctcttctgaggcagaggctggagcagttctttttcagttctcatcctctccatcccaatccagtatatcaatcaactctaactcggagacgtctagctggcaatgtttctaaaactttcactggatttctttagacattgaagcaaacatttttttctaagaattgcttctcagatgatgatatcaaatgtatatgcttttgcaagtttgaaaagttcaaattaaccacttttgactaggtaagtctttctaaaaaccatttaaagctaactgggtcttagcatcctcctgtgtatggaagagacaggtgaccgctccaggttgggtgctcacagaacccttttcctgactctcatggaagatggtggaaggaaaatagactgtctcatcaaccctcctgtgtcctctgaagcaatctcagtttttattaaccacctcttctgtgtttctggtagctatttaacctgtatttaatctgtacttcctatgccagcctcaattttatttgatttttacaattattctcttctaaccaatgaagtgtttgtcagtatgccccaaagcttgctcttttgtgctcccttttgaataactttctatccagaaaaagagattatttgggacttgagatttgcagtgataccaacttatagcaatgatgtactttaagggaactacccaactatgttgtgatagaagaaagagaaaccttcactttggcatttttttttaatcactgtttatttttctgtttgcggcccaggaagcagtgggaggtggtggcagatatgctttgcatatggattgttatgtttttatttgggcaagtttaatcatggaaaactcaaaaagaaggggggaaatggtcagtttaagccaaaagaaactttctaaacaatgtataggtacacagcaaaattaaacaaatccaacaatttctgaagcttagtgtaattgagtggtggttgttattcaataaaattattcccaaaagtgtttctcctaagagtgcagttcccatgagtcacttcctgaacccattgaccaaaggtggacagagacaatcctgtagaccttgacattcagaaagatgtgagctgcttactgatcatatatgcatacgtttctttacagcagaggaaaccattgtccacaaaactgatgttcttttggggttttatgtacagacttgtccaatcatgtgtgtggttcctgcgagttgctgatgactccgcattgaagctctctgagttctttgattttaagttgggtttatggaattttttcaaatgttggaaggtgtgtggttcttcctgccctccctccccttttggaaatatgaaagcaaatgtttagaagaattccttttgaaaagctgtgtcgtgttccctgtgaaactgagcaggtgtgtgttggcgcgctaagtgccacatgcttgtgtgtagaggaggaggtggccctgccggctccgcgctgctgtgcctgtgatccctacctgctccccgctcctgttgccagcagcactcactgcactcctttgtcatatactctgcatcactgtcatactcacaacttcgtgaataaagttgtgtgctttattcgt

SEQ ID NO: 1128 - DNA, 2686 bp, Homo sapiens
  source 1..2686: mol_type = genomic DNA
tgctcctgcaccggtctgcatctcccagcagaaggcgcagccatgaatccgttattcggccccaacctcttcctcctgcagcaggagcagcagggcctggccgggccactgggggactcactgggaggcgaccacttcgccgggggaggagacttgcccccggcgcctctctcgccggccggccctgctgcctactcgccgcccgggccgggcccggccccgcctgccgccatggccctccgcaatgacctgggctccaacatcaacgtgctcaagaccctgaacctccggttccgctgcttcctggccaaggtgcatgagctggagcgccggaaccggctgttggagaagcaactgcagcaagcgctggaggagggtaagcagggccggcggggcctgggtcgtcgcgaccaggcagtgcagaccggcttcgtcagccccatccggcccctggggctgcagctgggcgcccggccggccgctgtctgcagcccttcggcgcgcgtgctgggctcgcccgcgcgctccccggccggccccctcgcgccctccgcggccagcctctcgtcgtcctccacctccacctccaccacctattcctcgtcggcccgcttcatgcccggcaccatctggtcgttctcgcacgcccgccggctcgggccgggactggagcccactctggtgcaagggcctggcttgtcgtgggtgcacccggatggggtgggcgtccagatcgacaccatcacgcccgagatccgcgctctctacaacgtgctggccaaagtgaagcgggagcgggacgagtacaagcggaggtgggaagaggagtacacggtgcggatccagctgcaagaccgtgtaaatgagctccaggaggaagcccaggaggctgatgcctgccaggaggagctggcactgaaggtggaacagttgaaggctgagctggtggtcttcaaggggctcatgagtaacaacctgtcggagctggacaccaagatccaggagaaagccatgaaggtggatatggacatctgccgccgcatcgacatcaccgccaagctctgcgatgtggctcagcagcgcaactgcgaggacatgatccagatgttccagaagaagctggtcccatccatgggggggcggaagcgggagcgcaaggctgccgtcgaggaggacacctccctgtcggagagtgaggggccccgccagcccgatggggatgaggaggagagcacagccctcagcatcaacgaggagatgcagcgcatgctcaaccagctgagggagtatgattttgaggacgactgtgacagcctgacttgggaggagactgaggagaccctgctgctttgggaggatttctcaggctatgccatggcagctgcagaggcccagggagagcaggaagatagcctggagaaggtgattaaagatacggagtccctgttcaaaacccgggagaaggagtatcaggagaccattgaccagatagagctggagttggccacggccaagaacgacatgaaccggcacctgcacgagtacatggagatgtgcagcatgaagcgcggcctggacgtgcagatggagacctgccgccggctcatcacccagtctggagaccgaaagtctcctgctttcactgcggtcccgcttagcgacccgccgccgccgccaagcgaggctgaggactccgatcgcgatgtctcatctgacagctccatgagatagagacctgcctcccccttgcacccgaggccctcgcagcagggagctcagcgaggcagagggtggggctgcacagaggggaacatcagctgcagctctgcaccaggccggtccctggggactggggcgctcctccctcaggctttctccctcagtcttggcttctccagggctctggggtgtctggagctaggcttggccctaccattctggggccatttccaccacagttggggctctcctgccttcacgcgtgggtgtctgctacttccccatctttaaaatgctgccagagcgattgcggcccctcaccttgtccacgtatcaggaatgtgaatgtgggacctttcctccatccctgttgtccggagccagctcactgtcttccacactggtgctaactggcccaggcactggagtggaatagaatgcagctggaggctacgcatggcctctgcagcacacgcagctggagagggcttctgtccctgtcagcggcagagggcgttggggctggccggggcaccttgtccctgctatggtccacgtgctcacgctgtccacctgccaggtggagtgtatgtggctgtggccctccctcgtggaggtgccgtgctttaaagaggccttagtgcccgggatgggcacagtgttttgaagggaggtgggagctcttgctctcctggtcactgcagaatgacagagaaggtgaagctccatgcatgtgtgcgcgggtgtatgtgcgctcagggtctctgtttaagtatcagctaaagatgtgcttcctccgtgtctgtcatacactgagaccaacaggctacagtgtccctgattcttggaaaagcctggagaagctggggagatgcggttcacaatgcctcggtataggaggctgtgttgagctgacattcaaatggattctttaataataatgaaactggcgagtatttattgtgca

SEQ ID NO: 1129 - DNA, 5427 bp, Homo sapiens
  source 1..5427: mol_type = genomic DNA
cgcggcttgcaaggcgcctgcgactcggtcccaggtcggcgggcggcgcacggcgggctcgcgcgggggccccggcgcgccgggcggcgcagtacgcagcgcgcggacccacgccacggccaggagcccagagcagcgcggccacactgcccaggggtcggccctcggccccggcgctcggagcgcggcggctgcctgggctttaatggctgctccgcggagcagcgcctagggctggaaggcggctgcggctcaggaagtcacccgagcaagcctccttcggggccggccgcacccgccgcggcgcgctccatgggggcgcgctccccccgggcggcccgctgacccgggacgccggggcccgctcgctcgccggccgcgcgtcccggccatgaactgagcccgcgggccagccccgcgcctgctccgcccgcgcctttcttctcgcgcctcctccgcccgccgccggcgggcccggctccccgggggctgcggcgccccgggctcggcggcccgcgggccccggggcgcggggcggcggcggcggggggcgcgcggctccgggcgcggcgcctgcaccatgaactaccagcagcagctggccaactcggctgccatccgggccgagatccagcgcttcgagtcggtccaccccaacatctactccatctacgagctgctggagcgcgtggaggagccggtgctgcagaaccagatccgggagcacgtcatcgccatcgaagatgccttcgtgaacagccaggaatggacgctgagtcgatctgtcccggagctcaaagtgggaattgtgggtaacttggccagcggcaagtctgccctggtgcaccggtacctgacgggcacatatgtccaggaggagtctccggaaggtggcaggttcaagaaagagattgtcgttgatggacagagctatctgctgctgatcagagatgaagggggccccccggaggcgcagtttgccatgtgggtggacgctgttatatttgtcttcagcttggaggatgaaataagtttccagaccgtttaccactactacagtcgaatggccaactatcggaacacgagcgagattcctctggttctggtgggaacccaggatgccataagttctgctaacccgagggtcatcgatgacgccagggcgaggaagctctccaacgacctgaaacggtgcacgtactacgagacgtgtgctacatacgggctgaatgtggagagggtcttccaggacgttgcccagaagattgttgccacaaggaagaagcagcagctgtccataggaccctgcaagtcgctacctaattctcccagccattcctccgtctgttccgcgcaggtgtctgccgtgcacatcagccagacaagtaatggaggtgggagtttaagcgactattcctcctccgttccatcgactcccagcaccagccagaaggaacttcggatcgatgttcctcccactgccaacacgcccacgcccgttcgcaagcagtctaagcgccggtccaacctgttcacctctcggaaagggagcgacccagacaaagagaagaaaggcctggagagtcgtgcggacagcattgggagcggccgagccatcccaattaaacagggcatgctgttgaagcgaagtggcaaatcgttgaataaagagtggaaaaagaaatatgtcaccctgtgtgacaatggcgtgctgacctatcatcccagtttacatgattacatgcagaatgttcatggtaaggagattgaccttctgagaaccactgtgaaagtcccagggaagaggccaccccgagccacgtcagcctgcgcacccatctccagccctaaaaccaatggcctatccaaggacatgagcagtttacacatctcacccaattcagacacagggctgggtgactccgtatgctccagccccagtatctccagcaccaccagccccaagctcgacccgcccccctcccctcacgccaacagaaagaagcaccgaaggaagaaaagcactagcaacttcaaagccgacggcctgtccggcactgctgaagaacaagaagaaaattttgagtttatcattgtgtccctcactggccaaacatggcactttgaagccacgacgtatgaggagcgggacgcctgggtccaagccatcgagagccagatcctggccagcctgcagtcgtgcgagagcagcaagaacaagtcccggctgacgagccagagcgaggccatggccctgcagtcgatccggaacatgcgcgggaactcccactgtgtggactgcgagacccagaatcccaactgggccagtttgaacttgggagccctcatgtgcatcgaatgctcagggatccaccggaatcttggcacccacctttcccgagtccgatctctggacctggatgactggccagtcgagctcatcaaggtgatgtcatccatcgggaacgagctagccaacagcgtctgggaagagagcagccaggggcggacgaaaccatcggtagactccacaagggaagagaaggaacggtggatccgtgccaagtacgagcagaagctcttcctggccccgctgccctgcacggagctgtccctgggccagcacctgctgcgggccaccgccgacgaggacctgcggacggccatcctgctgctggcacacggctcccgggacgaggtgaacgagacctgcggggagggagacggccgcacggcgctgcatctggcctgccgcaaggggaatgtggtcctggcgcagctcctgatctggtacggagtggacgtcacggcccgagatgcccacgggaacacagctctggcctacgcccggcaggcctccagccaggagtgcatcgacgtgctgctgcagtacggctgccccgacgagcgcttcgtgctcatggccacccctaacctgtccaggagaaacaataaccggaacaacagcagtgggagggtgcccaccatcatctgaggaacagccgtgcccgcctgctcgccgcacctgggacgcggcagcctcgccgcattctcgctcagaagtcgcagcacgtgagtcccgtcgcatcccctccctcttcctggtggccacctccctcccgcccacccactctcaccccaaacaaaatcacaaaacctggacatccctcaaggggcgaagaggcggccgggagactgcagaagtggctccttttcataaactcccctaaaccacacacaggagagagcgacgggcctcggccctttgatgatagcacatggcgcaggacccttgtcctggtggcacaagggatggggacgcgagggggaggggaggcgaggaacaaggagaaggggcaactttccttaactggcagttgagcacatagtacatttcccctctaccaaacggaacacttggattccatctcttctctgaggagctcgacggcataaatcagaagcaagcacagagtttgtcaggtttgaagcccctatgatggtgtgtgtcaaatcagttgtagctaatctgtccagggagaatactggcttcattacacttgtacagccgagttcttcccgcattactgctgtttaatagaacgtgattagtcatcgccgagaagaaagcatattagccgaggaggtagtcacgcggcacgcgccggtgattgccacgatgtgattgcaatactcttagaagcaccatattatcccagacatgttctttcaagcccttggagccctctctaaattcactgtcatcatttagtatctgtttaatttttcagtccaaagagaggaaatcagtcgctgagtattatttgactccggtctccttggtgcaaaaacaaaatgggaaaaataaataagaataactcagaaactcaaaaggaaaccacaaattcagctaataatagcatttcgagtatatttcgtaaactaaggaaatacacaaaaggctgttttttccgactgtaagagatatttgatgtccttttgccgaggtggatgtgttagtctcaggccctcctggaccacgttgcccaagtcacacaggcttctgtgttatgtatttagataagatgtgtgaaaatatatttgaataaaagaagttcataaatatgcattgatttttgtacagacaaatggcacctctcttaatttataaattgaactggatgtgaactaataatgtgcaactagttgagataagagggttacagatcattgtacatggaaaatattcccagcagtaaacacttccattaatgtgatctacggcttttgaaaaggagcatctcagaataagatggtggtacaatttgcttattaaaattgagaaagaaaaaaaaagacacactggagtatattagaaaggaaaaagaaggaatgtggtctctcatgattgaaagcatgatttagatcggatacggcttttgctaaccaaggaccaagggactctggcaagatggggtggttttccgaatgccagaccgaggtgccttacgaaggcagctgccaatggttctgtggcacagactggctcctgagaacccagacgaccttgacctggcagcccggccctccacgctagtacctcgcctgattttccatcgttgcggtatccagccgcttcagacgtccgccgccttcagtggtggtagtcaaatgtagtcaaccaaaccacagcatcccttaggttaaaagcaaacggggcagctttgcctagagctcattgacagtgtgatggggggagaagggttgtcacaatggaagatgaggacactagactcatgtagcacagaaacatgaagccacacgcaccggcagcctccggggtgttcctcgctctctcgtatgttaaaccttatattttataagagtttttcctcttatttcactttttaaaaaaaattaaagtaggtggggaaaaaaataaagctttacacagaatttatatgtgggtaagtgtttcatggaaatttctaatcttaacgaagctaagtggagctcactcgtatccaaaagtataacaggtgcagaagccacaagtctgagaaccttgacgacagttccatcgtcctgccatttgatttttcagtctgcgtttcatcactgtgtagctattgtaaatgtgaatagaaaaaaacaggtcattgcctatttttgaagaacgcgttggtgttcgagtccactagacacactcgctccacacagccttcaccgtagactctgtagtggacacagatatagcataaatgaaattgttaaattatttcattgtagttaattcccactataggaatgctttatcatagtgaagtttcttttgagaagaaacggaactccttgaggcttctctttgggatgtatatgagcgtgtacatattattctatgtgtttataatataatattttcccaaa

SEQ ID NO: 1130 - DNA, 4050 bp, Homo sapiens
  source 1..4050: mol_type = genomic DNA
gtgccccccgcgccccgctccggcagctccacgctcgcgcccgccatgccggagcagttcagcgtcgccgagttcctggccgtcaccgcggaggacctcagctccccggctggggccgccgccttcgccgccaagatgccccggtaccgaggggcggcgctggcgcgggaggagatcttggaaggagaccaagccatcctgcagagaataaagaaggctgtgcgggcaatccatagctccggccttggccatgtggagaatgaagagcagtaccgagaggccgtggaatccttaggcaacagccacctgtcccagaacagccatgagctgtccacaggcttcctaaacttggccgtgttcacccgcgaggttgctgcgctcttcaagaacctgattcagaacttgaacaacattgtctctttccccctggacagtctgatgaaggggcagctgagggacggtcgacaggattccaaaaaacagctggagaaggcatggaaggactatgaagccaaaatggccaagctggagaaggagcgcgatcgggccagggtgacaggagggatccctggggaggtggcccaggacatgcagagagagcggcgcatcttccagctgcacatgtgtgagtatctgctcaaagccggggagagccagatgaagcaaggtcctgacttccttcagagcctcatcaagttcttccacgcccagcacaactttttccaagatggctggaaggctgcccagagcctgttccccttcatcgagaagctggcggcctcagtacatgcactccatcaggcccaggaggacgagctacagaagctgacccagctccgggactccctccgagggacactgcagcttgagagcagagaggaacacctgagccggaagaactcaggatgtggctatagcatccaccagcaccaaggcaacaagcagtttgggacggagaaagtgggctttctatacaagaaaagtgacggaattcgaagagtctggcagaaaaggaagtgtggagtcaagtatggctgcctgaccatctcacacagcacgataaaccggcccccggtgaagctgaccctgctgacgtgccaagtgaggccaaaccctgaggagaaaaagtgcttcgacctggtgacccacaaccggacgtaccactttcaggcagaggacgagcacgagtgtgaggcgtgggtgtcagtgttgcagaacagcaaggacgaagccctgagcagcgccttcctcggggagcccagcgctggcccggggtcctgggggtccgccggccatgatggggagccgcacgacctcacaaagctgctcatcgcggaggtgaagagcaggcctgggaatagccagtgctgcgactgcggggctgcagaccccacgtggctcagcaccaacctgggcgtgctcacctgcatccagtgctcgggcgtccaccgcgaactgggcgtgcgcttttcgcgcatgcagtcactcaccttggacctgctgggcccctccgagttgttgctggccttgaacatgggaaacacgagcttcaatgaggtcatggaggcccagctaccctcacacggcggccctaaaccctcagctgagagtgacatgggcacccgcagggactacattatggccaagtatgtggagcataggtttgcacgccggtgcacacctgagcctcagcgactctggacagccatttgcaacagggacctcctgtcggtactggaggcctttgccaatgggcaggactttggacagccgctgccagggcctgatgcacaggcacctgaagaactcgtcttgcatttggctgtcaaagtcgccaaccaggcttccctgcctctggtggatttcatcatccagaacggtggtcacctggatgccaaggctgctgacgggaacacggctctgcactacgcagcactctacaaccagcccgactgcctcaagctgctgctgaaggggagagctttggttggcacagtaaatgaagcaggcgagacagctctggacatagccaggaagaagcaccacaaggagtgtgaggagctgctggagcaggcccaggcggggacctttgccttccctctacatgtggactactcctgggtaatttccacagagcctggctctgacagtgaggaggatgaggaagagaagcgctgcttgctgaagctcccggcccaggctcactgggccagtgggaggctggacatcagcaacaagacctatgagactgtcgccagcctgggagcagccacccctcagggcgagagtgaggactgtcccccgcccttgccagtcaaaaactcttctcggactttggtccaagggtgtgcaagacatgccagtggagatcgttctgaagtctccagcctgagttcagaggcccctgagacccctgagagcctgggcagtccagcctcctcctccagtctgatgagccccttggaacctggggatcccagccaagccccacccaactctgaagagggcctccgagagcccccaggcacctccagacccagcctgacatccgggaccaccccttcggagatgtacctccccgtcagattcagctccgagagcactcgctcctatcggcggggggcgcggagccctgaagatggtccctcagccaggcagcctctgcccagaaggaacgtgccggttggcatcactgaaggagatggctcaaggactgggagtctcccagcaagttctgtgcaacttttgcaagactagctccttgctggcccccacatgccccatgctaggccccaatgttcagagctgggacttgagctcacaaaactggggagctgagacatttgttctcttggatctcactctctctgtcccttgtgcctctgtagctggccttcttcctgccacaggccatgcctctaccaaggacacatggcctttccctgttaggactgatggcggttctttcctatctcattacccgctaggggcctgggagccctgtggctggatctgagtgctcctgagctggcttcagctgcagaactctcagtccctcatcagatcgagactctatttcccccgtcagtctgggggcttcacaagggcaggagagccctccatcactgacttccagatcagggaccctgccaagtagggactgtcttctcagccagccatttattagtctaatattccttcactaaattccaactctatgtctggacctgtgttaggcacttcagataccacacgagtaagacaagggccctgcaggggtggtcctttggtggaaagctggtcttaagggttgggcttgggaataggcagggtcagattccagggcatggctctggactcagctggtttatacctatatgaccattacaattgtctacagatcacatccattctggctggtcaacatgcatgctgtactggctgttaaataaaaatattctgaatgtcactccttttgagggacagcacagccttccctaggcattctcctatattccccagccaaattgtagagtcagatgcacccacatttgcctgtgtccttgatttagcaggaaggaaaggaatagtcagggttgatggatgcccacttctcttctctttctcttggtcaactcaggagccttttagtctgagggaatggagaggcaaagaaagaagggagagtaatagaattgggagggcagagacttaagggttctgcttcccagccctagaaattctatcattgctcagccccaatgagaaagcagatacacctaagccatcatcaaccactaacatctcaacttgccagttgctgggtgctgggccctggcaggaatgggccaagccaagcaggggagactagagagcaccaatggccaacacagctgcctggctggggaggctgtgctgtttcccctggagacctgactggtctgtggttcccacaggaacagggttgtcttttgagcccccagtgtctggtttcattcatctcagacttgttatttcactcatctctaataaaggattggggggtcagtt

SEQ ID NO: 1131 - DNA, 1470 bp, Homo sapiens
  source 1..1470: mol_type = genomic DNA
cgcccacccatccggggcaagagccgcgccgcaggagaggcaggctggaccgggggctccccgggcccgcgacccccgccgtgaccccgcagcccccagctcgcccccaagatgatgaagaggcagctgcaccgcatgcggcagctggcccagacgggcagcttgggacgcaccccggagaccgctgagttcctgggtgaggacctgctgcaggtagaacagcggctggagccggccaagcgggcagcccacaacatccacaagcggctgcaggcctgtctgcagggccagagcggggcagacatggacaagcgggtgaagaagcttcccctcatggctctgtccaccacgatggctgagagcttcaaggagctggaccctgattccagcatggggaaggccttggagatgagctgtgccatccagaatcagctggcccgcatcctggccgagtttgagatgaccctggagagggacgtcctgcagccactcagcaggctgagtgaggaggagctgccagccatcctcaaacacaagaaaagcctccagaagctcgtgtccgactggaacacactcaagagcaggctcagtcaggcaaccaagaattcaggcagcagtcaaggcctaggaggcagcccgggtagtcacagccatacgaccatggccaacaaggtggagacgctgaaggaggaggaggaggagctgaagaggaaagtggagcaatgcagggacgagtacttggctgacctgtaccactttgttaccaaggaggactcctatgccaactacttcattcgtctcctggagattcaggccgattaccatcgcaggtcactgagctcgctggacacagccctggctgagctgagggagaaccacggccaagcagaccactccccttcgatgacagccacccacttccccagggtgtatggggtgtcgctggcaacccacctgcaagagctgggccgggagattgccctgcccatcgaggcctgcgtcatgatgctgctttctgagggcatgaaggaagagggtctcttccgtctggctgctggggcctcggtgctgaagcgtctcaagcagacaatggcctcggacccccacagcctggaggagttctgctccgacccgcacgctgtggcaggtgccctcaagtcctatctgcgggagctgccagagcctctgatgaccttcgacctctatgatgactggatgagggcagccagcctgaaggagccaggggcccggctgcaggccctccaagaggtgtgcagccgcctaccccccgagaacctcagcaacctcaggtacctgatgaagttcctggcacggctggccgaggagcaggaggtgaacaagatgacacccagcaacatcgccatagtcctgggacccaacttgctgtggccacctgagaaagaaggcacagagccagccagagagttggggtcacaaaccctttgctga

SEQ ID NO: 1132 - DNA, 2274 bp, Homo sapiens
  source 1..2274: mol_type = genomic DNA
cgcgcggtgaccgttggcgccgaggggaggaggcagccgccgccgccgccgccgccgccgccgccgccgccgccgccgttgcgcagatccgggccgcggctgtggggagggcgacggagcgggtgaccttccggaggcgggagcgagcgaggaggcccgggagcgccgagcgtcgccgccgccgccgccatgaacaactcgggcgccgacgagatcgggaagctcttcgtgggcggtcttgactggagcacgacccaagagactctgcgcagctacttttcccaatatggagaagtcgtagattgtgttatcatgaaagataaaaccaccaaccagtctcgaggctttgggtttgtcaaatttaaagacccaaactgtgtggggacggtgctggccagcagaccgcacacgctagatggccgaaacatcgaccccaagccatgcacaccccgggggatgcagccggagagaacacggccgaaggaaggatggcagaaaggacccaggagcgataacagtaaatcaaataagatatttgtcggtggaattcctcacaattgtggtgagacagagctcagggaatacttcaagaagttcggagtggtcacggaggtagtcatgatctatgacgccgagaagcagaggccccgaggttttggatttattactttcgaggacgaacaatcagtggaccaggctgtcaacatgcattttcacgacatcatgggcaaaaaagtggaagttaaacgagctgagcctcgggacagcaagagccaagcgccgggacagccaggtgccagccagtgggggagccgggttgtgcccaacgctgccaatggctgggcaggccagcccccgcccacgtggcagcaaggatatggcccgcaaggaatgtgggtgccggcaggacaggcgattggtggctatggaccgccccctgcaggaagaggagcccccccgccacccccaccgttcacctcctacatcgtgtccacccctcctggaggctttccccctccccagggcttccctcagggctacggtgccccgccacagttcagttttggctacgggcctccacctccaccgccagatcagtttgcccctccgggggttcctcctccaccagccactcccggggcagcacctctggctttcccaccgcctccgtctcaggctgccccggacatgagcaagcccccgacagctcagccagacttcccctatggtcagtatggcctgggttcctattctccagccccgccgggctgcggcccacactttgtttacagtcttatggtcaggctgagcagtgatgtggcctagcaggttacgggcaggacttgagtggcttcggacagggcttctcagaccccagccagcagcctccttcctacgggggtccctccgtgccagggtcggggggcccccccgccggcggcagcggctttggacgagggcagaaccacaacgtgcaagggttccacccctaccgacgctagcccgcggcgccgcgacgtctgcacggcccagacccaggattccaaacttgtgaactcgtgacaatcacaaacttggcggcaaagtggcgactcaaccttgggggggggggcggggggagggcgcgaggcttttggagcggctgtgggtgtcgtctggactgaggtttttaaatatttctttctctaacccatcagcacaataaaaaaaagtcactggttcaacaacagggtttaaaaaaaatgtcttcagctttaattcaaaacttcaggtttctttttcttccttttttttggaaattattttcctgagccttttgttttacggtatattgtaaacttttatgttaaagaaaaaatatacatttacaaattgtgagatttttaagagaaattttctacgatgtatactggcttattttttaatttaaaacggggtttccgtcggcactggtggagggggtgcgctgttagtcccctcgctcctggctttgggggttgggacttggtggtccagaaactctgggagcttctagaagaaatctactgagtgtatttctgttttttgtttaattccttgcttttgtcgactgacctgcttggtagtgtctgaggtgaactgtgggggttgcgcacagccagccgcgtggatcccacgcagcgctgaaccgaaccgagtaggaagcctttctccccaggcacgtggcttcagggcgtttcccattgaccagtttgaccctggtttgaataaagagaagtgcgtttggattagaaa

SEQ ID NO: 1133 - DNA, 2715 bp, Homo sapiens
  source 1..2715: mol_type = genomic DNA
aggttgttaccatggagatggctaacagctagagcaggctgtcctcggagggagacattccatctccagacacccagagacgctccagaatggaggtcctgagggagaaggtggaggaggaggaggaggccgagcgggaggaggcggccgagtgggctgaatgggcgaggatggagaaaatgatgaggccagttgaggtgcggaaggaggaaatcaccttaaagcaggagacgctcagagacctggagaagaagctgtcagagatccagatcactgtctcagcggagctcccggcctttaccaaggacactattgacatctccaagctgcccatttcctacaaaaccaacacacccaaggaggaacacctgctgcaggtggcagacaacttctcccgccagtacagccatctgtgcccggaccgcgtgcccctcttcctgcaccccctgaacgagtgtgaagtgcccaagttcgtgagcacaaccctccggcccacactgatgccctaccccgagctctacaactgggacagctgtgcccagtttgtctccgacttcctcaccatggtgcccctgcctgaccctctcaagccgaccatcaagaaggaggaaaaggtgctgcctaagaagtataccatcaaaccccccagggacctgtgcagcaggtttgagcaggagcaagaggtgaagaagcagcaggagatcagagcccaggagaagaagcggctgagggaggaggaggagcgcctcatggaagcggagaaggcaaagccggatgccctgcacggcctgcgggtgcactcctgggtccttgtgctatcggggaagcgcgaggtgcctgagaacttcttcatcgacccattcacaggacatagctacagcacccaggatgagcacttcctgggcatcgaaagcctgtggaaccacaagaactactggatcaacatgcaggattgctggaactgctgcaaggacttgatctttgacctgggtgaccctgtgagatgggagtacatgctcctggggactgataagtctcagctgtccttgactgaagaagacgacagtgggataaacgatgaggatgatgtggaaaatctgggcaaggaggatgaggataagagcttcgacatgccccactcgtgggtggagcagattgagatctccccggaagcatttgagacccgctgcccgaacgggaagaaggtgattcagtacaagagggcaaagctggagaagtgggccccgtacctcaatagcaatggccttgtgagccgcctcaccacctatgaggacttgcagtgtaccaatattttggagataaaggagtggtaccagaaccgggaagacatgctggagctgaaacacataaacaagaccacagacctgaagacagactacttcaagcctggccacccccaggctctgcgcgtgcactcgtacaagtccatgcaacctgagatggaccgtgtcattgagttttatgaaacggcccgtgtggatggcctgatgaagcgggaggagacacccaggacaatgacagagtactatcaaggacgcccagacttcctctcctaccgccatgccagcttcggaccccgagtcaagaagctcactctgagcagtgcagagtcaaacccccggcccattgtgaaaatcacagagcggttcttccgcaacccagcgaagcccgcggaggaggacgtggcagagcgcgtgtttctggtcgcggaggagcgcatccagctgcgctaccactgccgtgaggaccacatcacggcctccaagcgcgagttcctgcggcgcaccgaggtggacagcaaaggcaacaagatcatcatgacgcccgacatgtgcatcagcttcgaggtggagcccatggagcacaccaagaagctgctctaccagtacgaggccatgatgcacctgaagagggaggagaagctgtccagacatcaggtctgggagtcagagctggaggtgctggagattctgaagcttcgagaggaagaggaggcggcgcacacactgaccatctccatctatgacaccaagcggaatgagaagagcaaggaatatcgggaggccatggagcgcatgatgcacgaagagcacctgcggcaggtggagacccagctggactacctggccccattcctggcccagctcccgccaggagagaaactaacatgctggcaggcggtgcgcctcaaggatgagtgcctcagcgacttcaagcagcggctcatcaacaaggccaacctcatccaggcccgctttgagaaggagacccaggagctgcaaaagaagcagcagtggtaccaggagaaccaggtgacgctgacacccgaggatgaagacctgtacctgagttactgctctcaggccatgttccgcatccgcatcctggagcagcgcctcaatcgacacaaggaactggccccactgaagtacctggctctggaggaaaagctctacaaggacccacgcctgggggagctccagaaaatattcgcttgatgtccctcctggggcctcagccagagctgccagagaaaggaaacctcttcccgcagcctggctcctgtgttccctctatccagccaatgcctgtttacacagacacctggcctcactgccagcccacctcccctacagccctgtttgttcctgcttctcatgattttcctgtaaataaacacactcttaatttgcc

SEQ ID NO: 1134 - DNA, 1193 bp, Homo sapiens
  source 1..1193: mol_type = genomic DNA
cagtcagatccatcatgtggccactgacagcccttctgctcctggttccaagcagtgggcaagctgctactctggagaagcccatattgtctctacatccaccttggaccaccatcttcaaaggggagcgggtaactttgaagtgtgatggataccacccactgctcctggagctccagcccatcagcactctctggtatttgggccacctacttctgccctctcacaagaagagcattgaggtgcagacaccaggggtgtatcgatgccagacacggggagcacccgtcagtgaccccatccacctctctgtatccaatgattggctgattctgcaagtgccctatgcgccagtgttcgagggtgagccgctagtcctgcgctgccgcggctggtacgacaaggtggtctacaagcttcactactaccacgacggccaggccgtgcgctacttccactccagcgccaactacactgtgttacaggcgcgtgccagcgacagcgggcgctaccagtgctcgggcaccatgcgcatcccggtggagagcgcgcccatgttctccgctaaggtggctgtgacagtgcaagaagcgcgacacgccgctgcagttcgcgttttacaagtacagccgcgcggtgcgccgcttcgactggggcgccgagtacacagtcccggagcccgaggtcgaggagctcgaatcgtactggtgcgaggcggctaccgccacccgcagtgtccggaaacgcagtccgtggctgcagctcccggggccgggttctcccctggacccggcctccaccaccgccccagctccatgggccgcagccttggctcctggtaataggccgctttccttcagaaagcccccggtgtccagatcggtcccgttggtcacctccgtccggaacaccacctccaccgggctgcagttcccggcgagcggcgccccgactgcggggccacccgcctgcgctccgccgacgcccttggaacaatcggctggagccctgaaacccgacgtggaccttctgctccgagaaatgcagctgctcaaaggccttctgagccgggtggtcctggaattaaaggagccacaggccctccgggagctcaggggaacgcccgagacccccacctctcactttgctgtgagcccgggaaccccagagaccactcctgtggagagctgagg

SEQ ID NO: 1135 - DNA, 1439 bp, Homo sapiens
  source 1..1439: mol_type = genomic DNA
gcggcttccggtcccggctcagcctccgacccaggtggtctggagcctgccgggagagtggtggcatctgagaggctggtcgtggactgtggttgggggaggtgggagctgttttaaccgtgtgccccctctcctgtgccggcgtgggcatcccccggggcagtggaacgcgggcgctcctccagcttccgagtccagccagcctgggcgcggggcgccgcccccgagacacccgaggagtccgttcctccctggttacgtggactgtggagctggtctcttgtggctcagcgccgtgcggaggttgaagcgtacctgcggaggtcgcaccagggcgtgaggaggaggaggaagggcatgagccgagcttgaggaatccgtgctccaaactctacactcaagggtggcccttgggtagggtgaagatcccctgtctttatcctagttccacaccttggtgtgggttactgggtgcaggatgaactgtcgctcggaggtgctggaggtgtcggtggaggggcggcaggtggaggaggccatgctggctgtgctgcacacggtgcttctgcaccgcagcacaggcaagttccactacaagaaggagggcacctactccattggcaccgtgggcacccaggatgttgactgtgacttcatcgacttcacttatgtgcgtgtctcttctgaggaactggatcgtgccctgcgcaaggttgttggggagttcaaggatgcactgcgcaactctggtggcgatgggctggggcagatgtccttggagttctaccagaagaagaagtctcgctggccattctcagacgagtgcatcccatgggaagtgtggacggtcaaggtgcatgtggtagccctggccacggagcaggagcggcagatctgccgggagaaggtgggtgagaaactctgcgagaagatcatcaacatcgtggaggtgatgaatcggcatgagtacttgcccaagatgcccacacagtcggaggtggataacgtgtttgacacaggcttgcgggacgtgcagccctacctgtacaagatctccttccagatcactgatgccctgggcacctcagtcaccaccaccatgcgcaggctcatcaaagacacccttgccctctgagcgtcgctggatctctgggagctccttgatggctcccagaccttggcttttgggaattgcacttttgggcctttgggctctggaacctgctctgggtcattggtgagacttggaaggggcagcccccgctggcttcttggttttgtggttgccagcctcaggtcatccttttaatctttgctgacggttcagtcctgcctctactgtctctccatagccctggtggggtcccccttctttctccactgtacagaagagccaccactgggatggggaataaagttgagaacatgagtttgggctg

SEQ ID NO: 1136 - DNA, 2536 bp, Homo sapiens
  source 1..2536: mol_type = genomic DNA
ctgctgccggcccctcttccccgacggctaataataaacccgggttcctgtttcccggccgcggccactccagattcggggctgaggggctcactctgcaaccaaggcacgtgcattctggtcatcccacgcggggagcgcgcgcaaggcccgcccagcccccacatgccagccccaccctccagtcggtccggacgccgacgcctttttgaccctcgctgtgcccggccctcctcatctggcctgcccagggcttggtgctggcggggtccagctgctccaatccctcctcctctgctctgccctgccctgccctggcctgccccggcgccctccctcagcccgggtatcaggcgagaggcggagctggcccggcgcgccccgcccccgctgtagaaagggccgggcgagtgttactcgcggtcatcccggcctgggccttttatctcggtgctgccgggggaggcgggaggaggagacaccaggggtggccctgagcgccggcgacacctttcctggactataaattgagcacctgggatgggtagggggccaacgcagtcaccgccgtccgcagtcacagtccagccactgaccgcagcagcgcccttgcgtagcagccgcttgcagcgagaacactgaattgccaacgagcaggagagtctcaaggcgcaagaggaggccagggctcgacccacagagcaccctcagccatcgcgagtttccgggcgccaaagccaggagaagccgcccatcccgcagggccggtctgccagcgagacgagagttggcgagggcggaggagtgccgggaatcccgccacaccggctatagccaggcccccagcgcgggccttggagagcgcgtgaaggcgggcatccccttgacccggccgaccatccccgtgcccctgcgtccctgcgctccaacgtccgcgcggccaccatgatgcaaatctgcgacacctacaaccagaagcactcgctctttaacgccatgaatcgcttcattggcgccgtgaacaacatggaccagacggtgatggtgcccagcttgctgcgcgacgtgcccctggctgaccccgggttagacaacgatgttggcgtggaggtaggcggcagtggcggctgcctggaggagcgcacgcccccagtccccgactcgggaagcgccaatggcagctttttcgcgccctctcgggacatgtacagccactacgtgcttctcaagtccatccgcaacgacatcgagtggggggtcctgcaccagccgcctccaccggctgggagcgaggagggcagtgcctggaagtccaaggacatcctggtggacctgggccacttggagggtgcggacgccggcgaagaagacctggaacagcagttccactaccacctgcgcgggctgcacactgtgctctcgaaactcacgcgcaaagccaacatcctcactaacagatacaagcaggagatcggcttcggcaattggggccactgaggcgtggcgcccgtggctgcccagcaccttcttcgacccatctcaccctctctcattcctcaaagctttttttttttttcctggctggggggcgggaagggcagactgcaaactggggggctgcgtacgtgcaggaggcgcggtggggctgcgtggaggagggggccacgtgtgagagagaagaaaatggtggccggagatgggagggcccaaggaacctcctgggagggggcctgcattctatgttggtgggaatgggactgggctgacgccctgcattcagcctgtgcctttcctggggtttcttttctgttcttttcggaggagagggcccgagaaggggccataccagggcgcggcgctgggttgccacacttgggaaagcagcccggagctgggtgctggggaaggcggggcgcgtagcctcccgccgccctgcggttgggccggtggaggcccaggcgttgctaggattgcatcagttttcctgtttgcactatttctttttgtaacattggccctgtgtgaagtatttcgaatctcctccttgctctgaaacttcagcgattccattgtgataagcgcacaaacagcactgtctgtcggtaatcggtactactttattaatgattttctgttacactgtatagtagtcctatggcacccccaccccatccctttcgtgccactcccgtccccacccccaccccagtgtgtataagctggcatttcgccagcttgtacgtagcttgccactcagtgaaaataataacattattatgagaaagtggacttaaccgaaatggaaccaactgacattctatcgtgttgtacatagaatgatgaagggttccactgttgttgtatgtcttaaatttatttaaaactttttttaatccagatgtagactatattctaaaaaataaaaaagcaaatgtgtcaactaaattggacaagcgtctggtcctcattaatctgccaatgaatggtttcgtcattaaataaaaatcaatttaattgatttactagcaaaagtaaa

SEQ ID NO: 1137 - DNA, 821 bp, Homo sapiens
  source 1..821: mol_type = genomic DNA
attctcatccctgtgctcagagctctcaagcacccacgatggccttctcaggccgagcgcgcccctgcattatcccagagaacgaagaaatcccccgagcagcccttaacactgtccacgaggccaatgggaccgaggacgagagggctgtttccaaactgcagcgcaggcacagtgacgtgaaagtctacaaggactcttctatgagtttgaaggaagaaagtactgtgaacatgactttcagatgctctttgccccttgctgtcatcagtgtggtgaattcatcattggccgagttatcaaagccatgaataacagctggcatccggagtgcttccgctgtgacctctgccaggaagttctggcagatatcgggtttgtcaagaatgctgggagacacctgtgtcgcccctgtcataatcgtgagaaagccagaggccttgggaaatacatctgccagaaatgccatgctatcatcgatgagcagcctctgatattcaagaacgacccctaccatccagaccatttcaactgcgccaactgcggacaggaaggatctgactgccgatgcacaggagctgaaaggggagctatactgcctgccatgccatgataaaatgggggtccccatctgtggcgcttgccgacggcccatcgaagggcgtgtggtgaacgccatgggcaagcagtggcatgtggagcattttgtttgtgccaagtgtgagaaaccctttcttggacatcgccattatgagaggaaaggcctggcgtattgtgaaactcactataaccagctatttggtgatgtttgcttccactgc

SEQ ID NO: 1138 - DNA, 2600 bp, Homo sapiens
  source 1..2600: mol_type = genomic DNA
gaactgggccaagcgcccccggaggcgctaagcttgcgccctgaggcggtttccgttcccggacgtttggactctgtcctggagaaggggaaggaaaaagtaagacgtagaagtacactgagacttcgtcacacataaaacaagcacgacaaagaaagagggcgcgaagggactcctggaagaaattgagtctacatttaagatcaccctaaaagtagtgacggcctcttcattactccaaaccccagatttaagtcggtaggacgtcttcgcgttgacttgtggggaatgtagtttcgatgctgccggcgcgttttgtttgcgacagaaactacaacccccaggggccaccgcgacgttgcctgtgggtgcccgcgaaccaacggttagcggtggcaggggctgactgagagcgtctgcttgtgcctggtacctagtacaaacttaataaatgtgtgacgcaagaataaaggaatgaatgaatggaagaatgatataatgccacagaactttcaaagatgggactgtctagttgcaaaaacaagctcagggatcccactgattctactttacgataatggattctgaattaatgcatagtatagtaggaagctatcataaacctccagaaagagtatttgttccctcattcacccagaatgaaccatctcagaattgccatcctgcaaacttagaagttacctctcctaagatacttcatagcccaaatagccaagagaagcaactagaatatacaaagagaatggttctcaacgtagagcgagaaaagaacatgatcctagaacaacaggcccagcttcagagggaaaaagaacaagatcagatgaagctgtatgcaaaacttgaaaagcttgatgtcttagaaaaagagtgtttcagacttacaacaactcagaaaactgctgaggacaagattaaacatttagaagaaaaacttaaggaagaagaacatcagcgtaagctatttcaagacaaagcttctgagcttcaaactggacttgaaatcagtaaaattataatgtcttcagtttcaaatctaaagcactccaaggaaaagaagaaatcttcaaagaaaactaaatgtataaagagacgaccaccttggcaaatttgttcaaagtttggagcactgccttttgtggctgaaaagccttctagaacaacttcctggtgtaaagctattcctcctgactcagaaaagtccatttccatttgtgacaatttatctgaacttttgatggcaatgcaagatgagctggaccaaatgagcatggagcaccaagaactactgaaacaaatgaaggaaactgaaagtcattcagtctgtgacgacatagaatgtgaactagagtgtttactcaagaaaatggaaattaaaggagaacaaatctccaaactgaagaagcatcaagacagtgtctgtaaactgcagcaaaaagttcaaaactcaaagatgagtgaagcttcaggtattcagcaagaagacagctaccctaaaggatcaaagaacataaaaaatagccccagaaaatgtttgactgacactaacctttttcagaaaaacagcagctttcatccaatacgagttcataatcttcaaatgaaattgagaagagatgatatcatgtgggaacagtaacaaaacagcaaaactgtcaccttaatgaactttgtcagtgagaccttgaattgtctaaagtggttttaatttaatataactttgtgacattttgaatcatgtttctagtttctataaaacatgaagttgcagtatttaaaaattaatgcctaatgacctggtgggttccaaataataaattaattgcttttttatttttcttattgattgaagcccgtaacctcatcttgtcttagaaacattgttggctttgcagatatcttaagctaaatttaagaaattgtactagattgacaatattcaaaattgagttaaatccaagctacaagtaccattcattccacttttcatttagtaggtttggaaccttaaaaaccaatgttcaatgaacagagttcagaaagatcatttagctttcctggtgccttctttctattttgttttagagctgtgaaatgtttttctcttttggaaaaggaaaaacttaatagttacacagttttgtgaagaagcctttaatccaagttttatgagacagtaggaacctatagctacttaatttttaggagacagtaattcagttgcagaagctttcctctgctattcccattctcttttacaaaactagttttttttaaaaaatcaatgatcaattttatcttactactttataacttttgctgacttttattctttgcattgtatgtaatgtccatcagtataaattgagactgtgaatttctaggacccacaaaagtggtattttttttttgtacaagaaagtatagaggaagaggaagctgggcattaaattacctcatccagcagaaattcacggtagtatggtatatttttattttttatattttaaaatcaataatgtcaaatgtcattgtgtatgcatgctttataataaatttacacttgatcatttttctgg

SEQ ID NO: 1139 - DNA, 2221 bp, Homo sapiens
  source 1..2221: mol_type = genomic DNA
cgccgcagcgcgcgcccttcccctcctcaccgctacctgctccggttccggcgctcggccgctccgttgccctcgggcgccttggttgcggccctccgctgaggagccatcggaccaggccgccgcggagccgggccggacgcgggcgccaggcccggggacgaacgccgtaacagggagcgcgaggcaggcacggcgcagggacgcgagtgcgacgcgctcggccatcggcccctgggctggcggccaggcccgagcaatcggcggccgagcggggcggggctcagagcggaggcggcggccgcgagggcggggcggccgggcctggctgcgcccccggacctcgcgggaccgcggcggcgcaggaagaagtccccaaggagacttcgccataggagttcacaggaaatattgaaatgtcaggttccactccatttcagatgagattagttcatttagaccttaaaggagctccaccaaaggtctcgtacctctcagagatttttcctctgttccgtgcgctaggtgcaaacggcctcctcattgagtatgaagacatgtttccctacgagggccctctgaggctgctgagggccaagtacgcctacagcccctctgaaatcaaagagatcttgcatctggctggactcaatgagctggaggtgattcccttggtgcagacatttggacacatggagtttgtgctgaagcacacggccttcgcccacctgcgggaggtgggctccttcccctgcaccctgaacccccacgaggcagagtccctggcgctggtgggcgccatgattgaccaggtcctggagctacacccaggcgcccagcggctgcacatcgggtgtgatgaggtctattacctcggagagggggaggcctcgcgccggtggctacagcaagagcagaacagcacggggaagttgtgcctgtcacacatgcgggcggtggccagcggcgtgaaggcccggcgccccagcgtgacacccctggtgtgggacgacatgctccgagacctgcctgaggaccagctcgcagcgtccggggtgccgcagctggtggagccggtgctctgggactacacggccgacctggatgtgcacggcaaggtcctcctcatgcagaagtaccggcggtgcggctttccgcagctgtgggcagccagtgccttcaagggtgccacggggcccagccaggccgtgccccctgttgagcaccacctcaggaaccacgtgcagtggctgcaggtggcgggcagcgggcccacggactcactgcagggcatcatcctgaccggctggcagaggtacgaccactactctgtgctgtgcgagctgctgcccgcaggagtcccgtccctggccgcctgcctgcagttgcttctacgcggaggatttgatgaagatgttaaagcgaaagtggagaaccttctcgggatttccagcctggaaaaaacggaccctgttaggcaagcaccctgcagccctccctgtccccttcttcccctccccttcccccgcccgtggagacagctgttctcagcagggctctccgcagggagggggccggctccttccctggcagcaacatccttgcccttgtcacacaagtcagcctccatctgcgcagctctgtggatgcgctgctggagggcaacaggtatgtcactggctggttcagcccctaccaccgccagcggaagctcatccacccggtcatggttcagcacatccagcccgcagcgctcagcctcctggcacagtggagcaccctcgtgcaggagctggaggctgccctgcagctggctttctacccggatgccgtggaggagtggctggaggaaaacgtgcaccccagcctgcagcggctgcaagctctgctgcaggacctcagcgaggtgtctgcccccccgctgccacccaccagccctggcagggacgttgctcaggacccctgaggggagagctcatgccagggggctcctgctggaggctgggggggctctgcactgccaaatggcctgggcaatacgggcccacgtgggcgtcgtgccctctggcccagcagtgtcttgcccacactcagttcctgagggccctgggcagcccctgggggagagactagaaaacacagaaggaagcagcacagggagacccgctttgtgatctgcatgtgtgacactgattctttggaaataaagagtggaagctgc

SEQ ID NO: 1140 - DNA, 5778 bp, Homo sapiens
  source 1..5778: mol_type = genomic DNA
gagttcatttgctcgcgtgcaggggaagtctggagaaggcattgtttcaattattaaaagtgtgggggcagtgggcggaacaaacgcgccgactacagaggctggacgtaagcttagcggtggcgcgcgtgcgcagcgccggcccgagttgccaaaacaaaggggatttggtgatggaggctttgttagaaggaatacaaaatcgagggcatggtgggggatttttgacatcttgtgaagcagaactacaggagctcatgaaacagattgacataatggtggctcataaaaaatctgaatgggaaggacgtacacatgctctagaaacttgcttgaaaatccgtgaacaggaacttaagagtcttaggagtcagttggatgtgacacataaggaggttggaatgttgcatcagcaggtagaagaacatgaaaaaatcaagcaagagatgaccatggaatataagcaggagttgaagaaactacatgaagaattatgcatactgaagagaagctatgaaaagcttcagaaaaagcaaatgagggaattcagaggaaataccaaaaatcacagggaagatcggtctgaaattgagaggttaactgcaaaaatagaggaattccgtcagaaatcgctggactgggagaagcaacgcttgatttatcagcaacaggtatcttcactggaggcacaaaggaaggctctggctgaacaatcagagataattcaggctcagcttgtcaatcggaaacagaaattagagtctgtggaactttctagccaatcagaaattcaacacttaagcagtaaactggagcgggctaatgacactatctgtgccaatgagttggaaatagagcgcctcaccatgagggtcaatgacttggttggaaccagtatgactgtcctacaggagcagcagcaaaaagaagaaaaattgagggaatctgaaaaactattagaggctctgcaggaagaaaagagagaattgaaggcagctcttcagtctcaagaaaatctcatacatgaggccagaatacaaaaggagaagttacaagaaaaagtaaaggcaactaacactcaacatgctgtagaagctataaggccacgggaagaatctctggcagaaaagaagtacacctctcaagggcagggggacttagacagtgtgctctcccagttgaattttacccatactagtgaggaccttctgcaggcagaggtgacttgtcttgaaggcagtttggaatctgtgagtgcaacgtgtaaacagctgagccaagaactaatggaaaaatatgaagaactgaagaggatggaagcacataacaatgaatacaaagcagagattaagaagttgaaagaacagattttacagggtgaacaaagttacagttctgcactagaaggaatgaagatggaaatctcccatctaactcaggagttacatcagcgagatatcactattgcttccaccaaaggttcttcctcagacatggaaaagcgactcagagcagagatgcaaaaggcagaagacaaagcagtagagcataaggagattttggatcagctggagtcactcaaattagaaaatcgtcatctttctgaaatggtgatgaaattggaattgggtttacatgaggcaaaagagatttcactagcagacctccaggagaattatattgaggcattaaataaattagtgtctgaaaatcaacaactacagaaagatttgatgaataccaaatctcagctggagatttctactcagatgtgcaaaaaacaaaatgacaggatctttaaaccaacacacagcagaacaactgagttcaagaatacagagttcaagccaacccatggccagcacagacatgatggaataaagactgagcactacaaaacagatcttcattctccaagaggacaagcgtcggatagtataaaccccatgtctagggtgctaagccccctgagtcctcaaatcagcccttgcagctccaccaggtctttgacttcctactctctatgtaaaactcattctttgccttcagcgctagatacaaatgaagccaatttttctgacactatgtctgagagtatgaatgaccaagaagagtttatatcttcgtgttccttgcctgtatctccccttggttcaatagctaccagatttttggaagaggaggaactgaggtctcatcacattctagagcgcttggatgcccatattgaagaactaaaaagagagagtgaaaagacagtgagacaattcacagccttaaagtagcctcttaaaaaaatcactatcttggaaataaaaataaacaccaaagagttactgtcatctgaagtagcagctctttaaaaacatgaagagataaaattataaaaatgatacatctaaagcagtggtgaagaaagctgaaaaactgatacttttgataggcattttctctgcactggtttgtttaaaggacttcttccagcaataagttgaaagaataaaccactttgctagacttttttctcatacgaatatttattatcataaagtgatacttaccttgctgacttaaatgtgaatagctatgtactaattgaaataaggattttatgatacatgttgaaaataaagtaactgcaggaactttctttaggggaaatgtgtagaagcatggatttaggggtcaaacatacctggatcgatagactggttttgccacttaccagccaacggggcttgttatttactgggctggtagcccctcctagccaaggggctggtagtgtgtaaagtcaggctggtagtgaataaggggggggtgtgctaaagaaccttatcaagcagtcctctcttgctcaacactcatgcagaggagagaggcagggagggcaagggactggctgtcatgcacggtgcccatggaatatccattggaaataaatgttcatcgtctgcactgctgaggacaagtttagatgggagacaaagatctggatgttgatgtgccgcaggcatttgaaacgatgggagttgataagatccaccagggaggctgtggagagagagaggagcaggaggctgggtttggggccctgaaagatgccagcatctgaggatcacaggaaatagatctagcaaaggaactagaatgtgcagttacagatgagaaaggtcagtgtagtgtacttgccagctcaagggtgtggcctctgtgaaccctctttctgtagtggatctttcccatcagcgtaaaacatcctgttatttcccctttttaaataaaacctcagttttttttaatgcctctcttttactgctctgtatgtttgcttcccttcacccaaacacttctggaaagagttgtctgcagtgactctttccagttcctcaccccgccccaccgtagttctcttcctaaccctctccaacaccacttccatccccagactgctttcttgctcttgagttcaccagtgacctaatcagtgtctgagcatcattcagcacagttggactctctcttggcttctgtgacctggaacttctggtttcctctctacctcatcctccactccatctcatggcttttcctcttctaacctctaagtcagagggccccctagagctctgtcatgggttttctccctcagcattctcttccctagaagtttccattccattctcaagctcttaataccacctataggccagtgacccttacatttattactaatcttgacctctccccagagctgctgtcttagatacctagctgcttatgcgatgtcttcacttggatatctgacaaacatcttgtttccaagagagaactctttattctccctcttgctaagattccatatcaggacatagcattatgtttgccagttcctaggagttacttataattccttccttacccacatccgcatatccagtcatttgggaggtcctgtcatttcttcccccagaatcttatctcagacccaaccgtttccctcctgcacttctaccacctgatccagactacttctctctcaccctgattctggcagtagcctcctaactgatagtactcacaccagtaattcagggagcttctggagttatcctttagaaatgtaaatgaaacagtgtcaccactgcttcccttcagactcttccaaggcttctctttttttttttattgagacagagtctcactctgtcgcccaagctgcagtacagtggcaggatctcggctctctgcaacctccacctcccgggctcaagtgattctcctgccttagcttcccgagtagctgggattacaggcgcatgccaccaggcccagctaatttttgtatttttagtaggaacagggtttcaccatgttggtcaggctgatctcgaactcctgacctcaagtgatccacccgcctgagcttcccaaagtgctgggttataagcgtgagccactgcacccagccccaaggcttcttactgcactcagaataaaatccaaatgaattagtatagcctacagagtgtcaataatctgggcctaatcacccattgcatcatcctttactgtgctccacccatgctggcgtcctttctgtttattgagtgcagcaagctttaacctgttcgggtctttcatttgcagtttaccctgaatattccctttctcttacctcacctttgattggcgttttcccccttgcagacctgcactctggcatcctctcctgagcaagccttctttgattgctgcctcccaaacctgtttctccccatttctctagctcattggcctgtgttacttgcttcatagtgctcactactatctgaaatcatttcattacttgatttatgtttgtactgtctatttctgtctttagaattaaaactccttgagggcaaggactttgcttctctggttcatggtgggatcctcatcacccagcacaagcccaacacttaggagaggctcagctagtttgaaccaatggaaaatgccattcctgaggtgcaccacatcgtttcttttgtgttggtgtgcatgctgtccttcagtttgtctcctcttcccacaccctgtcatgtgctcctaaaactccccctttacttggctactttatctggcttggcaaagctttcccatatcccctgacccatgtcagggaacgtttctcctcattgctgtcatggcaccctgtgtgtggctctgaccagactttgctatccgctttgatttctgtctttcaggggctaagtcctgcctacatcctcagtcagcatgctgcctaacacataacagatcctaagcaaatattgggtggatgaaaatcactaccattcaaggcttcattgtatttatcagtaaaactgaaataatatctaatggggtcgagaagatttactgaaaatatatatttgaaagggctttgcagttttaagtactgtacctatgtgcattgctgttacattcaggagatttctgagttttagacagtcccaagcttcagcttaaaatctgtagactgcagcccgtttctgaaacgtttgtactacgtgttgactaggaggaacaatgacagactctgtagtcaccggaaatacttaaggaatcatgaggtactatgtatttccttaaattatactgttttttaaagctgaagtatctaatagttaatgggttgtccaaatttgtcagaacatttgactgtaatttaatgtctcaccatttttcaaaaagatatattaataccaaatattaaaatgtgtcaagact

SEQ ID NO: 1141 - DNA, 5304 bp, Homo sapiens
  source 1..5304: mol_type = genomic DNA
cccatctctacgaaaaatacaaaaattagccaagtatggtggccggcgcctgtaatcccagctactcgggagactgaggcagagaactgcttgaacctgggaggcagaggttgcagtgatccgagatcgcgtcactgcactccagcgtgggcgacagagcgagactccgtttcagaaaagaaaaaaaaaaaaaaaaaaaagggagtcggggtggagctctcattggctcgttgcatgtgagtgtccctacggcctagaaatacaagagaagcacatcggaacgggctggaaatccacccagttaactagagggctttgaaccttttattaacttggaggttgactctcctgtcaactcgattcccttttggctgtttggcagggtcagtgagacatcccctgggtcgctcgaccccgtaggacggttcagggagccctccaggtcttcgtttctcctcttccccgcacagtgctgttatccagctgggggatccaacgcacacttaaggctccagcaaagtggctccgctgccggatgggagtgccccagtgtgctggatgaagctggcgcatgcaccatgtcatcatgtgtctctagccagcccagcagcaaccgggccgccccccaggatgagctggggggcaggggcagcagcagcagcgaaagccagaagccctgtgaggccctgcggggcctctcatccttgagcatccacctgggcatggagtccttcattgtggtcaccgagtgtgagccgggctgtgctgtggacctcggcttggcgcgggaccggcccctggaggccgatggccaagaggtcccccttgacacctccgggtcccaggcccggccccacctctccggtcgcaagctgtctctgcaagagcggtcccagggtgggctggcagccggtggcagcctggacatgaacggacgctgcatctgcccgtccctgccctactcacccgtcagctccccgcagtcctcgcctcggctgccccggcggccgacagtggagtctcaccacgtctccatcacgggtatgcaggactgtgtgcagctgaatcagtataccctgaaggatgaaattggaaagggctcctatggtgtcgtcaagttggcctacaatgaaaatgacaatacctactatgcaatgaaggtgctgtccaaaaagaagctgatccggcaggccggctttccacgtcgccctccaccccgaggcacccggccagctcctggaggctgcatccagcccaggggccccattgagcaggtgtaccaggaaattgccatcctcaagaagctggaccaccccaatgtggtgaagctggtggaggtcctggatgaccccaatgaggaccatctgtacatggtgttcgaactggtcaaccaagggcccgtgatggaagtgcccaccctcaaaccactctctgaagaccaggcccgtttctacttccaggatctgatcaaaggcatcgagtacttacactaccagaagatcatccaccgtgacatcaaaccttccaacctcctggtcggagaagatgggcacatcaagatcgctgactttggtgtgagcaatgaattcaagggcagtgacgcgctcctctccaacaccgtgggcacgcccgccttcatggcacccgagtcgctctctgagacccgcaagatcttctctgggaaggccttggatgtttgggccatgggtgtgacactatactgctttgtctttggccagtgcccattcatggacgagcggatcatgtgtttacacagtaagatcaagagtcaggccctggaatttccagaccagcccgacatagctgaggacttgaaggacctgatcacccgtatgctggacaagaaccccgagtcgaggatcgtggtgccggaaatcaagctgcacccctgggtcacgaggcatggggcggagccgttgccgtcggaggatgagaactgcacgctggtcgaagtgactgaagaggaggtcgagaactcagtcaaacacattcccagcttggcaaccgtgatcctggtgaagaccatgatacgtaaacgctcctttgggaacccattcgagggcagccggcgggaggaacgctcactgtcagcgcctggaaacttgctcacgaagcaaggcagcgaagacaacctccagggcaccgacccgccccccgtgggggaggaggaagtgctcttgtgagaggcagtccctgcgtggaaagttgctgggcccccgcccccggctcccccgcacgcatgcatccactgcggccggaggaggccatggagcccgagtagctgcctggatcgctcgacctcgcatgcgcgccgcgtcgcctctggggggctgctgcaccgcgtttccatagcagcatgtcctacggaaacccagcacgtgtgtagagcctcgatcgtcatctctggttatttgttttttcctttgttgttttaaaggggacaaaaaaaaaaaaaggacttgactccatgacgtcgaccgtggccgctggctggctggacaggcgggtgtgaggagttgcagacccaaacccacgtgcattttgggacaattgctttttaaaacgtttttatgccaaaaatccttcattgtgattttcagaaccacgtcagatataccaagtgactgtgtgtggggtttgacaactgtggaaaggcgagcagaaaactccggcggtctgaggccatggaggtggttgctgcatttgagagggagtagggggctagatgtggctcctagtgcaaaccggaaaccatggcaccttccagagccgtggtctcaaggagtcagagcagggctggccctcagtagctgcagggagctttgatgcaacttatttgtaagaaggatttttaaattttttatgggtagaattgtagtcaggaaaacagaaagggcttgaaatttaataagtgctgctggaaggggattttccaagcctggaagggtattcagcagctgtggtggggaaacatttctcctgaaagactgaacgtgtttcttcatgacagctgctcaaagcaggtttctgagatagctgaccgagctctggtaaatctctttgtcaaattacgaaaacttcagggtgaaatcctatgcttccatgtacattacatggcttaagattaaacaaaaacatttttcaagtctctaactagagtgaactctagagcacagtagttcagaaactatttagagcttccaggatatatttcacagcttcaggcatgtgatcagttagagccgatgaaacctatgcccgcctgtatatatattagcagcttagctagttcataacctgtatattctaaagactgctaaggttttgttttcattttaaatcctagctgattgttgtggtcaatgaaatacccagtttctggagggccaggtgggaaatgctttcactggaccaacacacaaatgatcatcctgaggatctgagcttccctagactccacacaataaccttggggcacccttttagagaagactgttgaaacccacagcactcgttggggtatgaggaaaccagggcttggcacaggaagttcccctttgtagctaaaagtccagaaagaaagggttcatctttttgacttccaactgatattgggaagtttggttgaggttcaagtgtgactccttccagagccacaggtaggggagtgtgaagttgagggggaggaaagctggaaggactctgccttgggagattcccagctctgctttccagcgcttggtggaatctgggctggggaaagacggcaccgggaaactctgcttccccattgtttccatctgatcagctgtggtgtgaggacttctcagacaaaggcaaggcctcgtgcccctgcccagcccattcatggagccctgggccttcttggcttccatagatcctaagctcttgactgtagtttagccagacttgttttgctatcttataagcagttcagaattagggaatgctggttttgaagagcaaaggacaggtagtctagagagggtcgtctggcctgcttgctgggtctttgtaacccagcacttcctcttgccctcctggctttatgtttatggggagaggactcaatagctccaccccttctggcaccagatggggcttggttagtttgcaataagcaccttgcagaggttaaagccagcgggtccctagtcttaggcccagcctgcttgtgtgggctctggcctggcctggtggctggcccagggggcagcagtgcttagagcttctgcagggcttctcttgtttacacagctgcatcagacaatgccatttctccccaccacggaaccttccatctaagatttcttccagggaatgccagcaatcaggcagcacccagctgtgggggcagtggggtgggggagacccacattgatgactttttttttttcttttaatgaagaaacaccaaagaaagctgtggaaaggacctgccccacatgaaaaggataagccaagatggctgtaaacacagagcatttgagctgccactcttggagcacattgatttttcaaaagccagctctgtcaggaaaggaggtgctgttatgagcagctcttccagtgggcaaagaggacgcccataatttcttccattgctagctcatctgtgggaccaatttggtgtaagcaacctgtggcctgcacttgtggcctcgaaggaagcacaaaccctccatccacttcccatttcctctgcccttttccacctcccccttccatcccaccagctgccagtggctcccagaaagccttattgagccccttgttgacacttggggctgcggaggcctctccctactggtctggcctttcctgagaggcaggtcttccgtcctcagagcctttctggaacaaggagaatgcctgtgcaggtggacacacaggcctggcctgtcgctctcacttgtcttccagcggggagcttcacgttgccgagtggaagaaccatgacctccacttgcttccaaggtgctagggaagtttcagggtacgctggttcccctctccagctggaggccgagtttctggggactgcagatttttctactctgtgatcgattcaatgcccgatgcttctgtttcattcccgaccctttctactatgcattttccttttatcaggtgtataaagttaaatactgtgtatttatcactaaaaagtacatgaacttaagagacaactaagcctttcgtgtttttccacaggtgtttaagcttctctgtacagttgaaataaacagacagcaaaatggt

SEQ ID NO: 1142 - DNA, 3894 bp, Homo sapiens
  source 1..3894: mol_type = genomic DNA
tgaggggcgaaccaagatggcggcggttttggctgtgtgaggaagacggaagagacggcggcggagggaaaccgacttccactagtccgggtcgcttgggcggccgggggccctcagagtctcccgggcagtggtagcagttgcagcaggatcaggcgcctgtcggcttctgacgtttaaaacagggggagcggaagggagccactggccgcggtggcagggccagggcccctttcctgggcgtctactggcggggcccccgccccggttcccgggcggcacgatgaccgacacccggcggcgggtgaaggtgtacacgctcaacgaggaccggcagtgggacgaccggggcaccgggcatgtgtcgtctggctacgtggagcggctgaagggcatgtccctgcttgtcagggctgagagcgacggttctctacttttagagtcgaaaataaatcctaacactgcataccagaaacaacaggacactctgattgtgtggtctgaagcagaaaattatgacttggcccttagctttcaagaaaaagctggatgtgatgaaatttgggagaaaatatgtcaggttcaaggaaaggacccttccgtggacatcactcaggaccttgtggatgaatctgaagaggagcgttttgatgatatgtcatcgccaggcttagaattgccatcttgtgaattaagtcgccttgaagaaattgcagaacttgtggcatcatctttaccttcacctcttcgtcgtgaaaaacttgcactggcactagaaaatgagggttatattaaaaagctcctggagctttttcatgtgtgtgaagatttggaaaatattgaaggactgcaccacttgtatgaaattatcaaaggcatctttctcttgaatcgaactgctctttttgaagttatgttctctgaagaatgtataatggacgtcattggatgtttagaatatgatcctgctttatcacaaccacgaaaacacagggaatttctaacaaaaacagccaagtttaaagaagtgattcccatatcagatcctgagctgaaacaaaaaattcatcagacatacagagttcagtatatacaagatatggttctaccaactccttcggtctttgaagaaaacatgttatcaacacttcactcttttatctttttcaataaggtagagattgttggcatgttgcaggaagatgaaaaatttctgacagatttgtttgcacaactaacagatgaagcaacagatgaggaaaaaagacaggaattggttaactttttaaaagaattttgtgcgttttcccaaacgctacagcctcaaaacagagatgcttttttcaagactttgtcaaacatgggcatattaccagctttagaagtcatccttggcatggatgatacacaggtgcgaagtgctgctactgatatattctcatacttggttgaatataatccatccatggtacgagagtttgtcatgcaggaggcacaacagaatgatgatgatattttgctcatcaacctcattatagaacatatgatttgtgatacagatcctgaacttggaggagcagtccagcttatgggcctgcttcgaactttagttgacccagagaacatgctagccactgccaataaaacagaaaagactgaatttctgggtttcttctacaagcactgtatgcatgttctcactgctcctttactagcaaatacaacagaagacaaacctagtaaagatgattttcagactgcccaactattggcacttgtattggaattgttaacattttgtgtggagcaccatacctaccacataaagaactacattattaataaggatatcctccggagagtgctagttcttatggcctcgaagcatgctttcttggcattatgtgcccttcgttttaaaagaaagattattggattaaaagatgagttttacaaccgctacataatgaaaagttttttgtttgaaccagtagtgaaagcatttctcaacaatggatcccgctacaatctgatgaactctgccataatagagatgtttgaatttattagagtggaagatataaaatcattaactgctcatgtaattgaaaattactggaaagcactggaagatgtagattatgtacagacatttaaaggattaaaactgagatttgaacaacaaagagaaaggcaagataatcccaaacttgacagtatgcgttccattttgaggaatcacagatatcgaagagatgccagaacactagaagatgaagaagagatgtggtttaacacagatgaagatgacatggaagatggagaagctgtagtgtctccatctgacaaaactaaaaatgatgatgatattatggatccaataagtaaattcatggaaaggaagaaattaaaagaaagtgaggaaaaggaagtgcttctgaaaacaaacctttctggacggcagagcccaagtttcaagctttccctgtccagtggaacgaagactaacctcaccagccagtcatctacaacaaatctgcctggttctccgggatcacctggatccccaggatctccaggctctcctggatccgtacctaaaaatacatctcagacggcagctattactacaaagggaggcctcgtgggtctggtagattatcctgatgatgatgaagatgatgatgaggatgaagataaggaagatacgttaccattgtcaaagaaagcaaaatttgattcataataatggcaacggcctaggatcagtacctgttgaaaaaaactggttctccacccctcccccatacaaaatccacaacaaagcgcagtggtctcttgtgaatgactgacacagatcagcctcttacacttgacttctgctcatcaagtgccaattcaatggagcaggaggaggggatatcatatatttaggggaaagacttaagcctttgagctctccagcttggaccacacattgcccttttctcagggaaggaaatggaaacaaaaagccaacagggcaggggttttgtaagtggaactctggattgactggtcagttgctacaatcagaatatgctttcttggaccatgtttgagactcagaagaatgggcctttctgccataattcttcactagtcaagaatgccagcagtttctttgtataaagagacctgcctttaaaatcatacattctgaacattttagtcaagctacaacaggtttggaaaacctctgtgggggaggggcgagtataaagttttcctcttttttaactgttccctttgcccttcaaactgcagatatttttttttttaagtggggacttctccctacttgattaaagattgagtggaattctagatgtggtcatttgtgtcataatttttttgttttattttgtttttgattttttttttcctcccctgagtgtatgcttagttgttgagtatatatatttgggaccattaaaactttttttgatgtaatataacctaacgttgtgctggtacctgttttaccatgtgtaatttttgttctacatcacagttcttaatttgtttagagttttatgaaagatggtatagtttttattgacaaaagcaaagtaatcttacaactatgtgcatacaaaagcaatactattttgtgactaaatattttatattaaaatttacatcagcaactgtcttgagaattcagggaaatagaatggaatttaaaacttcaacagttttgttaaatctagaaacatgaaattagtattccaaagagattctgaaatttcttttcttggggaaatgacggtacattaaatcaaaattgaggatggatgatttaaaaacatttgacttttgaataataaaaagaaaagtgaagagtaagagaaa

SEQ ID NO: 1143 - DNA, 3037 bp, Homo sapiens
  source 1..3037: mol_type = genomic DNA
cagttcgatcaaggttgacgatgtgtcacactgtgtaagggaatcgcatggagatgggcattccgaactgttaatggggacatgggactccagttgtctctgatcacttgtgtggattttcctggcgtagaacgacagaagccgctagtaagtcgccaagacctacagcaggaattctgcaccaaagggcataaaatcttgttattttaatttgcatctgggagaatgtctgagcaaggagacctgaatcaggcaatagcagaggaaggagggactgagcaggagacggccactccagagaacggcattgttaaatcagaaagtctggatgaagaggagaaactggaactgcagaggcggctggaggctcagaatcaagaaagaagaaaatccaagtcaggagcaggaaaaggtaaactgactcgcagccttgctgtctgtgaggaatcttctgccagaccaggaggtgaaagtcttcaggatcaggaatcaattcatttacagctttccagtttttccagcctgcaagaggaggataaatctaggaaagatgactctgaaagagaaaaagaaaaggataaaaacaaagataaaacctctgaaaaacccaagatcagaatgttatcaaaagattgcagccaagaatacacggattctacaggcatagacttacacgagtttctgattaacacattaaagaataattccagggacaggatgatacttttgaaaatggagcaggaaattattgatttcattgctgacaacaataatcattataaaaagttccctcagatgtcatcgtatcagaggatgcttgtccatcgagtggcagcttattttggattggatcacaatgtggatcaaacaggaaaatctgttatcatcaacaagaccagcagcaccagaataccagagcaaaggttttgtgaacatttaaaagatgaaaaaggtgaagaatcccagaagcggtttatcttgaagcgagataactctagtattgataaagaagacaatcagtcagtttgctcccaggaaagcctttttgtggaaaacaggggcaacagagatggctcagggagaacatctgggagtcgacagagcagctcagaaaatgaactcaagtggtctgaccaccaaagggcctggagcagcacagactccgacagttccaaccgcaatctaaagcccgccatgaccaagacggcgagttttgggggcatcacggtgctgaccaggggtgacagcacttccagtactaggagtaccgggaagctgtccaaagcaggttccgagtcttccagcagtgcaggctcctcaggatcgctgtcccgcacccatccacctctccagagcacacccctagtctcaggtgtggcagctggctctccaggctgtgtgccttatccagagaatggaatagggggccaggttgctcccagcagcaccagctacatcctccttccacttgaagctgcaacaggcatcccgcctggaagcatccttcttaatccacacacaggccagccctttgtgaatcccgatggaactcctgcaatatacaacccacccaccagtcagcagcccctgcgaagcgccatggtggggcagtcccaacagcagccaccacagcagcagccctccccgcagccccaacagcaggtccagccaccgcagccacagatggcaggccctctggtcactcagtctgtccaggggctgcaggcttcctcccagtcagtgcaatatccagcagtctcttttcctccccagcacctcctacctgtgtctccaacgcagcactttcccatgagagatgatgtggcaacacagtttggccagatgaccctgagccggcagtcctcgggggagactcctgaacccccatcaggtcctgtctacccatcctcccttatgccacagccggcccagcagcccagctatgtaatcgcctctacaggccagcagcttcctacaggaggattctcaggctctggccctcccatctcccagcaggtcctccagccccctccctcaccacagggatttgtgcaacagcctccgcctgcacagatgcctgtatattattacccatctggtcagtaccctacctcaaccacgcaacagtaccggcccatggccccggttcagtacaacgctcagaggagtcaacagatgccacaggcagcacagcaagcaggttaccagccagtcttgtctggtcaacagggattccaaggcctaataggagtgcagcagccacctcagagtcagaacgtgataaataaccaacaaggaactccggtgcaaagcgtgatggtttcctacccaacaatgtcttcttatcaggtgccaatgacccagggttctcaaggactgccccagcagtcataccaacagccaatcatgctacctaaccaggcaggtcaagggtcactcccagccactggaatgcctgtttactgtaatgtcacaccgcccacccctcagaacaaccttaggctgattggcccacactgcccctccagcactgtcccagtgatgtcagctagctgcagaacaaactgtgcaagtatgagcaatgctggttggcaggtcaaattctgagagctctggctgtggtacatttcttcagatatttctcatggcctttgatggaagaggaacaaggtgggaaaactggctgaggacttaagtattcactcaacactcaaatgattgctgctggtattctgtaaaaaataaacaaagactaatatacacgttagctggttaatggtgcatatttctgtcatgtctgctaggtatgcctttatagcttagctagtgacatgaattcatcaaggtaagattttctcctaccactgaataccactgtgtagattataatatccctaatttggattagttttgtactttgtgttgagtttgtgatgctaaaagtatttaaaaattatatactaaatcacattgtaccaaagctgtaatggaaaagcaaagaagaattgatgaattgaaggaataatttatatacatt

SEQ ID NO: 1144 - DNA, 1960 bp, Homo sapiens
  source 1..1960: mol_type = genomic DNA
gggccaagacgcccggagcggctgctgcagccagtagcggccccttcaccggctgccccgctcagacctagtcgggaggggtgcgaggcatgcagctgggggcccagctccggtgccgcaccccgtaaagggctgatcttccacctcgccacctcagccacgggacgccaagaccgcatccaattcagacttcttttgggtaaagggccaagagggaagggcgaggcggggaggaagcagctcgggccgccttccctccgtggcctccaggacatccgccggggatagattatgcgtttccattggttacccaccttgagcgagccgtttgatagaaaccaagagcttgaaacgtgcattaggccattgtggactcccagtgggagtgcttgtgaaactgaacacaacaaaagtatggatatgggaaaccaacatccttctattagtaggcttcaggaaatccaaaaggaagtaaaaagtgtagaacagcaagttatcggcttcagtggtctgtcagatgacaagaattacaagaaactggagaggattctaacaaaacagctttttgaaatagactctgtagatactgaaggaaaaggagatattcagcaagctaggaagcgggcagcacaggagacagaacgtcttctcaaagagttggagcagaatgcaaaccacccacaccggattgaaatacagaacatttttgaggaagcccagtccctcgtgagagagaaaattgtgccattttataatggaggcaactgcgtaactgatgagtttgaagaaggcatccaagatatcattctgaggctgacacatgttaaaactggaggaaaaatctccttgcggaaagcaaggtatcacactttaaccaaaatctgtgcggtgcaagagataatcgaagactgcatgaaaaagcagccttccctgccgctttccgaggatgcacatccttccgttgccaaaatcaacttcgtgatgtgtgaggtgaacaaggcccgaggggtcctgattgcacttctgatgggtgtgaacaacaatgagacctgcaggcacttatcctgtgtgctctcggggctgatcgctgacctggatgctctagatgtgtgcggccggacagaaatcagaaattatcggagggaggtagtagaagatatcaacaaattattgaaatatctggatttggaagaggaagcagacacaactaaagcatttgacctgagacagaatcattccattttaaaaatagaaaaggtcctcaagagaatgagagaaataaaaaatgaacttctccaagcacaaaacccttctgaattgtacctgagctccaaaacagaattgcagggtttaattggacagttggatgaggtaagtcttgaaaaaaacccctgcatccgggaagccaggagaagagcagtgatcgaggtgcaaactctgatcacatatattgacttgaaggaggcccttgagaaaagaaagctgtttgcttgtgaggagcacccatcccataaagccgtctggaacgtccttggaaacttgtctgagatccagggagaagttctttcatttgatggaaatcgaaccgataagaactacatccggctggaagagctgctcaccaagcagctgctagccctggatgctgttgatccgcagggagaagagaagtgtaaggctgccaggaaacaagctgtgaggcttgcgcagaatattctcagctatctcgacctgaaatctgatgaatgggagtactgaaataccagagatctcacttttgatactgttttgcacttcatatgtgcttctatgtatagagagctttcagttcattgatttatacgtgcatatttcagtctcagtatttatgattgaagcaaattctattcagtatctgctgcttttgatgttgcaagacaaatatcattacagcacgttaacttttccattcggatcatta

SEQ ID NO: 1145 - DNA, 1363 bp, Homo sapiens
  source 1..1363: mol_type = genomic DNA
ccgagacctggagcagccaccgccgcaatcatgggcttgtgctggaaaagatgaaatggggaaaatggtgtcagtaattaacactgtggatacctcccatgaggacatgattcacgacgcccagatggactactatggcacccgcctggcaacctgctcatcagacaggtccgtcaaaatctttgatgtgcgcaatggagggcagatccttatcgccgacctcaggggtcatgagggtcctgtgtggcaagtggcctgggctcaccccatgtacggcaacatcctggcatcgtgctcctatgaccggaaagtcattatctggagagaggaaaacggcacctgggagaagagccacgagcatgcgggacacgactcctcagtgaactcggtgtgctgggccccccatgactacggcctgatcctggcctgtgggagctcggatggggccatctccctgctgacttacaccggggaaggccaatgggaagtaaagaagatcaacaacgctcacaccattggctgcaatgccgtcagctgggcccctgctgttgtacctggaagcctcatagaccacccatcggggcagaaacccaattacatcaagaggtttgcatcaggtggctgtgacaacctcatcaagctgtggaaggaggaggaggacggccagtggaaggaggagcagaagctagaagcgcacagtgactgggttcgagatgtggcctgggccccctccatcggcctgcccaccagcaccatcgccagctgctcccaggatggtcgtgtgttcatttggacctgtgatgatgcctcaagcaatacgtggtcccctaaattgttgcacaagttcaacgatgtggtgtggcatgtgagctggtccatcacagccaacatcctggctgtctctggtggagacaataaggtgaccctgtggaaggagtcagttgatgggcagtgggtgtgcatcagtgatgtcaacaagggccagggctccgtatcagcatcagtgacagagggccagcagaacgagcagtgacaagacaggtggggcctggctccccacccgccagctccaggactgccccttcctgggccaactaaccagacaactgggaagagcccccaactccaacaggattattttcccaggaggagttacagatgcagccacagattgatcatctgccttaacgtgatcggagatgctttgtaatctactgtccagctgaaagcactcatgttacgaggaagaaactacaagtgatgttcaaatctattttgggtcatttttatgtacctttgggttcaggcattatttggggggttttgtttccaaaggaactaaataaagtcatattgcttataa

SEQ ID NO: 1146 - DNA, 2746 bp, Homo sapiens
  source 1..2746: mol_type = genomic DNA
agcaatctcgggaaattggagactgacgcggctgctcctgcatgttatttatttttcctctttccctcccgtggagaccctcctgttggaaagagagctgcagcacgggacagagacaggcaggaagaagcagagaggactcggtgacgcccccaccgagcagcccctggcccactcctccagcaggggccatgagcaccaagcaggaggccaggagagatgagggagaagccaggacgagggggcaggaggcacagcttcgagaccgagcccacctgagccagcagcgccggctcaaacaggccacccagttcctgcacaaggactcggccgacctgctcccgctggacagcctcaagaggctcggcacctccaaggacttgcagccgcgcagtgtgatccaaagacgcctggtggagggaaacccgaattggcttcagggggagcctccccggatgcaggacctgattcatggccaggagagcaggaggaagaccagcaggacagagattccagctcttctggtcaactgcaagtgccaggaccagctgcttagagtggccgttgacacaggcacccaatacaatcggatctctgctggatgtctcagccgcctggggttagagaaaagggtcctaaaagcctcagctggggacctggcccctgggcccccaacccaggtggagcagttggagctacagctggggcaggagactgtggtgtgctcggcacaggtggtggatgctgagagtcctgaattctgcctgggcctgcagactctgctttctctcaagtgctgcatcgacctggagcacggagtgctgcggctgaaagccccgttctcagagctacccttcctgcctttgtaccaagagcctggccagtgactgctgtctcagtcagtccccagagggaaagaccttgccttagaagaagaggcgtgtggggaacgggggctcttgaagccaggtagctggggactatggtgtctgcccttccaatcacctccctgacccctgctgtcccattttccccagctggccgcattcctctctgcttctcagcagctgtcctactccccaggacgagttttcactagagggcccacgatgccaggattctgattcatcttcctcccaagaaaagcaaagccaaatcaagaccacagataggaacctaagcacaatggggtgcctgcttgggctgggtcgaaggctctgctgactgctgtccttgtccatcacccaataccaccccaaacacaactcaacttcccacaccaccatgtctctcaccacaccttctgggcctcattatctcccacaactagaccgccatgcctcaccaacctatgtccctggacctcctggtgtctgcctctcggagtctgtgcacatctgctcacagttgagtgggggaagaaacagccagaattcaatacaacaaagagcgggagttagtataggaatgtccatctcataaggctgagagctattttttcctgtggctgcaaatgtctgaagccagttagtttgattaccctgtgcaaaaccttggacatacttctgctattaacgctataggtatttatccgtttccactggctttttgtacccaccgagcccctgagccttgcgtgtgtgtgtgtggaagagccttgtagagaactgctcctgtgaggcagacaggacagtgaggttgtcaccactcagacttcacctattcagcattctttctgatttctagaactatccacctcattaggccttcttcctatccccatctctggcctcttgagcttaagcttgtattgtcctggaatcagtggctttctaaccccctgccaggctttgccaaagcaaaaagacagaggctttttttttttttttaaagtttggggtctgtcaggagacagaggcttttttgaattcactgtgaagagaagaacccgaaccttaagacgccagatccctgagagtctttctggctggtttgagtctctcaaatcatggattaggagtaaagaaagaggccaggcgcaatggctcatgcctgtaatcccagcactttgggaggctgaggtgggtggatcacttgaggtcaggagtttgagaccagcctgggtaatatggcaaaaccccatctctactaaaaaatacaaaaattagccaggtatggtggtgaacacctgtaatcccagctacttggaaggctgaggcataggagttgcttgaacctgggagatgggggttgtagtgagccaagttcgtgccatcggactccagcctgggtgaaggagtgagaccctgtctccaaaaacaaacaaaaaaggagcagagaaagacagtggtacagctaacctgaacaagggaactgggaccgttgggctgaaacagtcttgagcctggggttgactgggttagagaagaaccgggatgcaaggagctgcctgtgacacctggcctgccctttctcagctgcctcccctgccctttctcagctgcctcccctgccctcagaaggaaaggagagggctcacttatcacttgtgccatagcacctggtctcaaaatcctaaaagctttcctcgccctcactgccttgctccacaaggtccactttcctgggtcttgtgctgtgcctttccttgtctgcctcctgctgcttctgtaactgcagaccccaggcccaatggcaagccctcggctcagctgcttctccattggaataaactcttgtttctcta

SEQ ID NO: 1147 - DNA, 1709 bp, Homo sapiens
  source 1..1709: mol_type = genomic DNA
agacgggcgggggagtcgccccggcggggcaagtccgtaccgcgacatgggcgcgccgagcacgtccgtaccgcaagatggctgctcggacggggacagagctcgcctctgccgcctcgacaactgctcctgggtcctctaagaggaggaagcgccacccatggcacacagtgtcccgtcggcccggccgtacgccaaaatggcggctcccgcgtatttccgctcgcgcgccgtatcgtcttcgccgcctgcgccggcacacctattggcccccgcggcgtcccgtcgccgcgtcgcgttgctggcccgtcggagcgacgccgctcgggtcagtcggcggccggactgggaagatggacgcagctactctgacctacgacactctccggtttgctgagtttgaagattttcctgagacctcagagcccgtttggatactgggtagaaaatacagcattttcacagaaaaggacgagatcttgtctgatgtggcatctagactttggtttacatacaggaaaaactttccagccattggggggacaggccccacctcggacacaggctggggctgcatgctgcggtgtggacagatgatctttgcccaagccctggtgtgccggcacctaggccgagattggaggtggacacaaaggaagaggcagccagacagctacttcagcgtcctcaacgcattcatcgacaggaaggacagttactactccattcaccagatagcgcaaatgggagttggcgaaggcaagtccataggccagtggtacgggcccaacactgtcgcccaggtcctgaagaagcttgctgtcttcgatacgtggagctccttggcggtccacattgcaatggacaacactgttgtgatggaggaaatcagaaggttgtgcaggaccagcgttccctgtgcaggcgccactgcgtttcctgcagattccgaccggcactgcaacggattccctgccggagctgaggtcaccaacaggccgtcgccatggagacccctggtacttctcattcccctgcgcctggggctcacggacatcaacgaggcctacgtggagacgctgaagcactgcttcatgatgccccagtccctgggcgtcatcggagggaagcccaacagcgcccactacttcatcggctacgttggtgaggagctcatctacctggacccccacaccacgcagccagccgtggagcccactgatggctgcttcatcccggacgagagcttccactgccagcacccgccgtgccgcatgagcatcgcggagcttgacccgtccatcgctgtggggtttttctgtaagactgaagatgacttcaatgattggtgccagcaagtcaaaaagctgtctctgcttggaggtgccctgcccatgtttgagctggtggagctgcagccttcacatctggcctgccccgacgtcctgaacctgtccctagattcttctgatgtagagcgactggaaagattcttcgactcagaagatgaagactttgaaatcctgtccctttgaaaatcctggggtcgggggtggcacctgtgagagcctggggctcctggtgccgctgcgtttcatccatcccgcccgctcgcctgccgagggctgcgccccgtgctgcctccccccagagggccacccgctgtgctcgtggactgaggctgcgctgcccgggaggccttactgctt

SEQ ID NO: 1148 - DNA, 2128 bp, Homo sapiens
  source 1..2128: mol_type = genomic DNA
agccttccctttttgttttccgtgccccaactcggcggattgactcggccccttccggaaacacccgaatcaacttctagtcaaattattgttcacgccgcaatgacccacccctggcccgcgtctgtggaactgacccctggtgtacaggagagttcgctgctgaaagtggtcccaaaggggtactagtttttaagctcccaactccccctcccccagcgtctggaggattccacaccctcgcaccgcaggggcgaggaagtgggcggagtccggttttggcgccagccgctgaggctgccaagcagaaaagccaccgctgaggagactccggtcactgtcctcgccccgcctcccccttccctccccttggggaccaccgggcgccacgccgcgaacgtaatagctcttcaagtctgcaataaaaaatggcctccaacaaaactacattgcaaaaaatgggaaaaaaacagaatggaaagagtaaaaaagttgaagaggcagagcctgaagaatttgtcgtggaaaaagtactagatcgacgtgtagtgaatgggaaagtggaatatttcctgaagtggaagggatttacagatgctgacaatacttgggaacctgaagaaaatttagattgtccagaattgattgaagcgtttcttaactctcagaaagctggcaaagaaaaagatggtacaaaaagaaaatctttatctgacagtgaatctgatgacagcaaatcaaagaagaaaagagatgctgctgacaaaccaagaggatttgccagaggtcttgatcctgaaagaataattggtgccacagacagcagtggagaattgatgtttctcatgaaatggaaagattcagatgaggcagacttggtgctggcgaaagaggcaaatatgaagtgtcctcaaattgtaattgctttttatgaagagagactaacttggcattcttgtccagaagatgaagctcaataattgttcacattgttcttttatatatatttatatatatatataaaaattgggtcttagattttgatttactagtgtgacaaaataactacatcctaatgaaaatcaagtttgatatgtttgttttgaaagtagcgttggaagagttgttgggggttttttgcatccatagcactggttactttgaacaaataaataaaagctttctgtagttgcttcctttatcagaaaagaacatttgataccatggtatatcatttcctcttcattaaagaacagcttttctaaatgttgggggaaatgtccatagtcattactcagtcaaaacttgtgttctcatgagcctaaggaccattctagatttattacgtgttttttgtgtgtgtgtgtgtgtgtgtgtgtgtgtgtatccataaaatgcatatgtaaatttttttttgtttttaagcattcacccaaacaaaaaaatcacaggtaaacccatgtttctgagatgccattattccaagcaaaataagagataatcccttcaagttaaattgaaaattttcctgaaaccatacatttcaagtgaaataagtaattctagataggacaatttaaattggataattttaaagtgtctataattgcagtggtttatttgcaaaattcctaaaaggaaaaattttatcactgccatcacagcaggtttcctcatccagatgaggaaactagacaaatgctagtgtgttttaactagctaaacaaaactaagttaaatgaacatttaaaagtttccctagcgggccattccttagcaaaatgttggaatccctgttgctacattgactaaaaggtcatgatgaatggaatatgtaagacttggctcatagaaacctaatcagatggttagaggtgttggcagtttaggacctgctgtcataaatgtgtgaacaaccttttgtaacctaacctattgacctgcatgttttttctttaccccaattcattacatggaggctcaatcttgagtttgctttactggttcagcaaaagccaggaagaacaactttgtagtaatcaaaatgttatccaactgtatattgtttactttattgtaaatactggtgaacagtggttaataaatagttttatattcctttatgcaa

SEQ ID NO: 1149 - DNA, 2633 bp, Homo sapiens
  source 1..2633: mol_type = genomic DNA
agaaagagataatctgtgaaagccacagagcctgatttctgctgtgataatcttcagcagaccgaggctggggcgagaatgaggcagacctgtttacatggtgtgtgcagtgccttgtggaattcttaactctattttattgtattatttttaatcgaaaagtagatcagatgatagcatgaagtgaatcggctgctttggactaatgggatcttcttttctgcattaagatcaagaacttttctggaatcctctgttctccgagtagccttgtcttctctgtgtgttttatcaatttgaagaacactggcaaaaatcagcaaacttcatctcccaaaaagctctcgctcttttttgccaatacttgaagatttctgctccaaaatctactttgagctgcttgagcatggtggttgataaccgaagggcaaaagcatcacttatttagtgtgtgttatagaaattttttagacaaccttactagctaacccaggtgaccctttacggatttctttcaaagccaatttgaataaacaactcttccctctcaaatgggcaagagtaactcttcagcaccatggagaggtccgggcagcgtgttacaacgtgggactgtgaccagggcaagcactctgacagtgattaccgagaggatgggatggatctaggcagtgacgccggcagcagcagcagcagcagccgcgccagttcacagtccaactccaccaaagtgaccccttgctccgagtgcaaatcttcatcgtcgccggggggcagcctggacttggtgtctgccctggaggactatgaggagcccttcccggtctaccagaagaaggtgattgatgagtgggcgccggaggaggacggggaggaggaggaagaggaggacgagcgcgaccagcgagggtaccgggatgaccgctctccggcccgggaaccgggggacgtaagcgccaggacccgcagcggcggcggcgggggcaggagcgccaccaccgccatgccgcccccggtgcccaacggcaacctccaccagcacgacccccaggacctcaggcacaatggcaacgtggtggtggctggccggccgagctgttcccggggcccccgccgggcgatccaaaagccccagccggctgggggccggcgcagtggccgcggcccggcggctggggggctctgccttcagcccccagacggcgggacgtgcgtccccgaagagcccccggtgccacctatggattgggaggcgctggagaagcatctggccgggctgcagttccgggagcaggaggtacggaaccagggccaggcgaggaccaactccacctccgcacagaaaaatgagagagagtctatcagacagaagttggcacttggaagcttctttgatgatggcccaggaatttataccagctgtagcaaaagtgggaagccaagcctttcctcccgactgcagagtgggatgaacttgcagatatgctttgtcaacgacagtggcagtgataaggacagtgatgctgatgacagtaagactgaaaccagcttggacacccccttgtctcccatgagcaaacagagttcttcctattctgatagagacactactgaagaggagtctgaatccttggatgacatggacttccttacaaggcaaaagaaattgcaagctgaagccaaaatggcccttgccatggccaaaccaatggccaaaatgcaagtagaagtggagaaacagaacaggaaaaagtctcccgtcgctgatcttctgccacacatgcctcatataagtgaatgcttgatgaaaagaagtttaaaacccaccgacctgagagacatgactattgggcagctacaagtgatagtcaatgatctccattcccagatagaaagcttgaatgaagagttggtccagctgcttctcatccgagatgagctgcacacagagcaggatgccatgctggtggacattgaagacttgaccagacatgctgaaagtcagcagaagcacatggcagagaaaatgcctgcaaagtgaaaagaagccattcaaccagagaacaagctagaatttattttgcttctgtggttgtaaaaatgctgttgctaaaggtggcgcagaaacaaatatcagtgttagtcattgataatgtctgaagcttaatgtccagtgattggcctttgcttcttaatttattttaattttttacttgtgccacttaatatcaggcattttaataaaatattgttacaaaaaatgtacagtactgacaccaccacaaatcatggttaataaaagagagtagttttaactttatttttatttgtttagagattttaagttggaacagtattttcccattgactacttttcattcttcactgtagttttaaagaagaactgtaaatgacggtgctatacaagtcaaaaaatacatgcctgcctcgtagtgaagttgtagctctccgtaatatgtatattttactcagttttcaacattttgtgaatgttgactacctgaagttcctttttagatgtgctattaacattctgttggattcagagggttccttgaaagttttatgtataaatatgtaaaataaaaattaaaactttgtttcatatcata

SEQ ID NO: 1150 - DNA, 2296 bp, Homo sapiens
  source 1..2296: mol_type = genomic DNA
actcccccgccctccccagggccctgggaaggggctcagcgtgggaaaggatggttgagttttaaccagaggcaaagcgtgagcgggatcagtgtgtgcggaacgcaagcagccgagagcggagaggcgccgctgtagttaactcctccctgcccgccgcgccgaccctccccaggaacccccagggagccagcatgaagcgagctcaccccgagtacagctcctcggacagcgagctggacgagaccatcgaggtggagaaggagagtgcggacgagaatggaaacttgagttcggctctaggttccatgtccccaactacatcttcccagattttggccagaaaaagacggagaggaataattgagaagcgccgacgagaccggatcaataacagtttgtctgagctgagaaggctggtacccagtgcttttgagaagcaggtaatggagcaaggatctgctaagctagaaaaagccgagatcctgcagatgaccgtggatcacctgaaaatgctgcatacggcaggagggaaaggttactttgacgcgcacgcccttgctatggactatcggagtttgggatttcgggaatgcctggcagaagttgcgcgttatctgagcatcattgaaggactagatgcctctgacccgcttcgagttcgactggtttcgcatctcaacaactacgcttcccagcgggaagccgcgagcggcgcccacgcgggcctcggacacattccctgggggaccgtcttcggacatcacccgcacatcgcgcacccgctgttgctgccccagaacggccacgggaacgcgggcaccacggcctcacccacggaaccgcaccaccagggcaggctgggctcggcacatccggaggcgcctgctttgcgagcgccccctagcggcagcctcggaccggtgctccctgtggtcacctccgcctccaaactgtcgccgcctctgctctcctcagtggcctccctgtcggccttccccttctctttcggctccttccacttactgtctcccaatgcactgagcccttcagcacccacgcaggctgcaaaccttggcaagccctatagaccttgggggacggagatcggagctttttaaagaactgatgtagaatgagggaggggaaagtttaaaatcccagctgggctggactgttgccaacatcaccttaaagtcgtcagtaaaagtaaaaaggaaaaaggtacactttcagataattttttttttaaagactaaaggtttgttggtttacttttatcttttttaatgtttttttcatcatgtcatgtattagcagtttttaaaaactagttgttaaattttgttcaagacattaaattgaaatagtgagtataagccaacactttgtgataggtttgtactgtgcctaatttactttgtaaaccagaatgattccgtttttgcctcaaaatttggggaatcttaacatttagtatttttggtctgtttttctccttgtatagttatggtctgtttttagaattaattttccaaaccactatgcttaatgttaacatgattctgtttgttaatattttgacagattaaggtgttgtataaataatattcttttggggggaggggaactatattgaattttatatttctgagcaaagcgttgacaaatcagatgatcagctttatccaagaaagaagactagtaaattgtctgcctcctatagcagaaaggtgaatgtacaaactgttggtggccctgaatccatctgaccagctgctggtatctgccaggactggcagttctgatttagttaggagagagccgctgataggttaggtctcatttggagtgttggtggaaaggaaactgaaggtaattgaatagaatacgcctgcatttaccagccccagcaacacaaagaatttttaatcacacggatctcaaattcacaaatgttaacatggataagtgatcatggtgtgcgagtggtcaattgagtagtacagtggaaactgttaaatgcataacctaattttcctgggactgccatattttcttttaactggaaatttttatgtgagttttccttttggtgcatggaactgtggttgccaaggtatttaaaagggctttcctgcctccttctctttgatttatttaatttgatttgggctataaaatatcatttttcaggtttattcttttagcaggtgtagttaaacgacctccactgaactgggtttgacctctgttgtactgatgtgttgtgactaaataaaaaagaaagaacaaa

SEQ ID NO: 1151 - DNA, 3126 bp, Homo sapiens
  source 1..3126: mol_type = genomic DNA
gcggccgcaggggtctgggcagggctgggcagtgctgccggagcaaaagcggtagcgggagcccggccggagctgggtctggagacgccgtggcagcctgaacggagtgtgcgacggattgggaggtttgtctacagattttgagcgttcgaagttgacccctgactaagtatactttgctgctccctcagcctttgaaaaaatgtctgtcacatatgatgattccgttggagtagaagtgtccagcgacagcttctgggaggtcgggaactacaagcggactgtgaagcggatcgacgatggccaccgcctgtgcagcgacctcatgaactgcctgcatgagcgggcgcgcatcgagaaggcgtatgcgcagcagctcactgagtgggcccggcgctggaggcagctcgtggagaaagggccccagtacgggaccgtggagaaggcctggatggccttcatgtccgaggcagagagggtgagcgagctgcacctcgaggtgaaggcctcactgatgaacgatgacttcgagaagatcaagaactggcagaaggaagcctttcacaagcagatgatgggcggcttcaaggagaccaaggaagctgaggacggctttcggaaggcacagaagccctgggccaagaagctgaaagaggtagaagcagcaaagaaagcccaccatgcagcgtgcaaagaggagaagctggctatctcacgagaagccaacagcaaggcagacccatccctcaaccctgaacagctcaagaaattgcaagacaaaatagaaaagtgcaagcaagatgttcttaagaccaaagagaagtatgagaagtccctgaaggaactcgaccagggcacaccccagtacatggagaacatggagcaggtgtttgagcagtgccagcagttcgaggagaaacgccttcgcttcttccgggaggttctgctggaggttcagaagcacctagacctgtccaatgtggctggctacaaagccatttaccatgacctggagcagagcatcagagcagctgatgcagtggaggacctgaggtggttccgagccaatcacgggccgggcatggccatgaactggccgcagtttgaggagtggtccgcagacctgaatcgaaccctcagccggagagagaagaagaaggccactgacggcgtcaccctgacgggcatcaaccagacaggcgaccagtctctgccgagtaagcccagcagtgtgagcagctacgagaagacccagagctatcccaccgactggtcagacgatgagtctaacaaccccttctcctccacggatgccaatggggactcgaatccattcgacgacgacgccacctcggggacggaagtgcgagtccgggccctgtatgactatgaggggcaggagcatgatgagctgagcttcaaggctggggatgagctgaccaagatggaggacgaggatgagcagggctggtgcaagggacgcttggacaacgggcaagttggcctatacccggcaaattatgtggaggcgatccagtgatgagtcggggacaggccagcggggggacggaggcggcgggcccaggagcctcagccagccacgtgggcatccactccttttcctgcaagagatgatggttccattgctcttggcttcatggtgttcctggaaggcagatgagctggtcatttcgcctgggactcggcacctttccgagtgcagctggagggatctgagcgcaggaagacgcagaacaacagaaatagccgcccctccccgcccactgtgcctgttggcctatcatagatctctatgttcttgactttgtctctcctttccgagtcaatggtgggttacactgatcttgttccactgattactctctctgacgagtccatcacctgcaacttaaatgaacaagcttacatcccattttgagtgaagattttgaggtttttaatttaaaggctgtgtacagttatacttttttatacacctgttcatttctacttaaattatggcacagattgatgcgcaccagtcttgaggaaacgatctccctattcccttaccctgttactcagccacgccgtgtgtaggcttagcctcaggtggcagatgtttgaggaaaggaattatgccaggaaggtgggaccgggttatggtcgggtttctattgggaatgctctttgtgcttttgggcatctgaatggaagctttacatagaaccttaggtagaactcccccaaatcgccatatttaaaaattattttcactctattcttgcttaaaactgtactcttttgcaaattaacaattttatcactgattcagagttaaaaagaagactaacttttcaagcaaatgcatctgtaaagatgctttagattagactgtcatgtctcagtgtctatctgtatatattatttgatattcagagaatctaaagcactcgtctactgttttaatgagatttaacagcttttaacagtgagtttcgtttgtaaactgcttgaagtctgtggcattcaggcacacgtctggctggccggctgggtctcctcccgggctcagtgggcctggggcctctctgacgtggtgcctgctggagggaggctcgtcgtcaccagctgactgctggtccggcttctgaccggcctttgtcctggctccgtagcagaacactgtaaaagtgcccgcgtctttgcagtagttgcagatttcagtcgtcgtgttacttgtgcacaaacagaagctgggtcttacccgcagcacgagtgtctcgggctgcccggagtcgcccgggagcaggtgctgcagccagagttacgcgggggccacgcgggccggcgggggtggggggaacgtgggggaacctgtgtttcacgtgactcagcagtgcccgccgccgtcaccagctatgcattcactccgtttccagtgagcagatgtcttgcttggaaagtggacctgtgtctgtgtctgtcctgagaacttaccagcagaaatcctcatttctgtgctacggatttaccaaaaattgtcaagtctttttcagtttaacagttcctttacatgtgtagtatttgaggaaaaaaatcaataaacagttgatctcgtgcata

SEQ ID NO: 1152 - DNA, 2186 bp, Homo sapiens
  source 1..2186: mol_type = genomic DNA
gtcgtggaagcaggactgcgccgcgtcttcctcaaggtggggttcggggggccaccgaatcgctgtcacgccggcaggttgagaacaaaaacatgcacctggagtttccccggagccctctgcgtggttgagcttcggtggaatttcggggctcttggctgccagccgcgcttgcctggtagcaacagaaaccagtcctgctcgcctccgtggacatttcattaccatccagaagtgtctcccactgaaggcatccgtggttgtttttaagccacaaaaaagccacacccaagatcacctgacacccaccctgacaagtgtccatgatgctgggccctgagggaggtgaaggctttgtggtcaagctccgtggcctgccctggtcctgctctgttgaggacgtgcagaacttcctctctgactgcacgattcatgatggggccgcaggtgtccatttcatctacactagagagggcaggcagagtggtgaggcttttgttgaacttggatcagaagatgatgtaaaaatggccctgaaaaaagacagggaaagcatgggacaccggtacattgaggtgttcaagtcccacagaaccgagatggattgggtgttgaagcacagtggtcccaacagtgccgacagcgccaacgatggcttcgtgcggcttcgaggactcccatttggatgcacaaaggaagaaattgttcagttcttctcagggttggaaattgtgccaaacgggatcacattgcctgtggaccccgaaggcaagattacaggggaagcgttcgtgcagtttgcctcgcaggagttagctgagaaggctctagggaaacacaaggagaggatagggcacaggtacattgaggtgtttaagagcagccaggaggaagttaggtcatactcagatccccctctgaagttcatgtccgtgcagcggccagggccctatgaccggcccgggactgccaggaggtacattggcatcgtgaagcaggcaggcctggaaaggatgaggcctggtgcctacagcacaggctacgggggctacgaggagtacagtggcctcagtgatggctacggcttcaccaccgacctgttcgggagagacctcagctactgtctctccggaatgtatgaccacagatacggcgacagtgagttcacagtgcagagcaccacaggccactgtgtccacatgaggggcctgccgtacaaagcgaccgagaacgacatttacaacttcttctctcctctcaaccctgtgagagtccatattgagattggcccagatggaagagtgacgggtgaagcagatgttgagtttgctactcatgaagaagctgtggcagctatgtccaaagacagggccaatatgcagcacagatatatagaactcttcttgaattcaacaacaggggccagcaatggggcgtatagcagccaggtgatgcaaggcatgggggtgtctgctgcccaggccacttacagtggcctggagagccagtcagtgagtggctgttacggggccggctacagtgggcagaacagcatgggtggctatgactagttttgttaggaacatttgagttacttcaatcattttcacaggcagccaacaagcaattaagagcagttataatagaggaagctgggggacccattttgcaccatgagtttgtgaaaaatctggattaaaaaattacctcttcagtgttttctcatgcaaaattttcttctagcatgtgataatgagtaaactaaaactattttcagcttttctcaattaacattttggtagtatacttcagagtgatgttatctaagtttaagtagtttaagtatgttaaatgtggatcttttacaccacatcacagtgaacacactggggagacgtgcttttttggaaaactcaaaggtgctagctccctgattcaaagaaatatttctcatgtttgttcattctagtttatattttcatttaaaatcctttaggttaagtttaagctttttaaaagttagttttgagaattgagacacaatactaatactgtaggaattggtgaggccttgacttaaaactttctttgtactgtgatttccttttgggtgtattttgctaagtgaaacttgttaaattttttgttaactaaatttttttcttaaaataaagactttttcacaa

SEQ ID NO: 1153 - DNA, 3758 bp, Homo sapiens
  source 1..3758: mol_type = genomic DNA
cttttctgcggctgcactgaagggttcggctgcccatccgtcacagaggcgatgcctctgattggctgctgctcttcgggccgggaggcggggcgggaaggccggagaaactagtttgttggcggcgcctaggctgtatcgcagcgagagcgtttttgcctgtggagagccggccgacgggagccgcggcggagcctgttgagctcgcgcgggctgccgggagtggtctctgaggcggcggcggcggcggggatcgtctccggcactgacgcaccatgtcggtcagtgtccatgagacccgcaagtcgcggagcagcacggggtccatgaacgtcaccctcttccacaaggcctcccacccggactgtgtgctggcccacctcaacacgcttcgcaagcactgcatgttcaccgacgtcacactctgggcgggcgaccgtgccttcccctgtcaccgtgccgtgctggccgcctctagccgctattttgaggccatgttcagccatggccttcgggagagccgggatgacactgtcaacttccaggacaacctgcacccggaggtgctggagctgctgctggactttgcctactcctcacgcatcgccatcaacgaggagaacgctgagtcactgctggaggcaggcgacatgctgcagttccacgatgtgcgggatgctgccgccgagttcctggagaagaaccttttcccctccaactgcctgggcatgatgctgctctcggacgcccaccagtgccgccggctgtatgagttctcctggcgcatgtgcctggtgcactttgagacggtgaggcagagcgaggacttcaacagcctgtccaaggacacactgctggacctcatctcgagtgatgagctggagaccgaggacgagcgggtggtcttcgaggccatcctccagtgggtgaagcacgacctggagccacggaaggtccacttgcccgagctcctccgcagcgtgcgtctggccttgctgccgtccgactgcctgcaggaggccgtctccagcgaggccctcctcatggcagacgagcgcaccaagcttatcatggatgaggccctgcgctgcaagaccaggatcctgcagaatgatggcgtggtcaccagcccctgtgcccggccacgcaaggcgggccacacgctactcatcctggggggccagaccttcatgtgtgacaagatctaccaggtggaccacaaggccaaggagatcatccccaaggccgacctgcccagcccccggaaggagttcagcgcctcagcgatcggctgcaaggtctatgtgacggggggcaggggctccgagaacggggtctccaaggatgtctgggtgtacgacaccgtacatgaggaatggtccaaggcggcgcccatgctgattgcccgctttggccatggctcagctgagctggagaactgcctctatgtggtggggggacacacatccctggcaggggtcttcccggcctcgccttctgtctccctgaaacaagtggagaaatacgaccctggggccaacaagtggatgatggtggcccccttgcgggatggcgtcagcaatgccgcagtggtgagtgccaagctgaagctctttgttttcggaggaaccagcatccaccgggacatggtgtccaaggtccagtgctatgacccctcggagaacaggtggacgatcaaggccgagtgcccccagccttggcggtacacagccgctgccgtcctgggcagccagatcttcatcatgggaggtgacacggaattcacagccgcctcggcctaccgctttgactgtgagaccaaccagtggacgcggattggggacatgactgccaagcgcatgtcctgccatgccctggcttccggcaacaagctctatgtggtcgggggctactttgggacccagaggtgtaagactctggactgctatgaccccacttcagatacatggaactgcatcaccacagtgccctactcacttatccccacggcctttgtcagcacctggaagcacctgcccgcgtgaggagcacctgctgagcccagccagaccgcggccttcagtgtcacagcgtggccttgcttgtctgccacagcgggagctaagccggccctgggccagcactccgagaggtggaaggggccctgccagctctggggagcagcagccttgggctgttctgagctttaggcaagagaagagaagcatctcttgcatccgtgcccctgggggcctcttcagctttgcagtggtttgtgggaagacatacctcccagaggggcatggactgccaccaggactgaccctggcgtcggggagaaggacacttgcagagccttgagatcacctgtttggcaggtcctggactggggccgggcaggcaggggcagggaggcgccccgggtgggctttggggctgcggcactgccacacatcctttccctcctggcctgccctgctggggctctactgccatctatagatggtgtcctgggcctgggaaactaggttcccaggggttgagaccagaaaggtgaccaagacagattttttaaggtgcagaaactgcaggggggcctcagtgacatccatgaggccttattagcaaaggacacccagacctccaaggtttgtgggccccttccacaaagctgtaagtcccagcccacctactcagggccttgctcagtgctgtggcccggtggggacacagttgctcgtggccactcagtggagctgggcctgcagcagactcaaggctccgagtgccctgggggtcacccctcccctcccctcctcagagcccaccctgagaggcagcagtgacccccatggcacacacctgccaacagcactgggggcttctccccaggagaccacgctgccctccaagaccaggagcagctgtgagctggagacagcagagggaccccagggtgtcccctgcagatcccaccagggccgcatccatctcagtgtggaggacagtgacgggaccctcaccatcctcttgcgttttggcccccatttgctccctgagctccaagataagaatggccccgagagaactgctgaacatttgttcattgctgtcacctcctgagtcactggggtccctcaccagcacctccctgacacctgggctatggagaggttggcgcctgtcagtgaccatcctaatgcctctcgctcactcccaagccaccatttgagagggaggggtgttggtgccctgacagggactgggcagggtgtccaaacttggggcttcccaggcacctgcagtgtgaacactgcttggctggctcaagattagggccgcggagggggctgtgcacataccagttacttaagcagccacgagtgtcccccatgccttggtgcgggtcctggaggcctcttgggggtgggacctttgggcagggtttgcccactgacacgcccgccatggggcactggctgcatggggctccttggaccctgtagacccagcagaccccgcctgtgtcaggccagctgcccgaaggcacttggctgtggtcccaggggacggctctgctggcacactcaggagcctggccgcggggactgcagggagggtgcctggacccgtggggttgcttcattgagataaagcacacttatcacatagcacaaaggacgtgccatggtgctttccccaaaagttgtgttgcttttatcagttttctaacttaataaaaagagttgagaaaattc

SEQ ID NO: 1154 - DNA, 1688 bp, Homo sapiens
  source 1..1688: mol_type = genomic DNA
cgcgcaacggccgggcacccggcggttcaggtcgcttagagagtcgtaggttgggtagtgcgggttggggcgggggctgcggagagggtgcttaactgaggggcatgatgggggaggcggccgtggccgcggggccttgtccgttgcgcgaggacagcttcacgcgcttctcgtcgcagagcaatgtgtacgggctggcaggcggcgccggcgggcgcggggagctgctggccgccacccttaaaggcaaggtgctcggcttccgctaccaagacctccgacagaaaatccggccagtggccaaggagctgcagttcaactacattcccgtggatgcggagattgtctccatcgacactttcaacaagtcaccccccaagcggggtctggttgtggggatcacgttcatcaaggattcaggggacaagggcagccccttcctgaacatttactgcgactacgagcccggctctgagtacaaccttgactctattgcccagagctgcctgaacctggagctccagttcactccgttccagctgtgccatgcggaggtccaggtcggggatcaacttgagactgtgtttctcttgagtgggaacgacccggccattcatctctacaaggagaacgaggggctgcatcagtttgaggaacagcccgtggaaaacctcttcccagagctgacgaacctgaccagtagcgtcctctggctggacgtccacaacttccccggcacgtcccggcgcctctcagctctgggctgtcagagtggttatgtccgtgtcgcccacgtggaccagcggagtcgagaggttctgcagatgtggtcggtcctgcaggacggtcccatctcccgagtgattgtgttcagcctctcggccgccaaggagaccaaggacaggccactacaagatgagtacagcgtgctcgtggccagcatgttggagccagcagtggtgtatcgggacctgctgaaccggggtcttgaagaccagcttctcctgcccggcagtgaccagtttgacagcgtcctctgcagcctggtcaccgatgtggatttggatgggcggccagaagtcctggtggccacctatggacaggaactgctgtgttataagtaccggggcccagagtcggggcttcctgaggcccagcacgggttccatctgctgtggcagcggagcttctccagtcccctgctggccatggctcacgtggacctgaccggggatgggctgcaggagcttgccgtggtctccctgaagggcgtgcacatcctgcagcacagcctgattcaggcctcagagctggtcttgacccggcttcgacatcaagtggagcagaggagacgtcggctacaggggttggaggacggggcaggtgcagggcctgctgagaatgcagcctcttaagcacccatgcacccactcttcccagacctggggcgactcatggcgtgctcacctccagccgctggtggggggtgtcctgaaggacaggatgctctccccagacctccccagggtggtgaagctgtgccctggggccccagctaacccactcctctctctgtacgtcaatgtccctatttgaaagcagggatgatcccattccaccctgtccactctggatgagaattggccacctgatggttatttatacgtccagaagaacatcatttccca

SEQ ID NO: 1155 - DNA, 1622 bp, Homo sapiens
  source 1..1622: mol_type = genomic DNA
gcactgcgggacatggtgatgtcctgggttggggctgaggaaggcctatgcgcggagggtgcggccttcggctaaggcagaggaccagggttgggtccgtggcggcgggaggggtggcctcctgcgctggtcgccccaggggacctgagaggcgcgacaaacagtcggcgcgtttggtactcgcgcctgcagagctttcaacctccgcgccggctgcgcctgtttctcggccaggggagcaaggccacgcggcctacgcagccgagtcggaaccaaccggttgtttggtgaaacctaccccagagcctcccgcggcccacagagcacagacagaatctccctctgtcacccaggctggagtgcagtggcatgatctcggctcactgcaacctccacctcccgggttcaagcgattcttgtgcctcagcctccggagtagctgggatttacagacgtgcgctaccatgcccggcaaatttttctatttttgcaaagacaggatttcaccgttttgtccaggctggtcttgaactattgacctcaagtgatccgaccgccttgacctcccaaagtgctgggattacggggtgtgagccatcgcgcctggccactttctccaaagttttaaaccaaagccttcttcggcagagctacgacccttcctctatggcccattctatcctatgctgcttccctttataaggacactcccactgttgtgctataatcatctcttggtatctccggactctgccactctgagccctccttacagcctagaaaaaatgacagatctcgtagctgtttgggatgttgctttaagtgacggagtccacaagatcgaatttgaacatgggactacatcaggcaaacgagtagtatatgtagatggaaaggaagagataagaaaagagtggatgttcaaattagtgggcaaagaaacattctatgttggagctgcaaagacaaaagcgaccataaatatagacgctatcagtggttttgcttatgaatatactctggaaattaatgggaaaagtctcaagaagtatatggaggacagatcaaaaaccaccaatacttgggtattacacatggatggtgagaactttagaattgttttggaaaaagatgctatggacgtatggtgcaatggtaaaaaattggagacagcgggtgagtttgtagatgatgggactgaaactcacttcagtatcgggaaccatgactgttacataaaggctgtcagtagtgggaagcggaaagaagggattattcatactctcattgtggataatagagaaatcccagagattgcaagttaatgaattttcatcttaagaagtaaagatcaggactttttaattactgtggtaattaaatgtgttcagtatgtacttatcagtacatttagtctgcaatgttttaattttttaaaaagttacatgaaactaacattccaagggtcaggaaaaaaaccaattatgtatagtcataaaaattacaatttatgatgcaaataatgtaaaatgttttaaagacaaatggcaaataagatatggaccaaagtcactaatgttttacaacagtaacctttactataataaatacttttaaaaaaa

SEQ ID NO: 1156 - DNA, 663 bp, Homo sapiens
  source 1..663: mol_type = genomic DNA
atgacatctggagaagtgaagacaagcctcaagaatgcctactcatctgccaagaggctgtcgccgaagatggaggaggaaggggaggaggaggactactgcacccctggagcctttgagctggagcggctcttctggaagggcagtccccagtacacccacgtcaacgaggtctggcccaagctctacattggcgatgaggcgacggcgctggaccgctataggctgcagaaggcggggttcacgcacgtgctgaacgcggcccacggccgctggaacgtggacactgggcccgactactaccgcgacatggacatccagtaccacggcgtggaggccgacgacctgcccaccttcgacctcagtgtcttcttctacccggcggcagccttcatcgacagagcgctaagcgacgaccacagtaagatcctggttcactgcgtcatgggccgcagccggtcagccaccctggtcctggcctacctgatgatccacaaggacatgaccctggtggacgccatccagcaagtggccaagaaccgctgcgtcctcccgaaccggggctttttgaagcagctccgggagctggacaagcagctggtgcagcagaggcgacggtcccagcgccaggacggtgaggaggaggatggcagggagctgtag

SEQ ID NO: 1157 - DNA, 2445 bp, Homo sapiens
  source 1..2445: mol_type = genomic DNA
ggcaagatggctcccctgcatgtctccggctgatcgctgccgctccgccaatacaatagagccagccactaccagcagcctggccctcttcctccttctccagagagaccaatccagccgaactcggggtttgcctgaggagaaggaggaagtgaccatggacacaagtgaaaacagacctgaaaatgatgttccagaacctcccatgcctattgcagaccaagtcagcaatgatgaccgcccggagggcagtgttgaagatgaggagaagaaagagagctcgctgcccaaatcattcaagaggaagatctccgttgtctcagctaccaagggggtgccagctggaaacagtgacacagaggggggccagcctggtcggaaacgacgctggggagccagcacagccaccacacagaagaaaccttccatcagtatcaccactgaatcactaaagagcctcatccccgacatcaaacccctggcggggcaggaggctgttgtggatcttcatgctgatgactctcgcatctctgaggatgagacagagcgtaatggcgatgatgggacccatgacaaggggctgaaaatatgccggacagtcactcaggtagtacctgcagagggccaggagaatgggcagagggaagaagaggaagaagagaaggaacctgaagcagaacctcctgtacctccccaggtgtcagtagaggtggccttgcccccacctgcagagcatgaagtaaagaaagtgactttaggagataccttaactcgacgttccattagccagcagaagtccggagtttccattaccattgatgacccagtccgaactgcccaggtgccctccccaccccggggcaagattagcaacattgtccatatctccaatttggtccgtcctttcactttaggccagctaaaggagttgttggggcgcacaggaaccttggtggaagaggccttctggattgacaagatcaaatctcattgctttgtaacgtactcaacagtagaggaagctgttgccacccgcacagctctgcacggggtcaaatggccccagtccaatcccaaattcctttgtgctgactatgccgagcaagatgagctggattatcaccgaggcctcttggtggaccgtccctctgaaactaagacagaggagcagggaataccacggcccctgcaccccccacccccacccccggtccagccaccacagcacccccgggcagagcagcgggagcaggaacgggcagtgcgggaacagtgggcagaacgggaacgggaaatggagcggcgggagcggactcgatcagagcgtgaatgggatcgggacaaagttcgagaagggccccgttcccgatcaaggtcccgtgaccgccgccgcaaggaacgtgcgaagtctaaagaaaagaagagtgagaagaaagagaaagcccaggaggaaccacctgccaagctgctggatgaccttttccgaaagaccaaggcagctccctgcatctattggctcccactgactgacagccagatcgttcagaaagaggcagagcgggccgaacgggccaaggagcgggagaagcggcgaaaggagcaagaagaagaagagcaaaaggagcgggagaaggaagccgagcgggaacggaaccgacagctggagcgagagaaacgtcgggagcacagtcgggagagggacagggagagagagagagaaagggagcgggacaggggggaccgagatcgggatagggaaagggaccgagaacgaggcagggaaagggatcgcagggacaccaagcgccacagcagaagccggagtcggagcacacctgtgcgggaccggggtgggcgccgctagctgggaaaacactagagctgcaggtaccagccactcggccccagggggttatggccacagagggataggcacagtctccaccaccctggagccaagggtctttcacatcacctatccctacatacataccaaatggaaaagtggccatccttttccccccaaacacacccccttaacctatctcttgggacttagcccgaccctccctctcatttcccattaagtctgagaggcaagagctaggttaggcaaggaggtggttggccagagatggggaacagccaggtgccccagtcctctgatttttcctccatcctgcttaccacctccctgggtacttacagccttctcttgggaacagccggggccaggactgggtcacctatgagctgaatcagcatctcctcctgagtcccagggcccctgcagttcccagtctcttctgtcctgcagcccttgcctctttcccacaggttccactttatatccaccttttccttttgttcaatttttatttttattttttttattattaaatgatgtggtctatggaaaaaaaaataaaaatctgacttagtttt

SEQ ID NO: 1158 - DNA, 6661 bp, Homo sapiens
  source 1..6661: mol_type = genomic DNA
atgaagaacgagcctctgactccaggttatcatggattcccagcgcgggacagccagggtaaccaggagccgacaacaactcctgacgcaatggttcagccttttactaccatcccatttccaccacctccgcagaatggaattcccacagagtatggggtgccacacactcaagactatgccggccagaccggtgagcataacctgacactctacggaagtacgcaagcccacggggagcagagcagcaactcacccagcacacaaaatggatctcttacgacagaaggtggagcacagacagacggccagcagtcacagacacaaagtagtgaaaattcagagagtaaatctaccccgaaacggctgcatgtctctaatattcctttccgcttccgggaccctgacctccggcagatgtttgggcagtttggcaaaatcctagatgtagaaataatctttaatgaacgtggctctaagggattcgggttcgtaactttcgagaatagtgctgatgcagacagggccagggagaaattacacggcaccgtggtagagggccgtaaaatcgaggtgaataatgctacagcacgtgtaatgaccaataagaagatggtcacaccatatgcaaatggttggaaattaagcccagtagttggagctgtatatggtccggagttatatgcagcatccagctttcaagcagatgtgtccctaggcaatgatgcagcagtgcccctatcaggaagagggggtatcaacacttacattcctttaatcattcctggcttcccttaccctactgcagccaccacggcagccgctttcagaggagcccatttgaggggcagagggcggacagtatatggtgcagtccgagcggtacctccaacagccatccccgcctatccaggtgtggtttaccaggacggattttacggtgctgacctctatatagaatctgcaaactgcttcagatcaaacagggtggatatgcagcctacagatatgcacagcctgctactgcaaccgcagccaccgctgctgcagccgctgcagccgcttacagtgacggttatggcagggtgtacacagccgacccctaccatgcccttgcccctgccgctagctatggagttggcgctgtggcgagtttataccgaggtggctacagccgatttgccccctactgaagtgacgtgagacccctgcaaatgggacagccccccagttcatgaggcctggctattgcaatatttactagtagaggaactctatagcaagatgaagaggaaaaacaaacaaacaaacaaaaaaaaacacaaaaaaagaaagaatacttttttatacctcactatgttctttgaatatgtatttttcctttaaatttctgcctttaattcttttgttccaaagattgtgcatttttttctttttttttttaaactgtggtaaaaaaaaaaaaaataatgcatttccatgtctgtatgtccgtgcttagcttattctatcaatcacggaagaggcagtcaaggaggaaggagagacattaggagccgataaatgcatctgatcagaaatcagcagacagaattaccaaagtgtatctggtgctgaatgactgggggacaagcagaagtggaagagatctttctgcaacaggatattcttctagtcttctgagtttctggtctttgacaggcaattctggttggctgtggctggaatccacatgctgatagataggaatttgtgcttacaaagcaggagaattaaaaagacgctttcctctcctcttccctcctgtcttctccgttctttttacaatcatcttacacgcacagcctgagacagctggcatagtttttggaattatagtattgatatttccaaacgtgctctcagacagtggataataaacacctcattaggaaaccgatctcagaatgaactctggagtatgaaaaagatcatttctttttgttcctgtaacctagcattccttctaggcttcttctcctttaattgaaccacagcttagctcatgtattcttttattaacaccctgctctcatgtccataagattcaggaatttaggacccagggacagaaaagtgaataagccagtgaccagatttcccccagatgtcttgaggattagaagtacaaattgttgacagccattaaagagggtgaggaagggaaaaggaatattagaagatctggtatttcttacttttttcttgcctcagaaagtacaaagtttaaaaaatagaataaagaatctgctggggaaagatagagtaccaggtcctaggtcagtagtccctggaagttttggtgatgaggacatggaagggcaggcagaggcactttgtacttgctccaaagccataggaattttcatcttccagagcctttatgagtcacttctctatccacagtcttgagcctgtggctatcccgctgagcttctcactgtcctccaaaaacaccccgctgagcacccggaccactttgtacacattaacactacaggacataaaatgcagaggccctgagattgctgccctcccatattggaaggagggtctgcgatggcaagggtcttctatatcaccagaaagagtcgcgcagtgagtcactgccgttgccatctggctgtaattttctatgttatcaaggtaggagggagtgtttctcttctagctgttagatagaactgataaaagcaagtgtcctacagcatttcccaaatgaaggcattaggaaatagaaaagcacggtctttttggctccctggtctagtcacattggtactagggtgacctttcacccaagggacagctgctaaagggagtaattcagagacatggagcttctggttatgggtttgttttgggtttgtttttaactcctgcctccacacatgttcttgactgataactgactcatgtccctgaattaaaatgactgacctatgacagcatcaagcattctttgtaagcagagtgatatatctgagagggcgttgacctgttgtgtagaatacatatcctttcccccttcagaatcctgtctcgcctcgtaactgggagagaggctgtgcctgaaactaggggcgatgtcaaggaagctagaggcctcgatgcaattattactgactctggggaggaagacagagaataaggggacaccaactgcccagtccactggccatttttaagggtccccccaccccaagccaaagtttggtttgttgctgttaagacaatttttgttgtatgtatataaatattttagttagaggagcggggaatgggatgcgggctttcacagttctagggaatgggggcagggaggattttgcttttgcttttgctttgagggagaactttagctgactaaaaaaacagaagtttggggtcatgatcacaaaggggccattcccaaaagatggcaagccacgtattcagtggagactaggccaaattctaaatggttttatccatagcaggggagaataggagaatgagtttaagagtttttctcttcttttttcctagaaagaggtaaggataatgggaaaggtagagaaggcggctcccacagaccttttaagagaggcagaatcttgagcttgaggcaccttgagtgcatctcagttcagctggttctggctgaggcctccaaaggcaagctctgtgctttccagtggtttctgctgcatttccagggatggtgtttaacaccgcttcctccagctcccttttctaagaaagaataaatggagttctgctttttatgaaagggtctttggttttcagtgtcaacactgagaattggggctcttgcaagcatctggatttcacagtatcaacctccccgtcaccttttgaactttgagactccgtacggtcaacttcaccagaggcaggttgctcgaagcagcactgcttgtctgttcctgactctggttctcactgtattaaaaaagagagtcagaggagtctggcatttcgtgagtttgttagaggatgctggctgataattccagaaaacttactgatgctaaatcacagtacatgcatgattctttttcagctttactatagttcatgacctggactttctgtactcttggaagctgggctccttaaaggaggcctctagtgaacacctttatctccatgtccctcttagagcccagagagctgcccataggcattttccagaattcctcatgtcacctagttcaatttccattaactcagatcagccattgtgattcaccatttgtcaggctctcaggtttaacaaaacctactatcaccatcatccttcaacagccacagtctgaattgagccaacatttttttttctttgagaaagaagtggactggggcacaacttttagtctgaggggagctagtggaaatctagacaatagaagtcatcgatagcagcttttcctcaaatgtgtgactcctcaggggctaaactgctcttagcttagaattatgctttactagagatctagcagataagtgggttaatcactaccatcctgtaactagttatatagcttccagacatgagggagacatcaaacagggatggaagcaaccccaaggatatgcaagaagggcatgatgaacccccttccctctggcaggagaacaaggccaaccaagggacagactggaaagcacttagatgtttaaggaggagaaaggggaagctttgaccagtccttgccttttgccaagttcagccagttctccgctgcttgcaacctctagcgcagtaacatttgcagaattgcagattttcccccagatactaggaggaaagggactttggggggtggggaaggggtcgtggtgttttaaaagcataagttacctgtttgcactgttttaagataggaaaaaaaaatagtgggcaaggtgaacatcagacgtaaatttgtgtgtttttattttgtcatgctcttgaaaatgtttgaccatttgtagtatacacagtgaaacttgattctctgttgcataaaacactatatttttttggaaatgttactgtccaaaagcctcttccctccctttccttttcctatgtacttccttcatacttgctttactgatcagccaggcaatagccatccaagagctagagcatgaaacagggccctttccaagtaggctctgggtgtcctaagccagcgtgtgccctctggtttagtgagtgtaatagagtccctggcacctttctttgcaaatgaggctaacagaccagactgcagcaagttatcagattcctcaatcagatgcactaggagtgaggagcccagggatggagggggttcctgaagtattgcagttggctgtagtagctgagttcttttccatgttaccgaaactgtagccagttacagtttactcaggaaaacggtagatcaattcagccatggtagtgctggttggcagggattggtaacggagagaactgctcatcagccaaaactcaagccttgccttttaggaggccaccagcagagggacttggtcctccttgtctggtacttgtgtacatgccggtgacctgaggactccactcacactggcgagcaaaaagggagcagtgattctcttttctctccccaccccctgccctttgttaccaacaccagtttcccagggggtacatgagtttctgaatttttaaaaaatgtttttggtttggtttttctggggactgataagtgctttaagcaatgtccataccccgtcaagactcccagcttagtcattttcttgtatttttctgttcacagtatttgtgtgtgtgcttgttttggcagctcattttggctgtattatatattgagtgatgaattgatcctcttttttccctaagggatatgaattgtttttcttgtgttatattctgcttgtgaatagctggagcaaacctggggctgacacgcgtaagctagggctgcaaagcgagaagagagccggtggagtgtacttgtccctgacaggctgacctacctgagtctctgagcttttcagtccaaatctttgcaaggctcaaaatgccacagaacctctcctcttctccccactccccatggcagggaccggaccatccctacatgcaacatgctgttcctccagcccctcccattgccatggcaaaacaggtacctttggggcatgggggcattacatgggatgcttgtgtaatcgaccacctagccttctctctcccctcccgtcctcccccagaatcacttcctaggacacccgagctgcttgcccagggtcctgtttccctgctaactccagagaagcatcccagggctttgtgacagtctctaattcccttcccttctcgttaagaatcatattgtatagtagctttcagaccatacagtattcattgggttactcctattattatcaagtagctggaattgtgaaggtcggagtagttagatctttagcttttattccttatttttttgtattactctccatgtgtataaattattgatcatgttgctggcttttataaactctaagcgaaggaggagcactgcctcagcctttgcacatggtaatgaagcactgtttttaaataaaagagagaaacacc

SEQ ID NO: 1159 - DNA, 3938 bp, Homo sapiens
  source 1..3938: mol_type = genomic DNA
agctgctggcccccctgggtccagaggagccttgccgccctcacctgcgcagagcctggagccgacgcgtcacccccagcggaagcgcctcgctgcccgggcgtctggcgaggtgtgcgctccgggtcccagctccagcgcttcgcggcagtcgcccgcctctttccgcaagcagggcggggactgggcggcatctaccgagatctgcgattcgaggcgccgaggagccgaagaccacagctcagctcagacggcgccctagggccgcacagagggtcgggcagtgccggagagaggtttgaaagcgccgccgccaactcgacagcgcgtcccagcgccttgagctcgcttcctcctgctctcaggaaaaactgaggaaacgcgcctggttccaggggtcggcggggaccgtggagacgctgccagcatcctcaacagcttggaaatcccatcaccttggttccctgagacttggaggactagtaggaactgacagctggctgacagaaaacttatccagggagagaagagacaaaagtgaagtgtgaaattttgaataatgttttcagatgctttgcattcagaatagacctctgagttgggacccaagctgtcaactgatcccaaattcctaagttcctgacttgcaggtattgagttctaacctccgaagatggatgaaggtatggaaatttcaagtgaaggaaattccttgatcaaagcagtccatcagagccggcttcgcctcacaagacttttgctagaaggcggtgcctacattaatgagagcaacgaccgtggggaaacccctttaatgatcgcttgtaagaccaaacatgtcgatcaccagagtgtcagtaaagccaaaatggtgaaatacctgttagagaacaatgccgatcccaacatacaggacaaatctgggaaaacggctctgatgcatgcttgcttagaaaaagctggccctgaagttgtttccttgctcctcaagagtggggctgacctcagcttgcaagaccattctagttactcagctcttgtttatgctataaattcagaagatacagagaccctgaaagttcttcttagtgcttgcaaggcaaaagggaaagaggtcatcatcatcacaacagcaaagttgccctgtgggaagcatactactaaacaatacttaaatatgcctcctgtggatatagatgggtgtcattccccagctacctgcaccactccttcagaaatagacatcaaaactgcctcatcgccactttcacattcttctgaaacggaactgacgctttttggctttaaagatcttgagcttgctggaagcaatgatgatacctgggacccaggttcccctgtgaggaaacctgcattggcccctaaggggcccaagctcccccacgctccaccctgggtcaagagtcccccattattaatgcaccagaacagagtggcttcattgcaagaggagctccaggatattacaccagaggaagaactatcctataaaaccaatgggctggcactttccaagcggttcatcactaggcaccaaagcattgatgtaaaagacactgcacatttgctaagagcctttgatcaggccagctcaaggaagatgtcatatgatgaaataaattgtcaatcttatctttcagaaggaaatcagcaatgcattgaagtccctgttgaccaggacccagattctaaccagacaatatttgcttccaccttaagaagtatagttcaaaaaagaaacttgggggcaaatcactacagctctgattcccagctctcagctggccttacccctccaacttcagaagacggcaaagcacttataggaaagaaaaagatcctctcaccatctccttcccaattgtcagagtccaaagaattgttggagaatatccccccaggtcccctgagcaggagaaatcatgcagttttagaaaggcgaggttcaggagctttccctttagatcacagtgttacccaaaccagacaagggtttctcccacccttaaatgtaaattctcaccctcccatctcagatatcaatgtcaacaacaagatttgcagccttctttcttgtggtcaaaaagtgcttatgccaacagttccgattttccctaaagaattcaaaagtaagaaaatgttgttaaggagacaatcattgcaaactgaacaaattaagcaattagtaaacttctaggagatgggtataaaacacatcttcttcaaatgtttatatcagagaaacaaagaactagagaagaaatcttaaatgttcattcttttaaatctcgtgattggttagtccataatggctagatggattaaaatgtaatgtgatttgtactaggcgtcatgagcataaaaaataatacatagtttctgttaagggaattctctcaaacaaaaggaaagcgatttttctcaatgcttctaatatttaacaatctccatgtagtccaaatttgtcattaaaaaaaaatcaaagaaagaaggccacgtatgttggggtaatttttaaaaattttcagattggctaaatattttattaggaaacagttttcaagtcaataatttttttaacatttcatgttaataaatgagattgaaattttttatgatctctaaaccataaaagaaaacaccgacagctgtaaaatgttctaagataaaaaaactcgagctacaaagaaagaatgaactaattctttacaaatgttgactgaagatagataaaactctaattaaaaatttaaaaggttaaacactgtattagaatgggcaactaaaatattcgtggtgtcagtttaattagtgtcaaactggcaagtcagagttttacaacctactagtaatctatgccgggtcttgttgtttgtgcactgtgttttgctttgctttgttttggtttttaaacagacttacctgtaaagttatcttacggaattattctttctccatatcttttaaggaattattctttctccatatcatcttttaattcctgttattagttttggaagcttatccataagtttccaaagacaagatgatataaaagttaaaaagcattcctctttacttatatcaaattattcttgtctttcaaaaagaaccaaaaaaaaaaaattcatcatggataaaaactaagcgcttgccttcttttaaaaagaaaaactgatgattagattaggttagctaaaattaatagaggcagtagaaacttaatcacaaaatgtactaaatatttggcaatattaaacaatgcctttttatttctgatatgtagttattagacatttatatattaaggataacttccttagtgtgacattccaatcatttagtattttaggacctgtgaataacttccaacaaaattaatgaataccatattagtattataaaatattataaagtaataattatatcatctatataacttcaaagtatgatgtttatacaaagaatccttatttcagtctagcagcttaacaacaaaggataaatcagactatacaaaacctaagtgtattaatttgatgattgtcacgtacaactttctttgccttccaagtagaggtgatcctaacaattggcatgatgcttttcttggtaatttgatataagcaagttgtaatgtacatagtaattatttaattactgtggcttttattttaaaaagtaattagaggtttttccatttcatgtcttgaacaacattaatattaattacactagaaatattttttgattcagaacttagaattgtacctgatatttataggtatttaaatgctttctgcaagttaaatatcgagaaaagtacttgacttcaagttgtaaggatacaatttggaagggtatgtaaatagattagttcataaacaaaatggtatcaataaagattttaaatatca

SEQ ID NO: 1160 - DNA, 2441 bp, Homo sapiens
  source 1..2441: mol_type = genomic DNA
aggagggtgaggggcgggcccagcgagcggacgccgggcgcggcggcgcgcggagaagtgcggcggagcggcgcctgcattagcaggtatgcaaagaagccttttcaccctgatgtccttagagataatatggatcagtccagagttctcctctgggtgaaagcagaaccctttatagtgggtgccttgcaggtcccccctccatccaagtttagtcttcactatctcaggaagatatccacctatgtgcaaatccgggccacagaaggagcttacccgcgcctctactggtctacatggaggcacatcgcttgtgggaagctgcagttggccaaggacctggcgtggctttacttcgaaatatttgatagtctttcaatgaagacacctgaggagcgcctggaatggtctgaggttctgtccaactgcatgtctgaggaggaagttgaaaagcagagaaatcagctttcagtggacacgctacagtttctgctcttcttatacattcaacagttgaacaaggtctccctaaggacatctttgattggcgaagagtggcccagtcccagaaacaaatctcagtctcctgacctgactgaaaaatctaattgtcataataagaactggaatgattacagtcaccaagcttttgtctatgatcatctgtctgatctcctcgagctgcttttagatccaaaacaactcactgcatcatttcattcaacccatagtagtctagtgtctcgagaagctgttgtggcgctcagcttccttattgaaggtacaataagtagagccaggaagatctatccacttcatgaacttgcactgtggcaaccactgcatgcagatagtggcttctcaaagatctctaagactttctctttctacaaactggaaacctggttgaggtcctgtttgactgggaatccatttggtacatcagcttgcctcaagtctggaaagaaattggcttgggctcatcaagttgaagggaccaccaaaagagctaagattgcttgtaatactcatgtggcccctaggatgcaccgactggtagtgatgagccaggtttacaagcagacactggctaagagctcagacactctggcgggggcacatgtaaagattcatcgttgcaacgaatcttttatatatctgctctctcccttacgatctgtgacaattgagaagtgcaggaatagcatctttgtcttgggccctgtagggactacacttcacctccacagttgtgacaatgttaaagtcattgctgtttgccatcgtttgtccatctcttctacaacaggttgcatctttcacgttcttacgcctacacgcccacttattctctctgggaaccagacagtaacttttgccccttttcatacacattacccaatgctagaggaccatatggccaggactggccttgctacagtgcctaactattgggataatccaatggttgtgtgcagagagaacagcgacacaagagtcttccagcttttaccaccttgtgaattctatgtatttattattccctttgaaatggaaggggacacaacagagatacccgggggtcttccatctgtatatcagaaagcactgggtcaaagagaacagaagatacagatctggcagaaaactgtgaaggaggctcatttgacaaaggatcaaaggaagcagttccaggtactggtagagaacaagttttatgaatggttgattaatacaggacatcgccaacagctggacagccttgtaccccctgcagcaggctccaaacaagcagctggataaggatcttacatgcagacactgggccctggaaatacaaggataaatggaggatggtgctcatcttgaaacttgaaactaaattgggaaggtgctattgctgcttaagagacattgggacttttctgtctttttttttttttttttttgaggcagagtcttgttctgtcgcccaggctggagtgcagtggcgcgatctcggctcactgcaagctctgcctcccgggttcacgccattctcctgcctcagcctcctgagtagctgggactacaggcgcccgccaccacgcccggccaattttttttgtatttttagtagagacggggtttcaccgtgttagtcaggatggtctcgatttcctgacctcgtgatccgcccatctcggcctcccaaagtgctgggattacaggcgtgagccaccgtgcccagccttctgttctatttaagaactttgatttccattccattttcatttattactgtttaggccgaattttcgctaaacttctgactttcatataaacatattgcttatagaacatcagaagactcgtctttgtgatgcccaaatgaaaaagttggtgaaggtagtaccattgtatgtatgttaatattaaagcaactgagtgtagatttgcaa

SEQ ID NO: 1161 - DNA, 855 bp, Homo sapiens
  source 1..855: mol_type = genomic DNA
ggcggtgcgttcttctacacatgcgcagggttgggcgggtcttcttccttctcgcctaacgccgccaacatggtgttcaggcgcttcgtggaggttggccgggtggcctatgtctcctttggacctcatgccggaaaattggtcgcgattgtagatgttattgatcagaacagggctttggtcgatggaccttgcactcaagtgaggagacaggccatgcctttcaagtgcatgcagctcactgatttcatcctcaagtttccgcacagtgcccaccagaagtatgtccgacaagcctggcagaaggcagacatcaatacaaaatgggcagccacacgatgggccaagaagattgaagccagagaaaggaaagccaagatgacagattttgatcgttttaaagttatgaaggcaaagaaaatgaggaacagaataatcaagaatgaagttaagaagcttcaaaaggcagctctcctgaaagcttctcccaaaaaagcacctggtactaagggtactgctgctgctgctgctgctgctgctgctgctaaagttccagcaaaaaagatcaccgccgcgagtaaaaaggctccagcccagaaggttcctgcccagaaagccacaggccagaaagcagcgcctgctccaaaagctcagaagggtcaaaaagctccagcccagaaagcacctgctccaaaggcatctggcaagaaagcataagtggcaatcataaaaagtaataaaggttctttttgacctgttgacaaatgtatttaagcctttggatttaaagcctgttgaggctggagttaggaggcagattgatagtaggattataataaacattaaataatcagt

SEQ ID NO: 1162 - DNA, 1415 bp, Homo sapiens
  source 1..1415: mol_type = genomic DNA
gtgacggggaggcggtgcccggggcatctccgcggcggaactcagctgtgagaagtcactgctttggggagacctgatctggctgtgccagatggacactgagaaagaagtagaagactcagaattagaagaggaacatggagctgatccaggacacctcccgcccgccactggagtacgtgaagggggtcccgctcatcaagtactttgcagaggcactggggcccctgcagagcttccaagcccgacctgatgacctgctcatcaacacctaccccaagtctggcaccacctgggtgagccagatactggacatgatctaccagggcggcgacctagagaagtgtaaccgggctcccatctacgtacgggtgcccttccttgaggtcaatgatccaggggaaccctcagggctggagactctgaaagacacaccgcccccacggctcatcaagtcacacctgcccctggctctgctccctcagactctgttggatcagaaggtcaaggtggtctatgttgcccgaaacccaaaggacgtggcggtctcctactaccatttccaccgtatggaaaaggcgcaccctgagcctgggacctgggacagcttcctggaaaagttcatggctggagaagtgtcctacgggtcctggtaccagcacgtgcaggagtggtgggagctgagccgcacccaccctgttctctacctcttctatgaagacatgaaggagaaccccaaaagggagattcaaaagatcctggagtttgtggggcgctccctgccagaggagaccatggacttcatggttcagcacacgtcgttcaaggagatgaagaagaaccctatgaccaactacaccaccgtcccccaggagctcatggaccacagcatctcccccttcatgaggaaaggcatggctggggactggaagaccaccttcaccgtggcgcagaatgagcgcttcgatgcggactatgcggagaagatggcaggctgcagcctcagcttccgctctgagctgtgagaggggctcctggagtcactgcagagggagtgtgcgaatctaccctgaccaatgggctcaagaataaagtatgatttttgagtcaggcacagtggctcatgtctgcaatcccagcgatttgggaggttgagctggtaggatcacaataggccacgaatttgagaccagcctggtaaaatagtgagacctcatctctacaaagatgtaaaaaaattagccacatgtgctggcacttacctgtagtcccagctacttgggaagcagaggctggaggatcatttcagcccaggaggttgtggatacagtgagttatgacatgcccattcactacagcctggatgacaagcaagaccctccctccaaagaaaataaagctcaattaaaataaaa

SEQ ID NO: 1163 - DNA, 7179 bp, Homo sapiens
  source 1..7179: mol_type = genomic DNA
cttcctcattggcgccgtgcagagaggcggaatgttcaactcctaactgcagcggaaacgtgggagccgcgcgggccgctgtcgtcccaacccccgccgccctcgtcgcgcgcggggcctccgcgcccccggctgctgctcacgccccgcccgggagccagattttgtggaagtataatactttgtcattatgagatgtcgtctctcggtgcctcctttgtgcaaattaaatttgatgacttgcagttttttgaaaactgcggtggaggaagttttgggagtgtttatcgagccaaatggatatcacaggacaaggaggtggctgtaaagaagctcctcaaaatagagaaagaggcagaaatactcagtgtcctcagtcacagaaacatcatccagttttatggagtaattcttgaacctcccaactatggcattgtcacagaatatgcttctctgggatcactctatgattacattaacagtaacagaagtgaggagatggatatggatcacattatgacctgggccactgatgtagccaaaggaatgcattatttacatatggaggctcctgtcaaggtgattcacagagacctcaagtcaagaaacgttgttatagctgctgatggagtattgaagatctgtgactttggtgcctctcggttccataaccatacaacacacatgtccttggttggaactttcccatggatggctccagaagttatccagagtctccctgtgtcagaaacttgtgacacatattcctatggtgtggttctctgggagatgctaacaagggaggtcccctttaaaggtttggaaggattacaagtagcttggcttgtagtggaaaaaaacgagagattaaccattccaagcagttgccccagaagttttgctgaactgttacatcagtgttgggaagctgatgccaagaaacggccatcattcaagcaaatcatttcaatcctggagtccatgtcaaatgacacgagccttcctgacaagtgtaactcattcctacacaacaaggcggagtggaggtgcgaaattgaggcaactcttgagaggctaaagaaactagagcgtgatctcagctttaaggagcaggagcttaaagaacgagaaagacgtttaaagatgtgggagcaaaagctgacagagcagtccaacaccccgcttctcttgcctcttgctgcaagaatgtctgaggagtcttactttgaatctaaaacagaggagtcaaacagtgcagagatgtcatgtcagatcacagcaacaagtaacggggagggccatggcatgaacccaagtctgcaggccatgatgctgatgggctttggggatatcttctcaatgaacaaagcaggagctgtgatgcattctgggatgcagataaacatgcaagccaagcagaattcttccaaaaccacatctaagagaagggggaagaaagtcaacatggctctggggttcagtgattttgacttgtcagaaggtgacgatgatgatgatgatgacggtgaggaggaggataatgacatggataatagtgaatgaaagcagaaagcaaagtaataaaatcacaaatgtttggaaaacacaaaagtaacttgtttatctcagtctgtacaaaaacagtaaggaggcagaaagccaagcactgcatttttaggccaatcacatttacatgaccgtaatttcttatcaattctacttttatttttgcttacagaaaaacggggggagaattaagccaaagaagtatatttatgaatcagcaaatgtggtgcctgattatagaaatttgtgatcctatatacaatataggacttttaaagttgtgacattctggctttttcttttaatgaatactttttagtttgtatttgactttatttcctttattcaaatcatttttaaaaacttacattttgaacaaacactcttaactcctaattgttctttgacacgtagtaattctgtgacatactttttttttcttatagcaatacactgtaatatcagaaatggttggcctgagcaacctagtaagacctcgtctctactaataattaaaaaactagctggcatggtagcacacacctgtagtcccagatacttgggaggccaaggcaggaggattgcttgagacctagcaatcagtcagggctgcagtgagccatgatggcaccactgcactctagcctgggcaagagaacaagatcctgtctcaaaaaacaaaaaaaagaaagaattgatagtacaaaatccaacaacaatactgagatgatctaagaaggttataacaaaatgctcttcagaaatacctaagtgctgagaatttttagtactaaagagcacagctgctcaaagtaaagcctgagcagtgttctcagtaatgtatttgaaggaaaaataccctgatttgaaaccaacagcagatgttgcaaactttcataccactgctggccatggaagcctcttaacaacacactgtcatttaaggctgtgcttgtgctttatacaaagagaaagaggtggtcttaaggggatgcttccaggggggtgagttcatgcctctcctgtattttccagcaagtggggtatgtgtggtggtttgttttttagaggggcataataatccaggattctaagcatatgctcagctattttaaagaggaaattaaatattataaaagaaatagtaaagataagttatcctcacttaggcaaaagcacaggtcctttccatatcaagtttagcctaccagggttgttttttgttttaaccctgcttaataatgttggtgttttagaagtagatacaggcactgctctgaaaacctggctagccaaggatattctcagaatgttatcacctgtttgtcaaagcttgtttaaattataaaacacttttaattatatatatgaggcaaaagaactaagacttttttcaaactaaattagaaaggagtgtcattatttgactgttaaaccaaaatatttttggtgggtctttttatggaagtttaaagaaaggacatcatcatagatatgatctaacagtatttctaactatatttgatcattaaaagcctcttggaatttgaagcgtgacgtgtttctaatgccccttgagaggtgaaaaataccacataatgatcagtatgctgtgccagcttcatttggggagaaataactagtagaaagttctgggtgtgaggtgtacagcagtctaggtggcatagtgatgaagaaagggatcagagtctgactgtcactcagaatcctgggctcagttgcttgacaaccttgggaaaattgttttatctttgtgcgtctgtttgctgatcttcagcgtgggaataataacagtacctacttgaaaggatcattgtgcggattaaaagaaataatatatgtaaagcactttaacacagcaccaggcccacggaaagtggctaatgttagctactatgaatggtgccagtgaagacactgaaaaataagtgatttcagtaaccttctggaaagctatcagtttcaaataatattttctctgtagtatgagatgaaattaaaagtggatagctttcaggaaagataaagagaacatgcttagaatgtaagctaaacagattttttctgttgctctttgaaaactatgagccctggccagcttaacctggtctgaggtgagactaaacacaaaaacagtagataaatctctccctaaaagatggattcccccacatacccatgctactagtttctctgtctattcacacatatgtacaaatacatgaacacagcctgtctgtgctcagacatagagaagtactacctgacttgagtcaatgcacccaagaagaaaagcttggagtagagcagaagggagggcttgggactcctgtctttccagcatgccctggggtgcagtggtcagccacctgaagagagagccaatagcatggggtttacaaggcaaagatagtcattcattcaacacatattcatagagctccttctctgtgccagacactgttctggaagatagctagatgaaaatctttgcactcacagagcttacatgccagtgagtgaagatcgatgataaataaagcaaatgcatcatatgttcacatttgataagtatatgccaaaaaatgaagccgggaaggaggacaaggcccatgggtgggtgttgaggtttttaaagtgtggtcaggaaaggccccactgataaggtaacatttgagcaagtctgaaaaaggcaaggggatctttggggctaacttcgggatccctgcactttatgtaagaatgtaaacctggagtctcatttaagaatgatcagcaatacgtttagaacatatgaactgaatgaaatggacattttttcttaatttatgtataaatccatatgattatacataaagttctgatgcattaataaaagcagccaaatagggccaaagagaaaaataacaggactctgtactggacctaactttatcattaattaggtaatattttcctcatttctttactgctgccattttcctcaccagtattccagagatggtcatagctcattactctaccaccaagaacctaaaaggaattagaatacagcagaattggcctcagtgaagagcttaaaattgttctcctcgtagaactggactattgatcattaccacgtgacgttggctctattactttctgttcccaatgtccttctagtggtttgaaaatgttaaaacatccctaaaatctaaatcatataatcagaattctatagtgtcccactctatctgtaaagatcatttggaagactttagactctattaattttaaaaggaatatttattagccatatgcagaatttctaatgatgatattgtacagcttctaattcacttttcagatcagtgtttgaaatggcaattatcagtgttggatttagttccaactacttgatttacaaaaatgtacatttagaggttaaaagaaacagtgagaaatgtaaacattcaaaatgataattgaatctctcagttgtgggaataattatcagagacatgcaactgaaaatgtctcacctttcatctttttttcttaattcataaagttatcttgtagaatttgatgagaccctccctagtcattctcaactggggcggtgctgtcaccgaatggtgtttgagagtgttggggctagggcacatttttggttgtcacagcaactggggtggcatttgctgcccagtgccaggaatagtaacattatgaatgccagggacagtgtgctcagtaaagtcttccatccaaaaggggcagggcacggtggctcacgcctgtaatcccagcactttgggaggccaaggtgggcggatcacctgatgtcaggggttcgagaccagcctggccaacatggtgaaaccctgttgctactaaaaatacaaaaattggctgggtgtggtgtcacatgccagtaaccccagctactagggaggctgaggcaggagaatcacttgaacccgggaggcagaggttgcagtgagctgagattgcaccactacactccagcctggatgacagagtgagacttcatctcaaaaaaaaaaaaaaacaaaaaaaaacaacccggtagcattgtcccttccccactgacaaacttatcaaatccagaagctttagagtttcgtctctaattatttttctcctgaacaaaattacccaagtcaaaacaaaatgtatttttagaattacggcagcatacgacctgaattttgtgagtttcgtggctttatcttaaatcaccatttccctaaaaatggtttctttctccttagaaatgctggtggcaacttgatgaaacagccaaatgcaccagggcaggtcactttcccattacactgattccacaattaaaaaaaaaaaagaaaaaaaactcattgagatagctacagttctataggttaatttaaagcctcctttttctactcatttttgaaagcaaaattacattttactattttacataaccagtgaaaagacgttgaaagcctacagctcactgtttttggtgctctggaaatgttgagggtgggtttttaaccagtgatttttaacgtgcagtgaatttgttagacttttaaacaccagctaaggtagtcaaacttgatccccattaaaaatcaaggaattaggggtcgggggagggtttaggagtgatccagaatgacctcccagaattactgtgcgtacaactttatttttcagagttttcattggaatggtaagagttttatgaaagacagttttaaaacttattctgagttaaatattaatactttaaaaaattattgtactagacttattgcagccttttgaaagtagcagagtttcatcataccacatatataacagagcataaattttctataatcaggcaccttttgctgcttttgagtaagactgttttcctgtttaagtgttaagcatcgccagacataaaaatctattctctcctctcgattgtagcatagcctgacagctctagatacagcatttctatgatgaaaaatgagtatccatcaggaaatctagaagactagccgtgttttctcagactccacctttgtttgcactctgttgcctgtgaggagctttctggcatgtgattatttacttcaaaactagagttccaagcacctacattaattattttatattgtgtgcagaatagtatatcttttaatgtcagatatgatacactgcacatattgcttttgcactcttaaaatttttgtactaaataatagaaaatatttatattctttgagtgtgagctttgaatagatggcattatcactttattgtttttttaacaaaaactttttctcaattattctattgcaatgttattctgagcaagtcctatgccaaatatcttgtataatgtttgtatggaagattaaattttactcttgtgtggtaagactatttcagttactgattttatagttggaatttgatattccagcacaaagtccacagtgtattcagaaatccaagttggtgtcatacatttcattttgatgtgaacttttctttgctttcctttgttctaagactccattttgcaataaacgttttgacagtaaa

SEQ ID NO: 1164 - DNA, 705 bp, Homo sapiens
  source 1..705: mol_type = genomic DNA
ctggcttcttggcgcgatgaggttccggttctgtggtgatctggactgtcccgactgggtcctggcagaaatcagcacgctggccaagatgtcctctgtgaagttgcggctgctctgcagccaggtactaaaggagctgctgggacaggggattgattatgagaagatcctgaagctcacggctgacgccaagtttgagtcaggcgatgtgaaggccacagtggcagtgctgagtttcatcctctccagtgcggccaagcacagtgtcgatggcgaatccttgtccagtgaactgcagcagctggggctgcccaaagagcacgcggccagcctgtgccgctgttatgaggagaagcaaagccccttgcagaagcacttgcgggtctgcagcctacgcaaactgaagcaggcccagaccctgatgagctccctgggctgaggagaagggtgttccaggcctgtgtggagccgccctgcccgtatggagtcacgccctctgaactgctcttcgggaggcagccctggttctaggatgctgaggccctggcccggactctggcctcccagatccccagctgcctcacttctctcttgagaacttggctcagggctcctgaggacctttcccagcattaccttcccttcccttgaaaggcaattgttggctgttttcataagcaggaaaaataaacagaagtataaagg

SEQ ID NO: 1165 - DNA, 882 bp, Homo sapiens
  source 1..882: mol_type = genomic DNA
ggtggccgatagctggtcctctttctccaacacctagcctgagacttggcggcgcggctgctatcctgaactagcttggtaagtgttgtgtcccgaaccagcgtagagagacctcggaccagccgccttgatgacagcatccgcgtcctccttttcatcatctcagggtgtccagcagccctccatctacagcttctcccaaataaccagaagcttgtttctcagcaatggtgtggccgccaacgacaaactccttctgtccagcaatcgcatcaccgccattgtcaatgcctcggtggaagtggtcaacgtattcttcgagggcattcagtacataaaggtgcctgttaccgatgctcgtgactcgcgtctctacgacttttttgaccccattgctgatcttatccacaccatcgatatgaggcagggccgtacgctgctgcactgcatggctggagtgagccgttccgcctcactgtgccttgcgtacctcatgaaataccactccatgtcgctgctggacgcccatacatggaccaagtcgcgccgccccatcatccggcccaacaacggcttttgggaacagctcatcaattacgaattcaagctgtttaataacaacaccgtgcgcatgatcaactcgccggtaggtaacatccctgacatctatgagaaggacctacgtatgatgatatcaatgtaagccatcccggccagcccctgacatctgccatcgatcttgcaccaagactgaacttgaacactgacattttgttagtaaagaaaaccggatggtgccttgttaaagggcaagaaaaaagggagggggttggagttttgaacgtagtaagccttaccttaatagaattaaattcatgaaac

SEQ ID NO: 1166 - DNA, 4189 bp, Homo sapiens
  source 1..4189: mol_type = genomic DNA
ttgggggatgccgacgcctgggccttgaggatgctgcggaagctcaccatcgagcagatcaacgactggttcaccatcggcaagacggtgaccaatgtggagctgctgggcgcgccgcccgccttcccggcaggggcggccagggaggaggtgcagcgccaggacgtggcccccggcgctggtcccgcggcccaggctccggctctggcccaagctccggcccggccggccgctgcgttcgaaaggtcactcagccaaaggagctcagaagtagagtatattaacaaatacagacagctcgaagcacaagagcttgatgtgtgtcgcagtgtccaaccaaccagtgggccaggtccaaggccatctttggctaaattaagcagtgtgacatgcatcccagggacaacttataaatatcctgatttgcctataagtcgatacaaggaagaggttgtgtctttgatagaaagtaattccgtggtgattatccatggggccacgggaagcggtaaaagcactcagctcccgcagtatatcttggaccactacgttcagcgctccgcctactgcagcattgtggtcacccagccccggaagataggggcaagcagcatcgccaggtggatcagtaaagagcgtgcctggaccctgggaggtgtggtgggctaccaggtagggctagagaaaatagcaacagaggacaccaggctaatttatatgacaactggagtcctgcttcagaaaatagttagtgccaagagtttgatggaattcacacatatcatcattgatgaagtacacgaacgaacagaagaaatggatttcctgctattggtagtccgcaaactcttaagaacaaattcacgttttgtgaaggtggtcctgatgtcggctaccatcagctgtaaagagtttgcagactactttgctgttcctgttcaaaacaagatgaatcctgcatatatttttgaagtggaaggcaagccccattcagttgaagagtattatcttaatgatttggagcacattcatcatagcaagctctctcctcatctcctggaggaaccggtgataactaaggatatatatgaagttgctgtctctctcattcagatgtttgatgacttggatatgaaggagagtgggaacaaggcttggtcgggggcccagtttgtgttggagcgaagcagtgtgttggtgtttttgccaggtctgggtgaaataaattatatgcatgaacttctcacaagcctggttcataaaaggttgcaggtctatccactccattcaagtgtggctttagaagaacagaataatgtctttttaagtccagtccctgggtacagaaagattattctgtccaccaatattgcagagagttctgtcacagttccagatgtcaaatatgttatagatttttgtttgactagaactttggtctgtgatgaagatacaaattatcagagtctgcgattgagttgggcttctaaaaccagctgtaatcagagaaaaggccgtgctggacgagtgtctagagggtactgttaccggctggtacacaaggatttctgggacaactccatccctgatcatgttgttcctgagatgttgcgttgtccattaggaagcacgatcttgaaagtgaaattacttgacatgggtgagccgagagctctgctggccactgccctttccccgcctggtctgagtgacattgagcgcaccatccttctactaaaggaggttggagcacttgcagtgagtgggcagagagaagatgaaaacccccatgatggtgaattgaccttcttaggaagagttttagcccaacttcctgtaaatcagcaacttggtaaactcatagtccttggacatgtatttggatgtctagatgaatgtcttattatagcggcagctctttctttgaagaatttttttgcaatgcctttccggcagcatctcgatggatataggaacaaagtgaatttctctggcagtagcaagagtgactgtattgcacttgttgaggcatttaaaacatggaaggcttgcagacagacaggggagctgcggtacccgaaggatgaacttaattggggacggttaaattacattcaaatcaagagaattagagaggtggctgaattatatgaagaattgaagactagaatctcacagttcaacatgcatgttgattctcggcgacctgtcatggaccaagagtatatatataagcagcgattcatcctacaggttgtattggcaggtgctttctatccaaattactttacttttggacagccggatgaggagatggcggtgagggagctggctggcaaggaccccaagacaactgtcgtgttgaaacacattcctccctatggatttctttactataaacaactacagtctctctttagacagtgtggtcaagtcaaatccattgtatttgatggtgcaaaagcctttgtggaattctcacgaaatccaacagagagatttaaaacccttcctgcagtatatatggcaattaagatgtctcaactaaaagtttcacttgaactcagcgttcattctgcagaggaaattgaagggaaggtgcaaggcatgaacgtctcaaagctcaggaacacaagggtgaatgtggacttccagaagcagacggtagatcctatgcaagtctcctttaacacatcagacaggtcccagacagttacagatctccttctaactattgatgtcacagaggtggttgaagtgggacacttttggggatacaggattgatgaaaacaactcagagattctgaaaaagcttactgctgaaatcaaccaactgacgctggtgcccttgcccactcacccacatccagacttggtctgtctggcaccttttgctgattttgataaacaacgctactttagagctcaagtcctttatgtttctggaaattctgctgaggtattctttgtagattatggcaataagtctcatgtagatctacatcttttgatggagattccctgtcaatttcttgaacttcctttccaggctttggaatttaagatttgcaaaatgagaccatcagcaaagtctcttgtttgtggcaagcactggagtgacggggccagccagtggttcgcctctctggtgagcggctgcaccctccttgtgaaggtcttctctgtggtgcacagcgtcctgcacgtggatgtgtaccagtactcaggggtccaggatgccatcaacataagagacgtcctcatccagcagggctatgccgagctcacggaggagtcctacgagtccaaggttaatattctcagggctgctattaacaagctagtctgtgatggaccaaatggatgcaagtgtcttgggccagagagagttgcgcagcttcaagacattgcccgtcagaagcttttaggtttgttctgtcagtcaaaaccaagggagaagattgttcccaagtggcatgaaaagccctacgagtggaatcaggttgatccaaagctggtcatggagcaggccgaccgtgagagcagcagagggaagaacacctttctctaccagctccacaaactggttgtgctcggcacctgagcatgtccacaggtggcctccagcacacccctcaggaagctgtggaggctggattccaggctccctccgcagactgactttcctctgtgtctgggtgttacagtctgtgcccactgcatcctaaaggccttttctttcttcttttctctttgggtgatagtcagagagtggtgtttttgttcaggtgggaaggattggaaactctagtcttttctagaaacagaaaatcactgtattaaatattttggaaagattgttctgaaagaagtctgtttggataaagagctgtattttgctttaaatttattaaggtaaatataagtagttaatcttagatgtaaggttccagaatgtgcttacatattctgttctgttacagtgatttaaaccagtagtataggaaaaaacttaaaaaaacaaaaaaaccatgtagtattttctgatttttttttccatgagggaaaatatctaatttttataagactaagttgagttatacttcttggttcacattttggaaatcagagattacagattacatggccatagcttatctgtgttaaaacaataaaagcattaaatg

SEQ ID NO: 1167 - DNA, 987 bp, Homo sapiens
  source 1..987: mol_type = genomic DNA
acagttgaagaagcgaccgagggactgggagtcgttagtgaggatgacgcggcatggcaagaactgcaccgcaggggccgtctacacctaccacgagaagaagaaggacacagcggcctcgggctatgggacccagaacattcgactgagccgggatgccgtgaaggacttcgactgctgttgtctctccctgcagccttgccacgatcctgttgtcaccccagatggctacctgtatgagcgtgaggccatcctggagtacattctgcaccagaagaaggagattgcccggcagatgaaggcctacgagaagcagcggggcacccggcgcgaggagcagaaggagcttcagcgggcggcctcgcaggaccatgtgcggggcttcctggagaaggagtcggctatcgtgagccggcccctcaaccctttcacagccaaggccctctcgggcaccagcccagatgatgtccaacctgggcccagtgtgggtcctccaagtaaggacaaggacaaagtgctgcccagcttctggatcccgtcgctgacgcccgaagccaaggccaccaagctggagaagccgtcccgcacggtgacctgccccatgtcagggaagcccctgcgcatgtcggacctgacgcccgtgcacttcacaccgctagacagctccgtggaccgcgtggggctcatcacccgcagcgagcgctacgtgtgtgccgtgacccgcgacagcctgagcaacgccaccccctgcgctgtgctgcggccctctggggctgtggtcaccctcgaatgcgtggagaagctgattcggaaggacatggtggaccctgtgactggagacaaactcacagaccgcgacatcatcgtgctgcagcggggcggtaccggcttcgcgggctccggagtgaagctgcaagcggagaaatcacggccggtgatgcaggcctgagtgtgtgcgggagaccaaataaaccggcttgggtgcgc

SEQ ID NO: 1168 - DNA, 2074 bp, Homo sapiens
  source 1..2074: mol_type = genomic DNA
gccgggccggagcggggtgggtaggggacgcgaggcggagcggggccccacacaggccgcggcggctggctcgggcccctacggtcccggcggcggctggaggaggaagccaggcggctggcggaggaggagagacggaggaggccgagaccggagcgccgctcgccgcagacttacttccccggctcagcagggaaaggttcctagaaggtgagcgcggacggtatgcaaagttgtgaatccagtggtgacagtgcggatgaccctctcagtcgcggcctacggagaaggggacagcctcgtgtggtggtgatcggcgccggcttggctggcctggctgcagccaaagcacttcttgagcagggtttcacggatgtcactgtgcttgaggcttccagccacatcggaggccgtgtgcagagtgtgaaacttggacacgccacctttgagctgggagccacctggatccatggctcccatgggaaccctatctatcatctagcagaagccaacggcctcctggaagagacaaccgatggggaacgcagcgtgggccgcatcagcctctattccaagaatggcgtggcctgctaccttaccaaccacggccgcaggatccccaaggacgtggttgaggaattcagcgatttatacaacgaggtctataacttgacccaggagttcttccggcacgataaaccagtcaatgctgaaagtcaaaatagcgtgggggtgttcacccgagaggaggtgcgtaaccgcatcaggaatgaccctgacgacccagaggctaccaagcgcctgaagctcgccatgatccagcagtacctgaaggtggagagctgtgagagcagctcacacagcatggacgaggtgtccctgagcgccttcggggagtggaccgagatccccggcgctcaccacatcatcccctcgggcttcatgcgggttgtggagctgctggcggagggcatccctgcccacgtcatccagctagggaaacctgtccgctgcattcactgggaccaggcctcagcccgccccagaggccctgagattgagccccggggtgtgctaaagaggcagtacaccagtttcttccggccaggcctgcccacagagaaggtggctgccatccaccgcctgggcattggcaccaccgacaagatctttctggaattcgaggagcccttctggggccctgagtgcaacagcctacagtttgtgtgggaggacgaagcagagagccacaccctcacctacccacctgagctctggtaccgcaagatctgcggctttgatgtcctctacccgcctgagcgctacggccatgtgctgagcggctggatctgcggggaggaggccctcgtcatggagaagtgtgatgacgaggcagtggccgagatctgcacggagatgctgcgtcagttcacagggaaccccaacattccaaaacctcggcgaatcttgcgctcggcctggggcagcaacccttacttccgcggctcctattcatacacgcaggtgggctccagcggggcggatgtggagaagctggccaagcccctgccgtacacagagagctcaaagacagcgcccatgcaggtgctgttttccggtgaggccacccaccgcaagtactattccaccacccacggtgctctgctgtccggccagcgtgaggctgcccgcctcattgagatgtaccgagacctcttccagcaggggacctgagggctgtcctcgctgctgagaagagccactaactcgtgacctccagcctgccccttgctgccgtgtgctcctgccttcctgatcctctgtagaaaggatttttatcttctgtagagctagccgccctgactgccttcagacctggccctgtagcttttctttttctccaggctgggccgtgagcaggtgggccgttgagttacctctgtgctggatcccgtgcccccacttgcctaccctctgtcctgccttgttattgtaagtgccttcaatactttgcattttgggataataaaaaaggctccctcccctgcccctcagcttctctctggttttctca

SEQ ID NO: 1169 - DNA, 946 bp, Homo sapiens
  source 1..946: mol_type = genomic DNA
gctccagagaggggaaggaaggggcagcagagaggggtcagaaggagggagcttaagccaggcagggttacttgtctctgtgactccttccgcctggcacatgctgcccagctatggggacctttgacctgtggacagattacctgggtttggcacacctggttagggctctgagtgggaaagagggtcctgaaaccaggctgagcccccagccagagccagagccaatgctggagccggtgtcagccctggagccgatgccagcgccggagtcggtgccagtgccgggacccaaggatcagaagcgcagcctggagtcctcgccagctcccgaacgcctgtgctctttctgcaaacacaacggcgagtcccgggccatctaccagtcccacgtgctgaaggacgaggctggcagggtgctgtgtcccatcctgcgggactacgtgtgtccccagtgcggcgccacacgtgagcgcgcccacacccgacgcttctgcccacttactggccagggctacacctccgtctacagccacaccacccgaaactcggcaggcaagaagctggtccggcctgacaaggcgaagacacaggacacaggccaccgccgaggaggaggaggaggagcaggtttcagaggtgccgggaagtctgagccttcgccctcctgctctccctccatgtccacctaggaggctgcctacacctgggcaagggcacccgggctcggctggatttccaggaagacccaccctatgacgactgcccccactcccagaccctccccccagcctgggattgagccctggggatgacccggggttggcaagggaagagctgaaatcgccctgtccttggggaccccaccctttgtgccatctgccgtttccctagtgctgggcatccagtcagccctcaataaatgcttatgaatggatcaacaaca

SEQ ID NO: 1170 - DNA, 2669 bp, Homo sapiens
  source 1..2669: mol_type = genomic DNA
ctctcccggtgtgggtactgctgtctgtggtgtggctgtgggacccgtgagcaagcagcgacgccagcggcggagaaccgacgaaaggtgtcaccacagtgatggcagtggaggacagcacgctgcaagtagtggtacgggtgcggccccccacccctcgggagctggacagtcagcggcggccagtggttcaggtggtggacgagcgggtgctggtgtttaaccctgaggagcccgatggagggttccctggcctgaaatggggtggcacccatgatggccccaagaagaagggcaaagacctgacgtttgtctttgaccgggtctttggcgaggcggccacccaacaggacgtgttccagcacaccacgcacagcgtcctggacagcttcctccagggctacaactgctcagtgtttgcctacggggccaccggggctgggaagacacacaccatgctgggaagggagggggaccccggcatcatgtacctgaccaccgtggaactgtacaggcgcctggaggcccgccagcaggagaagcacttcgaggtgctcatcagctaccaggaggtgtataatgaacagatccatgacctcctggagcccaaggggccccttgccatccgcgaggaccccgacaagggggtggtggtgcaaggactttctttccaccagccagcctcagccgagcagctgctggagatactgaccagggggaaccgtaaccgcacgcagcaccccactgatgccaacgcgacttcctcccgctcccatgccatcttccagatctttgtgaagcagcaggaccgggttccaggactgacccaggctgtccaggtggccaagatgagcctgattgacctggctggctcagagcgggcatccagcacccatgcgaagggggagcggctgcgggagggggccaacatcaaccgctctctgctggcgctcatcaacgtcctcaatgccttggccgatgcaaagggccgcaagacccatgtgccctaccgggacagcaaactgacccgcctgctcaaagactccctcgggggcaactgccgcacagtgatgatcgctgccatcagcccctccagcctgacctacgaggacacgtacaacaccctcaaatatgccgaccgggccaaggagatcaggctctcgctgaagagcaatgtgaccagcctggactgtcacatcagccagtatgctaccatctgccaacagctccaggctgaggtagccgctctgaggaagaagctccaagtgtatgaggggggaggccagcccccaccacaggacctcccaggatctcccaagtcgggaccaccaccagaacaccttcccagctcccccttgccaccccaccctcccagccagccctgcaccccagagctccctgcagggcctagagcccttcaagaggagagtctggggatggaggcccaggtggagagggccatggaagggaactcttcagaccaggagcagtccccagaggatgaggatgaaggcccagctgaggaggttccaacccagatgccagagcagaaccccacacatgcactgccagagtcccctcgcctgaccctgcagcccaagccagtcgtgggccacttctcagcacgggaactggatggggaccgttctaagcagttggccctaaaggtgctgtgcgttgcccagcggcagtactccctgctccaagcagccaacctcctgacgcccgacatgatcacagagtttgagaccctacagcagctggtgcaagaggaaaaaattgagcctggggcagaggccttgaggacttcaggcctggccaggggggcacctctggctcaggagctgtgttcagagtcaaagcctccaggatacactggccctgtgacccggactatggcgaggcgactgagtggccccctgcacaccctgggaatcccgcctggacccaactgcaccccagcccaggggtcccgatggcccatggagaagaagaggaggagaccaagcgccttggaggcagacagtcccatggccccaaagcggggcaccaagcgccagcgccagtccttcctgccctgcctaaggagagggtctctgcctgacacccaaccttcacaggggcccagcacccccaaaggagaaagggcctcctccccctgccattcccctcgcgtttgcccagccacagtcatcaaaagccgggtgcccctgggcccttccgccatgcagaactgctccaccccgctggctctgcccactcgagacctcaatgccacctttgatctctctgaggagcctccctcaaagcccagtttccatgaatgcattggctgggacaaaataccccaggagctgagcaggctggaccagcccttcatccccagggcacctgtgcccctgttcaccatgaagggccccaagccaacatcttccctccctgggacctctgcctgcaagaagaagcgcgttgcgagttcctcagtctcccatggccgcagccgcatcgcccgcctccccagcagcactttgaagaggccagctgggccccttgtactcccagagctgcccttgagtcccctgtgccctagcaaccggaggaatggaaaggacctcatcagggtggggagagcactctcagcagggaacggcgtcaccaaggtgtcctga

SEQ ID NO: 1171 - DNA, 1065 bp, Homo sapiens
  source 1..1065: mol_type = genomic DNA
agcagtctttgaaacagctgtaacggcatctgtgaaagaagataggttccaggaacggaactgccacttagattgtaaattcctgaaaaacaggacgtttttgcatctcctcccggcttccccatccctaaaccaacgtctgttgaattaaactaccaaacaaaataactgcagtacagcaatggcgatcagaaggtagaacagctgtatggctgcacattcccatcctccaaagccgatttattgcccctgctgcttccctgggcttctgctttcaccacgcagaatcggattcatcaacgttgactctgtggctgagagaagggcccagcagattaccaggatatgcttcacatcaagtaggagttgcaggagctgtatttgatgaaagtactagaaaaatactggttgtacaagatcgaaataaattgaaaaatatgtggaagtttccaggaggcctgtcagagcctgaagaagatattggagacacagcggttcgagaagtttttgaagagactggtataaaatcagaattcaggtccgtcctgagtattcggcaacagcacacaaatcctggagcttttgggaagtcagatatgtatatcatctgccgcctaaagccatattcattcaccataaatttttgccaggaagaatgcttaagatgtgagtggatggatctcaatgacctggcgaagactgaaaatacaactcccatcaccagcagagttgctaggctgctgctgtatgggtacagagaagggtttgacaaaattgacctgactgtggaagaacttccagcagtttacacaggactgttttataaactctatcataaggaactgccagagaattataaaactatgaaaggaattgattaaattcacatttatatgtttagaaacatgtagactaacgaatgacataagaaatagtggacattttggattgattaaacatctgactgtgattttctaatgtatatgatttccatgaagaaattttgtttctaaacatgcacattttaaaagcctcttttcgaataaagcaaatgcgtgaaaaaga

SEQ ID NO: 1172 - DNA, 7552 bp, Homo sapiens
  source 1..7552: mol_type = genomic DNA
tgtttgacccggaagtggctgtgttcagctgacagctgctgataaggtggcggcggcgaaggcagcggcaggtcgggagcaagatggcgctgcggccaggagctggttctggtggcggcggggccgcgggagctggcgcggggtccgccgggggaggcggcttcatgtttcctgttgcaggtgggataagaccccctcaagcaggcctgatgccgatgcagcaacaaggatttcctatggtctctgtcatgcagcctaatatgcaaggcattatgggaatgaattacagctctcagatgtcccaaggacctattgctatgcaggcaggaataccaatgggaccaatgccagcagcgggaatgccttacctaggacaagcacccttcctgggcatgcgtcctccaggcccacagtacactccagacatgcagaagcagtttgccgaagagcagcagaaacgatttgaacagcagcaaaaactcttagaagaagaaagaaaaagacgccagtttgaagagcagaagcaaaagctcagacttttgagcagtgtgaaacccaagacaggagagaagagtagagatgatgctttggaagccataaaaggaaatttagatgggttttccagagatgcaaaaatgcaccctactccagcatcgcaccccaagaaaccaggtgtgggagtatttccctcacaggatcctgctcagcccagaatgcctccttggatttacaatgagagtttggttccagatgcctataagaaaatcttagaaaccacaatgactccaactggaatagatactgccaaactgtatcccattctgatgtcatctgggcttcccagggaaactcttggacagatatgggccttagctaatcgaactacacctggcaaacttacaaaagaagaactttataccgttctagccatgatagcggtaacacaggtagtaaagccagaagaagatgacttccaggattttcaagatgcttctaagtcaggatcccttgatgactcattcagtgatttccaagagttgcctgcttcttcaaaaacaagtaactcccagcatggaaacagtgccccttctttgttgatgccacttcctggaactaaagcattgccttcaatggacaaatatgctgtgtttaaaggaattgcagctgacaagtcctctgaaaatactgttccacctggagatcctggtgataaatatagtgctttcagagaacttgaacagacagcagagaataaacctttaggagaaagctttgcagaattcagatctgcaggaactgatgatggtttcaccgattttaaaacagccgatagtgtatcaccactagagccaccaacaaaagacaaaacttttccaccatccttcccctcaggaactatacaacagaaacaacaaacacaagtgaaaaaccctctgaacttagcagacctagatatgttttcctcagttaattgcagcagcgagaaaccattgtctttttcagctgtgtttagcacatcaaaatcagtttctacaccacagtcaacaggttctgctgctactatgacagcattggcagcaacaaaaacttctagtttggctgatgattttggagaattcagcctttttggggaatattctggtctagcacctgttggggagcaggatgactttgcagattttatggctttcagtaatagctctatttcatctgagcaaaagccggatgacaaatatgatgcccttaaagaggaagccagtcctgttcctctaaccagcaacgtgggcagcacagtgaagggtggacaaaactcgactgctgcgtctaccaagtacgatgtcttcagacaactttctctggaagggtctggactaggtgttgaagacctgaaagataacactccttcaggaaaaagtgatgatgattttgctgacttccactccagtaaattttcttccataaactcggacaaatccctgggagagaaagcagtggctttcagacacaccaaagaagactctgcatcagtgaagtccttagatctcccttccattggtggcagcagtgttggcaaggaggactctgaagatgcactctctgttcagtttgacatgaaattggctgatgtgggaggagatcttaagcatgtcatgtctgatagctctttggatttaccaacagttagtggccagcatcctcctgctgcagcaggaagtggatccccctcagccacctcaattcttcaaaagaaagagacttcatttggcagttctgaaaacatcaccatgacatctctctccaaagtaacgacctttgtaagtgaagatgctcttccagagaccaccttcccagctcttgccagttttaaagacacgattcctcagaccagtgagcaaaaggaatatgaaaacagagactataaagatttcacaaaacaggacctgcctacggctgaacggagccaggaggccacgtgtcccagcccagcgtccagtggtgcctctcaagaaaccccgaacgaatgttcggatgactttggagagtttcaaagtgaaaagcccaaaatcagcaaatttgacttcttagtagccacttcacaaagcaaaatgaaatccagtgaagaaatgatcaaaagtgagctggcaacctttgacctttctgttcaaggatcacacaagaggagtttgagccttggtgataaagaaataagccgttcttctccttctccagctttggagcagcctttcagagaccgttccaatactctgaatgagaagcccgccctgcccgtcatccgagacaagtacaaagacctgacgggagaggtggaggaaaatgagagatatgcatatgaatggcagagatgcctggggagtgccctgaatgtcattaagaaggcaaatgataccttaaatggaatcagtagtagttctgtttgcacagaagtaattcagtcagctcaaggcatggaatatttattaggtgttgttgaagtgtacagggtaaccaagcgtgtggagctggggataaaagccactgcagtgtgcagtgagaaactccagcagttgctgaaggacatcgataaagtatggaataacctaatcggcttcatgtcactcgccacactcacaccagatgaaaactcgctggatttttcctcctgtatgttacggcctgggattaaaaatgctcaggagcttgcctgtggagtgtgcctcttgaatgtggactcgaggagccggaaagaagagaagcctgcagaagaacatcctaaaaaagcattcaactcagaaacagacagtttcaagctggcctatggagggcaccagtatcacgccagctgtgccaacttctggatcaactgtgtcgaaccaaagcctcctggcctcgtcctgcctgacctgctctgaacaactcctctgtgaagcattgacttttttttttctgtgacaccccacggggtgacagggaccaataaatagaatgcgagcactgcacagttcgcttccctgaatcgatatgaagaacaccgcaagggacggggcccccgtcatccccacggccagtctgcaggacttcaggtaaaattgtcccacccaaactgcacgtggcaccagaagcttgctcacttatctctacttaagattttctgaaatacggaccacggctttcttgatctaaggaagaacttgctgctgcagtattgaaactgtgaagaactgacatttgaagaaaaatagattaccgttgcgggactagaatgggcgactgcttggagccagtgcttgtttttatctaggacacttactgtcctgtgaagtagaatacatttatctgcatttagtttgttaatgtctgaaatgaataaaaagaggaaattgcgattaaactgatgttctgctttttatggagaagattctgcccatctcccctggacagtagcaggcaggtgagggcagattttacccacttggttgtcacaactgaaccagttctctactccttcccttcacttctgtccactctcaagactttttcccaaaacatgcctgggcactctgcagccgtgaagaatgctcattttgacagaggcccaaatcctgtgtattaggataatatccttccccccgggagccttcgctgcaaacctgttctgccgcatgcaaagactgtgaccatggagttttctcagacaagatttggaaaggcagtggaatgaaatctctttgcagtggcctctctccaaatttccaaagatgactgcatagggaccaacactgcctgactttgcagtatctgtgagaaaaacctgaaaattaattcagggtgaaaatgtggagctctcggcctagtgtaaagtatcaagatgtatatttatgggatagatacatgacttagaagaagtagaagaaaattgtccagaaacagtactgaattttagatagaaaaggctcatgcttcctggagtagggaattgtctttgccatttaatgtgaatgcataaaattaggggaaaaacccaagtggctaagagctgtgttattcctgggaagaactaccaatctagggcacacgtctctctgaattgttgattatgcgctttatgaagagatttttcaatctcgtgtgctttactttgtgtggtttagaccctctgacctagacttttatttttaaactgaaaaagttggtcttgtctatataattgctgcttttacataatttattttcccctctcaggacaaattctgtcttgctccatcttacagcttttccatgttctccaagaaaggtgtggaacattttcattaaacagctgttgctgaggcttctgcttgaccttctgcgtgcccgaatgcacagagaggcaccgaggagagaaaggcttttctcactcgctcccgatgataccgtctctggccattcctgactgaggcagctcactctgaatgggcacctttggagcttttgcccaccacaaggctagtggggtgtttctaacaacacaagtgggacagcttttggcaggcttttcctgaggcctcggcgcttccatcctggacagcaccacttccacatggagctggaatgcaagcaggctgctaattggccttaaaaattctttgtttttttttgagatggagtttcactcttgttgcccaggcttgagtgcaatggcacaatctcagctcagtgcaacctccgcctcccgggttcaagcgattctcctgcctcagcctcgtgagtagctgggattacaggcgtgcaccaccacgcccagctaattttgtatttttagtagaggcaaggtttctccatgttggccaggcttgaactccggacctcaggcgatccgcccgcctcagcctcccaaagtaccgggattacaggcgtgagccactgcgcctggcctaaatttcataacagaaccatgacagcagaatctacctttgcaataagaatgtttcccaggagttagagaccagccctgggcatgatggtaaagaccccagctaattatacaaaaaataattagccgggtaggtggagtgcatctgtggacattcgtggtcccagctactaggtaagctgaggcgggagatcacaagtccaggagtttgaggctgcacgtgacagcgtaggtgatgacagagcgagacactgtctcttaaaaaaaaaaaaaaaaaagtttcccagtttgaatttgtattgctgaagcatttttttgaaatgctatatagatgcctgtcatgtcacagtggcccagtatcaacattttaaaaagctcacttggtagctgggctggtttctattcctgagaaattccagaatgcctcagataaaattccttagtataatccccattttccttaccaaggatggtaggcttagtcactccttgggaggtgccacaggaaaattcagcagatgtcaacagaaaaaaagcctttgctatgaaaagtattcactacctttcatatctcttgaatacttgaaatgtttaattagatgccaccaatagggatccaaggagtgtgggacacggttgcgctgcttttctttataaacgtttattaaaatggctcaacgctgcattcagcttcacctcagctcttcttgtcagccaggagccccgtgtccttggaaactgtagccaaggttacttatttccatactgtgcattgtgtcagcccgcttcaccccactgcttgaatggccattaataagcacttttctttttttggtgggatgttttgcctttaaaatttttatggcttagtgtgtaatttaatttttgtctggacatgcttgagatagaagaggtactggatatatgaggatattttccatgctttatttttcctgtggctactagttagcattccataggggttgtgaatttttaattatttgaatattttgtgtacatatacatatttgaagggttttgggggggtcttatttgtttaaaggtgtcttctgtttgcctatttcaagtgtacttcagctttgcaaagattatagggctgtatgttacagaaataggaaatgctggccctgtactggggaccactacaaaaattccctttagccgggcgtggtggctcacgcctgtaatccccagcactttgggaggccgagccgggtggatcacccgaggtcaggagttcaagaccagcctggccaacatggcgagaccctgtctctactaaaaatacaaaaattagctgggcatggtggcaggtgcctgtaatccgagctactcgggaggctgaggcaggagaattgcttgaaccagagaggcggaggttgcagtgagccgagatcgcgccactgcactccagcctgggcaacaagagcgaaactctgtctcaaaaataaaaaattccctttaacaccttcaaggtcaaatgcctgcctttgtgaacagttaataaactgacattttcagacatttgccattcagaagggagcattgtagcctgctgtagaccattccagcaaatgtcagaatgcagggcaagatgtgtgtcgactatgttttttatgtttaagttacttacttatttcttcaggtaagtgtgtaccaaataacaatactgaaaagccctccccttgccaggccgaggaaataaagcttaagtgaaacagctcttgggggaaaaatgccactttacaaatacttttctaacaaaatagcattataatgaagtttttacttaattccattatttatatgttgacgtgaatgtaagtggttaaaaagtattcatgtgggacatctcattactttgtagctgtggctttattaaccagtgaatgctgtggcccttagcgaaatgcgttgtcttctgcgtgatgtggaattcgcgcctgtattttaaaagatggtgtggtttctcccttgtttgtattttaataaacaactgctctaattgatgtgtttagacattataaagcttcacctttaaaatattttcagggtctgttctgaaatcaccccttgttaaacttctctaaccaaaatacaagtgtagaagaatgtcaggct

SEQ ID NO: 1173 - DNA, 2111 bp, Homo sapiens
  source 1..2111: mol_type = genomic DNA
ggcggcggctggggagaagcgctctcgtcgcctgcccgaggccggagcggcggggcccgcgcctcctccccccagcgccgcggaggggggaggaggaagatggagacccacatctcatgcctgttcccggagctgctggccatgatcttcggctacctggacgtccgggacaaggggcgcgcggcgcaggtgtgcaccgcctggcgggacgccgcctaccacaagtcggtgtggcggggggtggaggccaagctgcacctgcgccgggccaacccgtcgctgttccccagcctgcaggcccggggcatccgccgggtgcagatcctgagcctccgccgcagcctcagctacgtgatccagggcatggccaacatcgagagcctcaacctcagcggctgctacaacctcaccgacaacgggctgggccacgcgtttgtgcaggagatcggctccctgcgcgctctcaacctgagcctctgcaagcagatcactgacagcagcctgggccgcatagcccagtacctcaagggcctggaggtgctggagctgggaggttgcagcaacatcaccaacactggccttctgctcatcgcctggggtctgcagcgcctcaagagccttaacctccgcagctgccgccacctttcggatgtgggcatcgggcacctggccggcatgacgcgcagcgcggcggagggctgcctgggcctggagcagctcacgctacaggactgccagaagctcacagatctttctctaaagcacatctcccgagggctgacgggcctgaggctcctcaacctcagcttctgtgggggaatctcggacgctggcctcctgcacctgtcgcacatgggcagcctgcgcagcctcaacctgcgctcctgtgacaacatcagtgacacgggcatcatgcatctggccatgggcagcctgcgcctctcggggctggatgtttcgttctgtgacaaggtgggagaccagagtctggcttacatagcccaggggctggatggcctcaagtctctctccctctgctcctgccacatcagtgatgatggcatcaaccgcatggtgcggcagatgcacgggctgcgcacgctcaacattggacagtgtgtgcgcatcacggacaagggcctggagctgatcgctgagcacctgagccaactcaccggcatagacctgtacggctgcacccgaatcaccaagcgcggcctggagcgcatcacgcagctgccgtgcctcaaggtactcaacctgggactctggcagatgacggacagtgagaaggaggcacgaggggatttttctccattattcactgtgagaactcggggaagctccagaaggtgagggagaggggacaacgacatggttcccgtggatctttaacttccagacttgcccgctctgcgcctccggcactctggtgatgacagctcaggtttccctgcctgtcactgctcgggcagaggctgctgcccagggcttctgctccggtaccttgtgaagctgcattctcctgccggtttctccagttctggggacagtggtttgctctgagacctcgcttcctttatggatccaaggagacttgctttttcagtctgttcagctttttacttgctaggatggaattgcaatttgcaagcttcttcgacaggaaactacaagttccacactttaattttatacatataaatatatacatgtgtacatatatctatgtacaggggtattatatatatacatataagatgatgatatatataatgatgatatgtattactgagaacgtaaaatatcattacatagtgatagctggacacacaaggaattcacaactccccaaagaaaatacatctggatgacctgcctagcagtttccccatgagatagaggaatgtctacgtatttcattccctgttcctgccctgaaacaatttcaatcactgacaaatcattatcattcattaataatgtttactgagtgcccatatgtgaaagaaatccactctacattccacagatgcatttcctctccccacggggtttccattttaatgggaacaatgtagaatatatctgtcttccctttatagattcca

SEQ ID NO: 1174 - DNA, 1744 bp, Homo sapiens
  source 1..1744: mol_type = genomic DNA
ctcttgatttctggggccggtgaccaggcccaacgcagccttcaagtcggcccaaacacggtttctgcctcaaggattatttatataaccattgcttattggctgctggcaaacactcgctcttctcgttggctgaaactgtcgggagaagttctgcgaaggctgctccttgcggcgttgggactgagggtcacaggcacctgtatttccgtttccggttcgcctccggagccatggcggcggcactgaagtgtctactgacattaggaagatggtgccccggccttggagtggctccccaggcccgggcgctcgccgccttagtacccggagtgacccaggtagataacaagtccggtttcctgcagaagaggcctcatcgccagcaccctggcatcctaaagctgccgcacgtgcggctgccacaggcactggctaacggtgcccagttattgctacttgggagcgctgggcccactatggagaatcaggtgcaaacactgaccagttatctctggagcagacatttgcctgtagagccagaggagttgcaaagacgggctaggcatcttgagaaaaaattcctggaaaacccagacttatctcagacagaggagaaacttcgtggagcagtgctacacgcactacgtaaaactacctaccattggcaagaactgagctacactgagggactgagcctggtgtatatggcagcaagactggatggtggctttgcagcagtctccagagcattccatgagatccgggctcgaaatccagcatttcagccacaaactttgatggactttggctcaggtactggttctgtcacctgggctgctcacagtatttggggccagagcctacgtgaatatatgtgtgtggacagatcagctgccatgttggttttggcagaaaaactactgaaaggtggttcagaatctggggagccttatattccaggtgtctttttcagacagtttctacctgtatcacccaaggtgcagtttgatgtagtagtgtcagctttttccttaagtgaactgcccagcaaggctgaccgcactgaggtagttcaaaccttatggcgtaagacaggtcatttcctggtactggtggagaatggaacaaaagctgggcacagccttctcatggatgccagggatctggtccttaagggaaaagagaagtcacctttggaccctcgacctggttttgtctttgccccgtgtccccatgaactcccttgtccccagttgaccaacctggcctgtagcttctcacaggcgtaccatcccatccccttcagctggaacaagaaaccaaaggaagaaaagttctctatggtgatccttgctcgggggtctccagaggaggctcatcgctggccccgtatcactcagcctgtccttaaacggcctcgccatgtgcattgtcacttgtgctgtccagatgggcacatgcagcatgctgtgctcacagcccgccggcacggcagggatttgtatcgttgtgcccgtgtcagctcctggggagatcttttacctgtgcttactccgtctgcgtttcctccatctacggctcaggatccctctgagagttgatgaggatgtgtaacaagtattttcttctatcgtgcctgccagggctgaagctgcctggtatccaggaggggaatgctggtatccccatatgtctgtgtttgtttgagatttttaataataaataataaatttttgaagaa

SEQ ID NO: 1175 - DNA, 1463 bp, Homo sapiens
  source 1..1463: mol_type = genomic DNA
ctccgctcccgtgagtaacttggctccgggggctccgctcgcctgcccgcacgccgcccgccacccaggaccgcgccgccggcctccgccgctagcaaacccttccgacggccctcgctgcgcaagccgggacgcctctcccccctccgcccccgccgcggaaagttaagtttgaagaggggggaagaggggaacatggacatgaagaggaggatccacctggagctgaggaaccggaccccggcagctgttcgagaacttgtcttggacaattgcaaatcaaatgatggaaaaattgagggcttaacagctgaatttgtgaacttagagttcctcagtttaataaatgtaggcttgatctcagtttcaaatctccccaagctgcctaaattgaaaaagcttgaactcagtgaaaatagaatctttggaggtctggacatgttagctgaaaaacttccaaatctcacacatctaaacttaagtggaaataaactgaaagatatcagcaccttggaacctttgaaaaagttagaatgtctgaaaagcctggacctctttaactgtgaggttaccaacctgaatgactaccgagagagtgtcttcaagctcctgccccagcttacctacttggatggctatgaccgagaggaccaggaagcacctgactcagatgccgaggtggatggtgtggatgaagaggaggaggacgaagaaggagaagatgaggaagacgaggacgatgaggatggtgaagaagaggagtttgatgaagaagatgatgaagatgaagatgtagaaggggatgaggacgacgatgaagtcagtgaggaggaagaagaatttggacttgatgaagaagatgaagatgaggatgaggatgaagaggaggaagaaggtgggaaaggtgaaaagaggaagagagaaacagatgatgaaggagaagatgattaagaccccagatgacctgcagaaacagaactgttcagtattggttggactgctcatggattttgtagctgtttaaaaaaaaaaaaaaggtagctgtgatacaaaccccaggacacccacccacccaaagagccaaagaatagttcctgtgacattccgccttccttccatgtagtccctcttggtaatctaccaccaagcttgtggacttcaccccaacaaaattgtaagcgttgttaggtttttgtgtaagattcttgctgtagcgtggatagctgtgattggtgagtcaaccgtctgtggctaccagttacactgagattgtaacagcatttttactttctgtacaacaaaaaagctttgtaaataaaatcttaacattttgggtctgttttttcatgctttgctttttaattattattattattttttttacattaggacattttatgtgacaactgccaaaaaagtatttttaagaatttaagcgaaataaacagttactctttggtaaa

SEQ ID NO: 1176 - DNA, 1668 bp, Homo sapiens
  source 1..1668: mol_type = genomic DNA
agttccgggccgcctgggggcgtggccgggcctgtacagcagcctgggccatgtcggcgccgccggccctgcagatccgggaggcaaacgcacacctggcagccgtgcaccggcgcgcagcggagctggaggcgcggctggacgcggcggagcgcacggtgcacgcccaagccgagcgcctggccctccacgaccagcagctgcgcgccgccctagacgaactgggtcgcgccaaggaccgtgagattgccacactccaggagcagctgatgacctcagaagccactgtccacagcctgcaggccaccgtgcaccagagggacgagctcattaggcagttgcagccccgggctgagctgctgcaggacatctgccgccgccggccacccctggctgggctgctggatgccctggctgaggctgagcgcctggggcccctgccggccagtgaccccggccacccaccccccggtgggcctggtccaccccttgacaacagcactggggaagaggcggacagggaccacctccagcctgcagtgtttgggaccacagtgtgagcccggaatgcagattacagaatggagacagaaagccactgctgtcagtgtccttgggagtcaccagcaccctgcagggggaccctacggcagagccaaagtcctgtctaagcatcagaacaggctgaacagtcaaaaagttttcaaataggcccacaggccaggtgcagacgtttaacccagacagaagtgttcttgtttgtttttaagctttgaatcagtcacccttgctaaaaacctggcaatgcaaacacaaagatctggatttctggcaagacttggccaagcttgcctggagttcagggcaccctctttagccagggtgtgagtttctgttttttgtttttttttttttaagacagagtcccactctgtcgccctggctggggtgcagtggtgcgattttggctaactgcaacctccgcctcccaggttcaagcgattctcctgtctcatccttcagagtagctgggattacaggcgcccaccaccacacccggatattttatatttttggtagagaccggggaggggagggggtttcaccatgttgaccaggctggtctcaaactcctgaccttaggtgatccacccgcctcggccttcgaaagtgctgcagttataggtgtaagccaccgcgcccggccctagcctagcttttgtagcatgcaactgtctcctttttatacgccctaaagaatatatttttgaactccttgtttctgcgctgtccttcttagcccaggacattcagggtgctttgcttgttgtcaaaccagggaaaggagaaaactcctgtgcctttctgggccagcctgtcaccctggcctggtcggcagccattcccctacctcctcactcaggaactgtcacaccaggaaccggcgaggggcacagcctgtttcagaccagaaaggtcggaggccacccacggccttcaggatggcgcccgcctgcctgcctggcaacagtgacccctcagtgcagtaacaatgggcccattttctcctctggatgaacaaggaggggggttgtttgtacaaaggaaaggcaggctggggcctgtctgtgctcaagaataaaccggatgatttcctggcctgggggc

SEQ ID NO: 1177 - DNA, 2951 bp, Homo sapiens
  source 1..2951: mol_type = genomic DNA
ctttggggttctgtgtgcagcgagcatggtgtccttggcaccagggtttcggcagaggagcctagcgtgggcctacttggactcctccgcgtggggcagctcgggacacccgggcctgcaggagagcggggttctaggctggccccggctctgcagtgcagccgggtgcctgccactcgcggggctctgtcgcagtactcgtgcctggcgcctcccctcagccacagagaccgcagtagctccaaccatcgcacccctaactgggccacgagttctctgattgccagacctgttgtctttgccactcactgttctgagtaattggagagtcgtgtattcactacacgccaaccagagtggtcctgtaaaagcgtaagcctagtgtagatacgcttctgcttaaaactcttgagtggctcccagtgcttttagaacaaaatccaaacgcctttccgaagtcgacaaggcccagcttgattgagcagaagatgtgataggagatgaggagcggggggcttctgcaaaagtgcttcggtcgctcaggcttttggcacattttgcttatgcaacctagttctttctaccttagggccttttcttgggaaagttgggagtctcactctgctgcctaggctgagtgcagtggtgtgatcgaggcgcactgcagccttgacctcctgggctcaagcgatcctcacctcggcctaccgagtagctgggactacaggcacgcgccactacactcggatttctgacagtcagacttgtccacaagaactcaactggcaaggctgcttttctgtgctaaaactggggagctagtgggcaccatgaagatcttctgcagtcgggccaatccgaccacggggtctgtggagtggctggaggaggatgaacactatgattaccaccaggagattgcaaggtcatcttatgcagatatgctacatgacaaagacagaaatgtaaaatactaccaaggtatccgggctgccgtgagcagggtgaaggacagaggacagaaggccttggttctcgacattggcactggcacgggactcttgtcaatgatggcggtcacagcaggtgccgacttctgctatgccatcgaggttttcaagcctatggctgatgctgctgtgaagattgtggagaaaaatggctttagtgataagattaaggttatcaacaagcattccaccgaggtgactgtaggtccagagggtgacatgccatgccgtgccaacatcctggtcacagagttgtttgacacagagctgatcggggagggggcgctgccctcctatgagcacgcacacaggcatctcgtggaggaaaattgtgaggccgtgccccacagagccaccgtctatgcacagctggtggagtccgggaggatgtggtcgtggaacaagctatttcccatccacgtgcagaccagcctcggagagcaggtcatcgtccctcccgttgacgtggagagctgccctggcgcaccctctgtctgtgacattcagctgaaccaggtgtcaccagccgactttacagtcctcagcgatgtgctgcccatgttcagcatagacttcagcaagcaagtcagtagctcagcagcctgccatagcaggcggtttgaacctctgacatctggccgagctcaggtggttctctcgtggtgggacattgaaatggaccctgaggggaagatcaagtgcaccatggcccccttctgggcacactcagacccagaggagatgcagtggcgggaccactggatgcagtgtgtgtacttcctgccacaagaggagcctgtggtgcagggctcagcgctctatctggtagcccaccacgatgactactgcgtatggtacagcctgcagaggaccagccctgaaaagaatgagagagtccgccagatgcgccccgtgtgtgactgccaggctcacctgctctggaaccggcctcggtttggagagatcaatgaccaggacagaactgatcgatacgtccaggctctgaggaccgtgctgaagccagacagcgtgtgcctgtgtgtcagcgatggcagcctgctctccgtgctggcccatcacctgggggtggagcaggtgtttacagtcgagagttcagcagcttctcacaaactgttgagaaaaatcttcaaggctaaccacttggaagataaaattaacatcatagagaaacggccggaattattaacaaatgaggacctacagggcagaaaggtctctctcctcctgggcgagccgttcttcactaccagcctgctgccgtggcacaacctctacttctggtacgtgcggaccgctgtggaccagcacctggggccaggtgccatggtgatgccccaggcagcctcgctgcacgctgtggttgtggagttcagggacctgtggcggatccggagcccctgtggtgactgcgaaggcttcgacgtgcacatcatggacgacatgattaagcgtgccctggacttcagggagagcagggaagctgagccccacccgctgtgggagtacccatgccgcagcctctccgagccctggcagatcctgacctttgacttccagcagccggtgcccctgcagcccctgtgtgccgagggcaccgtggagctcagaaggcccgggcagagccacgcagcggtgctatggatggagtaccacctgaccccggagtgcacgctcagcactggcctcctggagcctgcagaccccgaggggggctgctgctggaacccccactgcaagcaggccgtctacttcttcagccctgccccagatcccagagcactgctgggtggcccacggactgtcagctatgcagtggagtttcaccccgacacaggcgacatcatcatggagttcaggcatgcagataccccagactgaccactcttgagcaataaagtggcctgagggctggggttctga

SEQ ID NO: 1178 - DNA, 1450 bp, Homo sapiens
  source 1..1450: mol_type = genomic DNA
ttccggtagcggcggcgggaaatcggctgtgggagagaggctaggcctctgaggaggcgaatccggcgggtatcagagccatcagaaccgccaccatgacggtgggcaagagcagcaagatgctgcagcatattgattacaggatgaggtgcatcctgcaggacggccggatcttcattggcaccttcaaggcttttgacaagcacatgaatttgatcctctgtgactgtgatgagttcagaaagatcaagtgtgtgaggggggagagcttgagtttctggcctcattgcctatttgtaaagctgtagcctaaagggctctcccaatgcagcctggtctgaaactgctttaagaagcctctgaccctcttcagggccaaagaactccaaacaagcagaaagggaagagaagcgagtcctcggtctggtgctgctgcgaggggagaatctggtctcaatgacagtagagggacctcctcccaaagatactggtattgctcgagttccacttgctggagctgccgggggcccagggatcggcagggctgctggcagaggaatcccagctggggttcccatgccccaggctcctgcaggacttgctgggccagtccgtggggttggcgggccatcccaacaggtgatgaccccacaaggaagaggtactgttgcagccgctgcagctgctgccacagccagtattgccggggctccaacccagtacccacctggccgtgggggtcctcccccacctatgggccgaggagcaccccctccaggcatgatgggcccacctcctggtatgagacctcctatgggtcccccaatggggatcccccctggaagagggactccaatgggcatgccccctccgggaatgcggcctcctccccctgggatgcgaggtaagtgcctgcagtggtgactttggcttctttccctagagcctagtgggataggaaatggagggaagattgcatttagatcatatcccatgggctttcaagccttaaatctagggaaatccagaaaggaaagagaagagggaacatttcttaaattgggcttacctcccctcttagaaaagttagagcagccatgcacccagggtgtttctcaatatctaaggcagcggcctcaggacacaatgaaataatgcattctgaggatccctaacagaagttatgagattgtcttatgctctttggtttgacagtgcctagtaattaagagggggctctgggctttgctgtactattatggatttctctttaacttcagttggagaaattctgagatcagtccccacatggatgagaaaataggcccccagggagtttggactccaagcccagtgttctttccctataagataacccatgggcaaacttggtgacccctgtttctctagtctggattattcctctatgggtttttatagacataggaac

SEQ ID NO: 1179 - DNA, 506 bp, Homo sapiens
  source 1..506: mol_type = genomic DNA
cggaggcaggttggagccgctgccgtcgccatgacccgcggtaaccagcgtgagctcgcccgccagaagaatatgaaaaagcagagcgactcggttaagggaaagcgccgagatgacgggctttctgctgccgcccgcaagcagagtgccccatcatctctacccccagggactcggagatcatgcagcagaagcagaaaaaggcaaacgagaagaaggaggaacccaagtagctttgtggcttcgtgtccaaccctcttgcccttcgcctgtgtgcctggagccagtcccaccacgctcgcgtttcctcctgtagtgctcacaggtcccagcaccgatggcattccctttgccctgagtctgcagcgggtcccttttgtgcttccttcccctcaggtagcctctctccccctgggccactcccgggggtgagggggttaccccttcccagtgttttttattcctgtggggctcaccccaaagtattaaaagtagctttgtaattc

SEQ ID NO: 1180 - DNA, 2470 bp, Homo sapiens
  source 1..2470: mol_type = genomic DNA
gtccactgggcttggagtcagtggcaataaccaggggcaataaccaggcgtgtcccaggggggagccccgctctgcagccctgtgcgccgtagagagctggacttaggctggcagcatggccgagttcagggtcagggtgtccaccggagaagccttcggggctggcacatgggacaaagtgtctgtcagcatcgtggggacccggggagagagccccccactgcccctggacaatctcggcaaggagttcactgcgggcgctgaggaggacttccaggtgacgctcccggaggacgtaggccgagtgctgctgctgcgcgtgcacaaggcgcccccagtgctgcccctgctggggcccctggccccggatgcctggttctgccgctggttccagctgacaccgccgcggggcggccacctcctcttcccctgctaccagtggctggagggggcggggaccctggtgctgcaggagggtacagccaaggtgtcctgggcagaccaccaccctgtgctccagcaacagcgccaggaggagcttcaggcccggcaggagatgtaccagtggaaggcttacaacccaggttggcctcactgcctggatgaaaagacagtggaagacttggagctcaatatcaaatactccacagccaagaatgccaacttttatctacaggctggctctgcttttgcagagatgaaaatcaaggggttgctggaccgcaaggggctctggaggagtctgaatgagatgaaaaggatcttcaacttccggaggaccccagcagctgagcacgcatttgagcactggcaggaggacgccttcttcgcctcccagttcctgaatggtctcaaccctgtcctgatccgccgctgtcactacctcccaaagaacttccccgtcactgatgccatggtggcctcagtgttgggtcctgggaccagcttgcaggctgagctagagaagggctccctgttcttggtggatcacggcatcctctctggcatccagaccaatgtcattaatgggaagcctcagttctctgcggccccaatgaccctgctataccagagcccaggctgcgggccgctgctgcctctcgccatccagctcagccagacccccggcccaaacagccccatcttcctgcccactgatgacaagtgggactggttgctggccaagacctgggtgcgcaatgccgagttctccttccatgaggccctcacgcacctgctgcactcacatctgctgcctgaggtcttcaccctggctaccctgcgtcagctgccccactgccaccctctcttcaagtccacaggcatcggcattgaaggcttctctgagttgatacagaggaacatgaagcagctgaactattctctcctgtgtctgcctgaggatatccggacccgaggagttgaagacatcccaggctactactaccgtgatgatgggatgcagatctggggtataccctcctcactggagacccgggaagccctggtgcagtatgtcaccatggtgatattcacctgctccgccaagcatgcggctgtcagtgcagggcagtttgactcctgtgcttggatgcccaacctgccacccagcatgcagctgccaccacccacctccaaaggcctggcaacatgcgagggcttcatagccaccctcccacctgtcaatgccacatgtgatgtcatccttgctctctggttgctgagcaaggagcctggagaccaaaggcccctgggcacctatccggatgagcacttcacagaggaggcccctcggcggagcatcgccaccttccagagccgcctggcccagatctcgaggggcatccaggagcggaaccagggcctggtgctgccctacacctacctagaccctcccctcatcgagaacagcgtctccatctaaatcccaggggaacacaggcccagatgacatccctttgaccacatcgctctaggataactggcacccagagaaaaggactcctcagaaaaaacaggcccccatgtgcctctcctgggacaaccagactctgtaactcacccccaccaccatacacacacacaaaaacagaaacaaaatcaaaacagagaaagcagaaaatctaccaagaacagagtctcaggacagaaccactgagtcttttggaggctccaagcctcaaagtgcccgcagagcccaccttgagggttttgctagttggttttgttttgcgttttacagccgtggggggaagcacataatcccgccccagggcccactagcatccactgattggaccttatggtcacccaactcaaggacagccaccaagaagtggctgccaaagagactgggcgcagtggctcatgcccataatcccagcactttgggagatggaggcgggaaaatcatttgaggtcagaagttcaaggccagcctggacgacatagcgagactccacctctacc

SEQ ID NO: 1181 - DNA, 3422 bp, Homo sapiens
  source 1..3422: mol_type = genomic DNA
cagccctcatctccgccggcgagtagggccaggtgttgggagctcccacgtgggacaagatggtgtcttcggcgcagatgggcttcaacctgcaggctctcctggagcagctcagccaggatgagttgagcaagttcaagtatctgatcacgaccttctccctggcacacgagctccagaagatcccccacaaggaggtagacaaggctgatgggaagcaactggtagaaatcctcaccacccattgtgacagctactgggtggagatggcgagcctccaggtctttgaaaagatgcaccgaatggatctgtctgagagagcaaaggatgaagtcagagaagcagctttgaaatcctttaataaaaggaagcctctatcattagggataacacggaaagaacgaccacctctagacgtggacgaaatgctggagcgcttcaaaacagaagcacaagacaaagacaataggtgcaggtatatattgaagacgaagttccgggagatgtggaagagctggcctggagatagcaaagaggtccaggttatggctgagagatacaagatgctgatcccattcagcaaccccagggtgcttcccgggcccttctcatacacggtggtgctgtatggtcctgcaggccttgggaaaaccacgctggcccagaaactaatgctagactgggcagaggacaacctcatccacaaattcaaatatgcgttctacctcagctgcagggagctcagccgcctgggcccgtgcagttttgcagagctggtcttcagggactggcctgaattgcaggatgacattccacacatcctagcccaagcacggaaaatcttgttcgtgattgacggctttgatgagctgggagccgcacctggggcgctgatcgaggacatctgcggggactgggagaagaagaagccggtgcccgtcctcctggggagtttgctgaacagggtgatgttacccaaggccgccctgctggtcaccacgcggcccagggccctgagggacctccggatcctggcggaggagccgatctacataagggtggagggcttcctggaggaggacaggagggcctatttcctgagacactttggagacgaggaccaagccatgcgtgcctttgagctaatgaggagcaacgcggccctgttccagctgggctcggcccccgcggtgtgctggatcgtgtgcacgactctgaagctgcagatggagaagggggaggacccggtccccacctgcctcacccgcacggggctgttcctgcgtttcctctgcagccggttcccgcagggcgcacagctgcggggcgcgctgcggacgctgagcctcctggccgcgcagggcctgtgggcgcagacgtccgtgcttcaccgagaggatctggaaaggctcggggtgcaggagtccgacctccgtctgttcctggacggagacatcctccgccaggacagagtctccaaaggctgctactccttcatccacctcagcttccagcagtttctcactgccctgttctacaccctggagaaggaggaggaagaggatagggacggccacacctgggacattggggacgtacagaagctgctttccggagtagaaagactcaggaaccccgacctgatccaagcaggctactactcctttggcctcgctaacgagaagagagccaaggagttggaggccacttttggctgccggatgtcaccggacatcaaacaggaattgctgcgatgcgacataagttgtaagggtggacattcaacggtgacagacctgcaggagctcctcggctgtctgtacgagtctcaggaggaggagctggtgaaggaggtgatggctcagttcaaagaaatatccctgcacttaaatgcagtagacgttgtgccatcttcattctgcgtcaagcactgtcgaaacctgcagaaaatgtcactgcaggtaataaaggagaatctcccggagaatgtcactgcgtctgaatcagacgccgaggttgagagatcccaggatgatcagcacatgcttcctttctggacggacctttgttccatatttggatcaaataaggatctgatgggtctagcaatcaatgatagctttctcagtgcctccctagtaaggatcctgtgtgaacaaatagcctctgacacctgtcatctccagagagtggtgttcaaaaacatttccccagctgatgctcatcggaacctctgcctagctcttcgaggtcacaagactgtaacgtatctgacccttcaaggcaatgaccaggatgatatgtttcccgcattgtgtgaggtcttgagacatccagaatgtaacctgcgatatctcgggttggtgtcttgttccgctaccactcagcagtgggctgatctctccttggcccttgaagtcaaccagtccctgacgtgcgtaaacctctccgacaatgagcttctggatgagggtgctaagttgctgtacacaactttgagacaccccaagtgctttctgcagaggttgtcgttggaaaactgtcaccttacagaagccaattgcaaggaccttgctgctgtgttggttgtcagccgggagctgacacacctgtgcttggccaagaaccccattgggaatacaggggtgaagtttctgtgtgagggcttgaggtaccccgagtgtaaactgcagaccttggtgctttggaactgcgacataactagcgatggctgctgcgatctcacaaagcttctccaagaaaaatcaagcctgttgtgtttggatctggggctgaatcacataggagttaagggaatgaagttcctgtgtgaggctttgaggaaaccactgtgcaacttgagatgtctgtggttgtggggatgttccatccctccgttcagttgtgaagacctctgctctgccctcagctgcaaccagagcctcgtcactctggacctgggtcagaatcccttggggtctagtggagtgaagatgctgtttgaaaccttgacatgttccagtggcaccctccggacactcaggttgaaaatcgatgactttaatgatgaactcaataagctgctggaagaaatagaagaaaaaaacccacaactgattattgatactgagaaacatcatccctgggcagaaaggccttcttctcatgacttcatgatctgaatccccccgagtcattcattctccatgaagtcatcgattttccaggtgttggtgaactgcctgtgactcctctcctccccggcccctacccctcagggataatgagttcattgctgggctagatgttttagccatgattctgcctctgttttatacctgcacacatccttatctttgttacatatgaaatatctgtatcacgggtatattgagagaaataaaggtgagagcattcacaaa

SEQ ID NO: 1182 - DNA, 7775 bp, Homo sapiens
  source 1..7775: mol_type = genomic DNA
agaggggaaaagaacgtcaggagagtgaacgggagcaaataaaacgctgtccattctgactggaagggccagagccgtgtctaagggcgggggccgggaggtggcccgcggtggtgtctctaccaggacgaggcctggggtatctgaagaggggatgacgtccaggcgctttgctaaagggaagccagaagggtatgagttgctagggtcagagatggggctttcggctcgagtctttccctgcagggcagagagtccgaagagcccgagaaggcagggaggacagtgggcctggtccttccccggccggcagagggagtcccgagatggaacgtccagctctcctctaacgaaaagcgtttgcatggctgtctcgccaattctgtacctcccggggctgaggaagagccgaggtgactagaagctagcgacaagtgccggccacctccgacgccaggcgccgggcttggagcccgacgggccgaattctcgcgagagcggccgccgccatttttccattgattgcagcgggctgggggaggggccgacgacgaaggcggctgtggtagcggcggcggcggcggcggagccctgggtcggtgtctgcgcgctggtgtctgaggcccaggctgaggcctccgctattgctggagcgcaggcggcggagaggatgactgccgctgccattctctcttgagctagcgagccgccgccaccctccaccctcccccggcagggcggagaggagcggccggagtcagcgatggtgcccggcgaggagaaccaactggtcccgaaagaggcaccactggatcataccagtgacaagtcacttctcgacgctaattttgagccaggaaagaagaactttctgcatttgacagataaagatggtgaacaacctcaaatactgctggaggattccagtgctggggaagacagtgttcatgacaggtttataggtccgcttccaagagaaggttctgggggttctaccagtgattatgtcagccaaagctactcctactcatctattttgaataaatcagaaactggatatgtgggactagtaaaccaagcaatgacttgctatttgaatagccttttgcaaacactttttatgactcctgaatttaggaatgcattatataagtgggaatttgaagaatctgaagaagatccagtgacaagtattccataccaacttcaaaggctttttgttttgttacaaaccagcaaaaagagagcaattgaaaccacagatgttacaaggagctttggatgggatagtagtgaggcttggcagcagcatgatgtacaagaactatgcagagtcatgtttgatgctttggaacagaaatggaagcaaacagaacaggctgatcttataaatgagctatatcaaggcaagctgaaggactacgtgagatgtctggaatgtggttatgagggctggcgaatcgacacatatcttgatattccattggtcatccgaccttatgggtccagccaagcatttgctagtgtggaagaagcattgcatgcatttattcagccagagattctggatggcccaaatcagtatttttgtgaacgttgtaagaagaagtgtgatgcacggaagggccttcggtttttgcattttccttatctgctgaccttacagctgaaaagattcgattttgattatacaaccatgcataggattaaactgaatgatcgaatgacatttcccgaggaactagatatgagtacttttattgatgttgaagatgagaaatctcctcagactgaaagttgcactgacagtggagcagaaaatgaaggtagttgtcacagtgatcagatgagcaacgatttctccaatgatgatggtgttgatgaaggaatctgtcttgaaaccaatagtggaactgaaaagatctcaaaatctggacttgaaaagaattccttgatctatgaacttttctctgttatggttcattctgggagcgctgctggtggtcattattatgcatgtataaagtcattcagtgatgagcagtggtacagcttcaatgatcaacatgtcagcaggataacacaagaggacattaagaaaacacatggtggatcttcaggaagcagaggatattattctagtgctttcgcaagttccacaaatgcatatatgctgatctatagactgaaggatccagccagaaatgcaaaatttctagaagtggatgaatacccagaacatattaaaaacttggtgcagaaagagagagagttggaagaacaagaaaagagacaacgagaaattgagcgcaatacatgcaagataaaattattctgtttgcatcctacaaaacaagtaatgatggaaaataaattggaggttcataaggataagacattaaaggaagcagtagaaatggcttataagatgatggatttagaagaggtaatacccctggattgctgtcgccttgttaaatatgatgagtttcatgattatctagaacggtcatatgaaggagaagaagatacaccaatggggcttctactaggtggcgtcaagtcaacatatatgtttgatctgctgttggagacgagaaagcctgatcaggttttccaatcttataaacctggagaagtgatggtgaaagttcatgttgttgatctaaaggcagaatctgtagctgctcctataactgttcgtgcttacttaaatcagacagttacagaattcaaacaactgatttcaaaggccatccatttacctgctgaaacaatgagaatagtgctggaacgctgctacaatgatttgcgtcttctcagtgtctccagtaaaaccctgaaagctgaaggattttttagaagtaacaaggtgtttgttgaaagctccgagactttggattaccagatggcctttgcagactctcatttatggaaactcctggatcggcatgcaaatacaatcagattatttgttttgctacctgaacaatccccagtatcttattccaaaaggacagcataccagaaagctggaggcgattctggtaatgtggatgatgactgtgaaagagtcaaaggacctgtaggaagcctaaagtctgtggaagctattctagaagaaagcactgaaaaactcaaaagcttgtcactgcagcaacagcaggatggagataatggggacagcagcaaaagtactgagacaagtgactttgaaaacatcgaatcacctctcaatgagagggactcttcagcatcagtggataatagagaacttgaacagcatattcagacttctgatccagaaaattttcagtctgaagaacgatcagactcagatgtgaataatgacaggagtacaagttcagtggacagtgatattcttagctccagtcatagcagtgatactttgtgcaatgcagacaatgctcagatccctttggctaatggacttgactctcacagtatcacaagtagtagaagaacgaaagcaaatgaagggaaaaaagaaacatgggatacagcagaagaagactctggaactgatagtgaatatgatgagagtggcaagagtaggggagaaatgcagtacatgtatttcaaagctgaaccttatgctgcagatgaaggttctggggaaggacataaatggttgatggtgcatgttgataaaagaattactctggcagctttcaaacaacatttagagccctttgttggagttttgtcctctcacttcaaggtctttcgagtgtatgccagcaatcaagagtttgagagcgtccggctgaatgagacactttcatcattttctgatgacaataagattacaattagactggggagagcacttaaaaaaggagaatacagagttaaagtataccagcttttggtcaatgaacaagagccatgcaagtttctgctagatgctgtgtttgctaaaggaatgactgtacggcaatcaaaagaggaattaattcctcagctcagggagcaatgtggtttagagctcagtattgacaggtttcgtctaaggaaaaaaacatggaagaatcctggcactgtctttttggattatcatatttatgaagaagatattaatatttccagcaactgggaggttttccttgaagttcttgatggggtagagaagatgaagtccatgtcacagcttgcagttttgtcaagacggtggaagccttcagagatgaagttggatcccttccaggaggttgtattggaaagcagtagtgtggacgaattgcgagagaagcttagtgaaatcagtgggattcctttggatgatattgaatttgctaagggtagaggaacatttccctgtgatatttctgtccttgatattcatcaggatttagactggaatcctaaagtttctaccctgaatgtctggcctctttatatctgtgatgatggtgcggtcatattttatagggataaaacagaagaattaatggaattgacagatgagcaaagaaatgaactgatgaaaaaagaaagcagtcgactccagaagactggacatcgtgtaacatactcacctcgtaaagagaaagcactaaaaatatatctggatggagcaccaaataaagatctgactcaagactgactctgatagtgtagcattttccctgggggagttttggttttaattagatggttcactaccactgggtagtgccattttggccggacatggttggggtaacccagtgacaccagcactgattggactgccctacaccaatcagaagctcagtgcccaatgggccactgttttgactcggaatcatgttgtgcactatagtcaaatgtactgtaaagtgaaaagggatgtgcaaaaaaataaaaaaaaacaacaaaaaaagctaaccttctattagaaaaggggacaggggaatgagtaaacttcttttattgcggacaaatgtgcacatagccgctagtaaaactagcctcaaacaggatgctcatagcttaataataaaagctgtgcaaaggccatgaatgaatgaattttctgtttatttcactgatgcacacattacctcattgacaattcagaagtaaatccaacgtgtgttgactcttggaaagcagcaaaaacaggagctgaagaaaagaaattcttggaaccagccgtaacccagtaaggaattgtgaagttgtgtttttattttgtttcattttttgcagagtattaagaacattattctggaacatcagaacgtttcccttagaccgatcccagcaggtggcagctcagattgctgcagtgttgtaattataactgattgtacttaagttatggatgtagagaatatgtttcattcatttattcagcatgtaaataaaattgatcctgttgagttatcataattgcagttcaactatctgccatgattattcttttcacgtatcattcattctgtacatttgtgtacattgagaagtatagcaatctatgtaaatgtaatcctcagtgaggttcctcagtgctaggtcccataggattgtcgttgcccttgttaatgaggtttctctgttcagcggcttcaatttttttctctttgtacatctagttttgaagatttacttcaagtttgaatcttctagaatgcttgtaagtccagttttaatttttagagtcaatttgtagttacatgtagtttaacttttgggaaacgtcttaacattgttctgaataaacttgctaatgaggtcaggtcatggtacagactgatgcagtcaacatgatttcattgcagagtttattagtatcagcaagtttttgctttgctaaataaaagtactcaatgaacacaattctacataaattttgacataccatctaatttataaaaatcaataaaaaaggttttggtaaaactttttcatgccagatgctgtttacaacaatgaacatgccaataaaacatttgttcattctgttgtgttattttagtcattaaacttctgtggatgaagaatctgggttaagaatagatttgtcatctttaaatatgacattttgtaatgtgtattggatatctcatttctatgataaaggtatatttacagtaaagttctcataagagaaatgaaaagctgtgttaatatctaactttggggaaccctgtcagtatttcagatccgatttttaccctttttttcttataagaaagataaaattagaaaatactgttagcaaatgtggctctgccatttgaatataatcaccgagaattccatgtcttaaaagtctcctggaatccacaatgaaaaaaaaaatcttttctaaggtatttttctggctaatttttatttgaagaaagctatagcatttagcgaaatttgactgaagtaatgttctgagtttgcattagtgggattggtgatgttctcagaagaaaattggaaacacttgtgatgaattgtctttcagatcacttagattttctgatgtaagaggacagctgtttggttctgatacaggcctgcttacttgggatgtagggttagtaaatggggtttctgctttaaaggactgacttgctatcacacaaaagaggcagacttgtaaacacaatgggctttggagtttggtctgattgggtttggtttagtattcctatgagcgtaaatggtaaaattcttctgatacccactctttagactgtgccttctgctctgttctttgttttatgtttaactgctgtttctaattgcaggtgtattacagatacaaataagagtaaagaaaatatatttcattatagaaaagaaaaaattaaaagcttcttgcttttcagtgcctgatagagtgaaaacacaaagttgcactttaataatttcaataaaagctaatctgtgtcagcctccctctgcttcagagagtcaggtgagcatccataacctaacaggcagagccctagcgatgtggatcaagtttcctgagcccgggggcggtggagcctcatgatctcttatcttttgaggctgaggcaggtcacatgcaacaaattgtgaccctgctccccacaagtcatgcaaaggttttgaagagcttttaccgtggggcagatgaacttgtgtcaaccatgcacaccctgtgagaaccaagtacctgtgtttctaaggcgggcactcaaggtgaggggtgcattctggccaaagaaacaaaagctgtggtttcaggaccatgccgtgtgtagctgatctgtacgggacgtgtatgtaaggaagagcaatcatgatagataagaacagtgtgtgaagcagccttcacactagagtgtttggtcatctcttataatgtaagggaaggtactttaaaattctgggaagatgcgatgaactcatgtcccagtcagaaaataatccaatgaaataagcattggttgccaggccacagttaggaattgtattgtgatacatctagaggccaagagagcaggagagagctaccaacttacactgtggtttaagctaaatgaccgcacagcatcatagcattgcagtgttgttactaaatctggaagtgacctgtgaatgtatggaatacaataaagtcttttattctggttcatttgctagtacttcctttttgattggatactgtagttcttcctctggattttattttgttcagcgtcaaggccctaattttgcaaatgtagtctaaaccacattacgtggactagaggatactctgaattagcaagttttttgtttgctgaataaaactattccatctt

SEQ ID NO: 1183 - DNA, 1014 bp, Homo sapiens
  source 1..1014: mol_type = genomic DNA
gttttcaccatgttggccaggctggtctggaaccccgacttcaggtgatccacgttggcctcccaaagtgttgggattacaggtgtgaaccactgcgcctggccatgaagtgtccaataaatattagattgacataaagaaccctcaggtgtgctatctcatggaataccctcaaattcctctctggatcttcctatcacagttgtattattggggtcccatttggatctctcccactataggtagctcttcagtgggacgggctaggtaagagaggctgggagtaagtctgtctgatctaggatgtcttgcttaccacccaggtagggggttatatactcccagcctttctgattccattgtaactcttgccgaaatccgggtgaacggaagtagtctctttaagaactggtatgggcaggcccaagttgtcaaggcttcggaggtaatgccctggagagcggggaacggggtgggtttagaggcccaggcgggcacccaggaggcaggcccagaagagtactgccaggaagagttgggcgccgaggaggagatggcagccagagcagcatggcctgtgctgcgctctgtgaactcacgcgagctctcccggatcatcatctgcaatcacagcccacgaatcgtgctgcctgtgtggctcaactactatggcaagctgctgccctacctgacgctgctgcccggcagggacttccgcatccacaacttccgaagccacccttggctcttcagagatgcaaggacacatgataagcttctggttaaccaaactgaattgtttgtgccatcttccaatgttaatggacagcctgtttttgccaacatcacactgcagtgtataccctgaaagagcaatgcctccaggttgtcggaagcctagtcaagcccaagaattacaggagactggacatcgtcagatcactctatgacgatctggaagatcatccaaatgtgattgaaagacctggagcggctgacgcaggagcacagtga

SEQ ID NO: 1184 - DNA, 713 bp, Homo sapiens
  source 1..713: mol_type = genomic DNA
atggaggggtgtgtgtctaacctaatggtctgcaacctggcctacagcgggaagctggaagagttgaaggagagtattctggccgataaatccctggctactagaactgaccaggcaggttggtctcctcttcatattgcggcttctgctggccgggatgagattgtaaaagcccttctgggaaaaggtgctcaagtgaatgctgtcaatcaaaatggctgtactcccttacattatgcagcttcgaaaaacaggcatgagatcgctgtcatgttactggaaggcggggctaatccagatgctaaggaccattatgaggctacagcaatgcaccgggcagcagccaagggtaacttgaagatgattcatatccttctgtactacaaagcatccacaaacatccaagacactgagggtaacactcctctacacttagcctgtgatgaggagagagtggaagaagcaaaactgctggtgtcccaaggagcaagtatttacattgagaataaagaagaaaagacacccctgcaagtggccaaaggtggcctgggtttaatactcaagagaatggtggaaggttaaacagcttggatttattcttactttgtatgttgtgttgttgtccccagtgtcctacaaactaatgtatttgtgcacaagacatcatctatgaatgatgaagttttctcaccttcaaagtcttataaacatgt

SEQ ID NO: 1185 - DNA, 1259 bp, Homo sapiens
  source 1..1259: mol_type = genomic DNA
ggacagcttggagatagggcccggaattgcgggcgtcactctgctcctgcgacctagccaggcgtgagggagtgacagcagcgcattcgcgggacgagagcgatgagtgagaacgccgcaccaggtctgatctcagagctgaagctggctgtgccctggggccacatcgcagccaaagcctggggctccctgcagggccctccagttctctgcctgcacggctggctggacaatgccagctccttcgacagactcatccctcttctcccgcaagacttttattacgttgccatggatttcggaggtcatgggctctcgtcccattacagcccaggtgtcccatattacctccagacttttgtgagtgagatccgaagagttgtggcagccttgaaatggaatcgattctccattctgggccacagcttcggtggcgtcgtgggcggaatgtttttctgtaccttccccgagatggtggataaacttatcttgctggacacgccgctctttctcctggaatcagatgaaatggagaacttgctgacctacaagcggagagccatagagcacgtgctgcaggtagaggcctcccaggagccctcgcacgtgttcagcctgaagcagctgctgcagaggcagagaacagcattgacttcatcagcagggagctgtgtgcgcattccatcaggaagctgcaggcccatgtcctgttgatcaaagcagtccacggatattttgattcaagacagaattactctgagaaggagtccctgtcgttcatgatagacacgatgaaatccaccctcaaagagcagttccagtttgtggaagtcccaggcaatcactgtgtccacatgagcgaaccccagcacgtggccagtatcatcagctccttcttacagtgcacacacatgctcccagcccagctgtagctctgggcctggaactatgaagacctagtgctcccagactcaacactgggactctgagttcctgagccccacaacaaggccagggatggtggggacaggcctcactagtcttgaggcccagcctaggatggtagtcaggggaaggagcgagattccaacttcaacatctgtgacctcaagggggagacagagtctgggttccagggctgctttctcctggctaataataaatatccagccagctggaggaaggaagggcaggctgggcccacctagcctttccctgctgcccaactggatggaaaataaaaggttcttgtattctca

SEQ ID NO: 1186 - DNA, 1648 bp, Homo sapiens
  source 1..1648: mol_type = genomic DNA
gacacactgcacagcgaccactgagcatgcctgcaggctccatgtctactacaggctatcctggtgtctgcagtaccacatcatacagaactcactgttatatcccagtgacctcttctgttactcttagctccagtgatttaagccctacctttggacactgcttacccagtagctaccaaggaaatctctggctcctggattactgccaagaatcctacggtgaagcaccaacctgcaaatctcccagctgtgagcccaagacctgcagtaccactggttgtgacccgtcaaactcctctgtgccctgcaactccccatcagcaggccaagtcttcagtgtctgtgaaactaccaacgtcagccccagccccagctgcagcccaagcacccagaccaatgggtatgtatgcaattgccacatacccactcgaaatgcatccaaagcctgccaaaccctccgcaacggttccaactgctttggacaacttaactgcttatccaagagtttccaaactctaaaccactgcagattgagtactttggggtataaaagctaccaaaatccttgcttcatacccagctacgtctcaccattatgttatatttccaacagctgccaaccccaaagctatttagtgagaaattatcactattcaagctacaggcctacgagctgccgaccactgagctatttatctagaagcttcagatctctgagctatatacccagtacctttccacctctgaggtatttgtgcagtggtagcagacctctgaaatgctattgaccaacttccagaatttatagcagctggaaattgcccaatggggaagattctactaagtactagaacgtctaattttctgctgaatctctttattcagcctaagaatcttgttacattaagttcaaatacaactcccaggtttattaaccacagccagtatcacctgctaggttttcttttttctgttgttctgttattgctctttgtactaaaagctgaccctgaaggtaacatcattatttctgagatttattacaatggacttaccgaagagactccatttgaaatacaaccatcaccggctttcttactttggctgtcactgtcacttgtctgacagtgtgattatcacctacctttcctgatgaaatggggcctccatggtttgactgcagattccagcatgcaaattcattcggatggctttgattgtcattaatatttttgtcaactacctaactagcaccttgctaataagccgatagaaaacactatcttgagcataataagttgaactatttcatccttttcttactgattgattgtaagaacaggcaaatagcaatggtgactagagctcaaaaatagaagacttcagcaaatcttctcttccagagaagccataaaacaagattcactggtactcagcttttgttctccatgcctaagaaaaagcctcagaattagctaaagcatgaaaattatttgttgaaagaagaacaaatactgttagagaccctttacaattatgtgtaatctgcgtttaggattctcctatcatcttgccttgccaatttattgcattctgactctggaaaatgtcctagttcttagttaataaacaaatttctgtctgg

SEQ ID NO: 1187 - DNA, 1637 bp, Homo sapiens
  source 1..1637: mol_type = genomic DNA
gttctggcagcccattccgagactagcggaggcgggcagggagggtatataagcgttggcggagcgtcggttgtagcactctgcgcgcccgctcttctgctgctgtttgtctacttcctcctgcttccccgccgccgccgccgccatcatgagggaaatcgtgcacttgcaggccgggcagtgcggcaaccaaatcggcgccaagttttgggaggtgatcagcgatgagcacggcatcgaccccacgggcacctaccacggggacagcgacctgcagctggaacgcatcaacgtgtactacaatgaggccaccggcggcaagtacgtgccccgcgccgtgctcgtggatctggagcccggcaccatggactccgtgcgctcggggcccttcgggcagatcttccggccggacaacttcgttttcggtcagagtggtgctgggaacaactgggccaaggggcactacacagaaggcgcggagctggtggactcggtgctggatgttgtgagaaaggaggctgagagctgtgactgcctgcagggtttccagctgacccactccctgggtggggggactgggtctgggatgggtaccctcctcatcagcaagatccgggaggagtacccagacaggatcatgaacacgtttagtgtggtgccttcgcccaaagtgtcagacacagtggtggagccctacaacgccaccctctcagtccaccagctcgtagaaaacacagacgagacctactgcattgataacgaagctctctacgacatttgcttcagaaccctaaagctgaccacgcccacctatggtgacctgaaccacctggtgtctgctaccatgagtggggtcaccacctgcctgcgcttcccaggccagctcaatgctgacctgcggaagctggctgtgaacatggtcccgtttccccggctgcacttcttcatgcccggctttgccccactgaccagccggggcagccagcagtaccgggcgctgaccgtgcccgagctcacccagcagatgtttgatgccaagaacatgatggctgcctgcgacccccgccatggccgctacctgacggttgccgccgtgttcaggggccgcatgtccatgaaggaggtggatgagcaaatgcttaatgtccaaaacaaaaacagcagctattttgttgagtggatccccaacaatgtgaaaacggctgtctgtgacatcccacctcgggggctaaaaatgtccgccaccttcattggcaacagcacggccatccaggagctgttcaagcgcatctccgagcagttcacggccatgttccggcgcaaggccttcctgcactggtacacgggcgagggcatggacgagatggagttcaccgaggccgagagcaacatgaatgacctggtgtccgagtaccagcagtaccaggatgccacagccgaggaggagggcgagttcgaggaggaggctgaggaggaggtggcctagagccttcagtcactggggaaagcagggaagcagtgtgaactctttattcactcccagcctgtcctgtggcctgtcccactgtgtgcacttgctgttttccctgtccacatccatgctgtacagacaccaccattaaagcattttcatagtg

SEQ ID NO: 1188 - DNA, 1432 bp, Homo sapiens
  source 1..1432: mol_type = genomic DNA
ttcccagtgttctggcaggtaaggaacgccggctcttcgcctctcagcgcggcttgtcctttgttccggacgcccgctcctcagccctgcggctcctggggtcgctgctgcatcccgcacgcctccaccggctgcagacccatggccgagcgcggggaactcgacttgaccggcgccaaacagaacacaggagtgtggctagtcaaggttcctaaatatttgtcacagcaatgggctaaagcctctggaagaggtgaagttgggaaactgcggattgccaagactcaaggaaggactgaggtgtcatttactttgaatgaggatcttgcaaatattcatgatattggtggaaaaccagcttcagtcagtgctcctagagaacatccatttgtcttgcaaagtgttggaggacagacattaacagtatttactgagagctcatcagataagctgtcattggaaggaatagtggtacaaagagctgaatgccgaccagctgccagtgaaaactacatgcgattaaaaagattgcaaatagaagagtcttccaaaccagtgaggctatcacaacagctggacaaagttgtaacaaccaattacaaacctgttgctaatcatcaatacaatatcgaatatgaaaggaaaaagaaagaagacggaaagcgagctcgagctgataaacaacatgttttagacatgctattttcagcctttgagaaacatcaatactataatcttaaggacttggtggacatcacaaagcaacctgtggtgtacctgaaggaaatcttaaaagaaattggtgttcagaatgtaaaagggatccacaaaaacacatgggagctgaagccagagtacagacactatcaaggagaagaaaagagtgactaagaagactcctagccagcatgctagtgaaacgactagcagcgatgctatgcaaaaggcgctgatactggaaggcttgaacaccgtatgttaataggggttaagtgacagtactttgatttctctcggtaaattttttaaacctgtaattcttgtaaagtttcttaactgtttttttgaggagaaagaacagatttatttatagacttaacttgtattaaaccagattattcacagtaggaataggggttggaggattaagagggtttttcttaaatattagcttttaatgtgtacaattaggaaatttttttaagtgaggactctctacccttgccgtatctaaggagctgaggtaatacagatccaaggagaattgtatagcaagaaaaaaacagtcaactacagaaactcttaaaaggaataaaaacccaaagttccttattttgaaattgtcaaagaacaaagcggtgtttttcttttaaacaggtgatcacgtttcgtgttcatactcaacgttaataaaaggagagagtttgtagtg

SEQ ID NO: 1189 - DNA, 6997 bp, Homo sapiens
  source 1..6997: mol_type = genomic DNA
atagtaggcaatatttatgtgtcatttattattattgctattagtgttacctattattttctttttgaacccacttattgcctaattagtcatagtttgacaattgcccttgtattccaccatgtcaaatataaatttacatagatgaagctcctgaaattattcttgggttaccattttgtgaagctattgatatgtggtcactgggctgtgtgatagctgagctgttcctgggatggcctctttatcctggtgcttcagaatatgatcagattcgttatatttcacaaacacaaggcttgccagctgaatatcttctcagtgccggaacaaaaacaaccaggtttttcaacagagatcctaatttggggtacccactgtggaggcttaagacacctgaagaacatgaactggagactggaataaaatcaaaagaagctcggaagtacatttttaattgcttagatgacatggctcaggtgaatatgtctacagacctggagggaacagacatgttggcagagaaggcagaccgaagagaatacattgatctgttaaagaaaatgctcacaattgatgcagataagagaattacccctctaaaaactcttaaccatcagtttgtgacaatgactcaccttttggattttccacatagcaatcatgttaagtcttgttttcagaacatggagatctgcaagcggagggttcacatgtatgatacagtgagtcagatcaagagtcccttcactacacatgttgccccaaatacaagcacaaatctaaccatgagcttcagcaatcagctcaatacagtgcacaatcaggccagtgttctagcttccagttctactgcagcagctgctactctttctctggctaattcagatgtctcactactaaactaccagtcagctttgtacccatcatctgctgcaccagttcctggagttgcccagcagggtgtttccttgcagcctggaaccacccagatttgcactcagacagatccattccaacagacatttatagtatgtccacctgcgtttcaaactggactacaagcaacaacaaagcattctggattccctgtgaggatggataatgctgtaccgattgtaccccaggcaccagctgctcagccactacagattcagtcaggagttctcacgcagggaagctgtacaccactaatggtagcaactctccaccctcaagtagccaccatcacaccgcagtatgcggtgccctttactctgagctgcgcagccggccggccggcgctggttgaacagactgccgctgtactgcaggcgtggcctggagggactcagcaaattctcctgccttcaacttggcaacagttgcctggggtagctctacacaactctgtccagcccacagcaatgattccagaggccatggggagtggacagcagctagctgactggaggaatgcccactctcatggcaaccagtacagcactatcatgcagcagccatccttgctgactaaccatgtgacattggccactgctcagcctctgaatgttggtgttgcccatgttgtcagacaacaacaatccagttccctcccttcgaagaagaataagcagtcagctccagtctcttccaagtcctctctagatgttctgccttcccaagtctattctctggttgggagcagtcccctccgcaccacatcttcttataattccttggtccctgtccaagatcagcatcagcccatcatcattccagatactcccagccctcctgtgagtgtcatcactatccgaagtgacactgatgaggaagaggacaacaaatacaagcccagtagctctggactgaagccaaggtctaatgtcatcagttatgtcactgtcaatgattctccagactctgactcttctttgagcagcccttattccactgataccctgagtgctctccgaggcaatagtggatccgttttggaggggcctggcagagttgtggcagatggcactggcacccgcactatcattgtgcctccactgaaaactcagcttggtgactgcactgtagcaacccaggcctcaggtctcctgagcaataagactaagccagtcgcttcagtgagtgggcagtcatctggatgctgtatcacccccacagggtatcgagctcaacgcggggggaccagtgcagcacaaccactcaatcttagccagaaccagcagtcatcggcggctccaacctcacaggagagaagcagcaacccagccccccgcaggcagcaggcgtttgtggcccctctctcccaagccccctacaccttccagcatggcagcccgctacactcgacagggcacccacaccttgccccggcccctgctcacctgccaagccaggctcatctgtatacgtatgctgccccgacttctgctgctgcactgggctcaaccagctccattgctcatcttttctccccacagggttcctcaaggcatgctgcagcctataccactcaccctagcactttggtgcaccaggtccctgtcagtgttgggcccagcctcctcacttctgccagcgtggcccctgctcagtaccaacaccagtttgccacccaatcctacattgggtcttcccgaggctcaacaatttacactggatacccgctgagtcctaccaagatcagccagtattcctacttatagttggtgagcatgagggaggaggaatcatggctaccttctcctggccctgcgttcttaatattgggctatggagagatcctcctttaccctcttgaaatttcttagccagcaacttgttctgcaggggcccactgaagcagaaggtttttctctgggggaacctgtctcagtgttgactgcattgttgtagtcttcccaaagtttgccctatttttaaattcattatttttgtgacagtaattttggtacttggaagagttcagatgcccatcttctgcagttaccaaggaagagagattgttctgaagttaccctctgaaaaatattttgtctctctgacttgatttctataaatgcttttaaaaacaagtgaagcccctctttatttcattttgtgttattgtgattgctggtcaggaaaaatgctgatagaaggagttgaaatctgatgacaaaaaaagaaaaattactttttgtttgtttataaactcagacttgcctattttattttaaaagcggcttacacaatctcccttttgtttattggacatttaaacttacagagtttcagttttgttttaatgtcatattatacttaatgggcaattgttatttttgcaaaactggttacgtattactctgtgttactattgagattctctcaattgctcctgtgtttgttataaagtagtgtttaaaaggcagctcaccatttgctggtaacttaatgtgagagaatccatatctgcgtgaaaacaccaagtattctttttaaatgaagcaccatgaattcttttttaaattattttttaaaagtctttctctctctgattcagcttaaatttttttatcgaaaaagccattaaggtggttattattacatggtggtggtggttttattatatgcaaaatctctgtctattatgagatactggcattgatgagctttgcctaaagattagtatgaattttcagtaatacacctctgttttgctcatctctcccttctgttttatgtgatttgtttggggagaaagctaaaaaaacctgaaaccagataagaacatttcttgtgtatagcttttatacttcaaagtagcttcctttgtatgccagcagcaaattgaatgctctcttattaagacttatataataagtgcatgtaggaattgcaaaaaatattttaaaaatttattactgaatttaaaaatattttagaagttttgtaatggtggtgttttaatattttacataattaaatatgtacatattgattagaaaaatataacaagcaatttttcctgctaacccaaaatgttatttgtaatcaaatgtgtagtgattacacttgaattgtgtacttagtgtgtatgtgatcctccagtgttatcccggagatggattgatgtctccattgtatttaaaccaaaatgaactgatacttgttggaatgtatgtgaactaattgcaattatattagagcatattactgtagtgctgaatgagcaggggcattgcctgcaaggagaggagacccttggaattgttttgcacaggtgtgtctggtgaggagtttttcagtgtgtgtctcttccttccctttcttcctccttcccttattgtagtgccttatatgataatgtagtggttaatagagtttacagtgagcttgccttaggatggaccagcaagcccccgtggaccctaagttgttcaccgggatttatcagaacaggattagtagctgtattgtgtaatgcattgttctcagtttccctgccaacattgaaaaataaaaacagcagcttttctcctttaccaccacctctacccctttccattttggattctcggctgagttctcacagaagcattttccccatgtggctctctcactgtgcgttgctaccttgcttctgtgagaattcaggaagcaggtgagaggagtcaagccaatattaaatatgcattcttttaaagtatgtgcaatcacttttagaatgaatttttttttccttttcccatgtggcagtccttcctgcacatagttgacattcctagtaaaatatttgcttgttgaaaaaaacatgttaacagatgtgtttataccaaagagcctgttgtattgcttaccatgtccccatactatgaggagaagttttgtggtgccgctggtgacaaggaactcacagaaaggtttcttagctggtgaagaatatagagaaggaaccaaagcctgttgagtcattgaggcttttgaggtttcttttttaacagcttgtatagtcttggggcccttcaagctgtgaaattgtccttgtactctcagctcctgcatggatctgggtcaagtagaaggtactggggatggggacattcctgcccataaaggatttggggaaagaagattaatcctaaaatacaggtgtgttccatctgaattgaaaatgatatatttgagatataattttaggactggttctgtgtagatagagatggtgtcaaggaggtgcaggatggagatgggagatttcatggagcctggtcagccagctctgtaccaggttgaacaccgaggagctgtcaaagtatttggagtttcttcattgtaaggagtaagggcttccaagatggggcaggtagtccgtacagcctaccaggaacatgttgtgttttctttattttttaaaatcattatattgagttgtgttttcagcactatattggtcaagatagccaagcagtttgtataatttctgtcactagtgtcatacagttttctggtcaacatgtgtgatctttgtgtctcctttttgccaagcacattctgattttcttgttggaacacaggtctagtttctaaaggacaaattttttgttccttgtcttttttctgtaagggacaagatttgttgtttttgtaagaaatgagatgcaggaaagaaaaccaaatcccattcctgcaccccagtccaataagcagataccacttaagataggagtctaaactccacagaaaaggataataccaagagcttgtattgttaccttagtcacttgcctagcagtgtgtggctttaaaaactagagatttttcagtcttagtctgcaaactggcatttccgattttccagcataaaaatccacctgtgtctgctgaatgtgtatgtatgtgctcactgtggctttagattctgtccctggggttagccctgttggccctgacaggaagggaggaagcctggtgaatttagtgagcagctggcctgggtcacagtgacctgacctcaaaccagcttaaggctttaagtcctctctcagaacttggcatttccaacttcttcctttccgggtgagagaagaagcggagaagggttcagtgtagccactctgggctcatagggacacttggtcactccagagtttttaatagctcccaggaggtgatattattttcagtgctcagctgaaataccaaccccaggaataagaactccatttcaaacagttctggccattctgagcctgcttttgtgattgctcatccattgtcctccactagaggggctaagcttgactgcccttagccaggcaagcacagtaatgtgtgttttgttcagcattattatgcaaaaattcactagttgagatggtttgttttaggataggaaatgaaattgcctctcagtgacaggagtggcccgagcctgcttcctattttgattttttttttttttaactgatagatggtgcagcatgtctacatggttgtttgttgctaaactttatataatgtgtggtttcaattcagcttgaaaaataatctcactacatgtagcagtacattatatgtacattatatgtaatgttagtatttctgctttgaatccttgatattgcaatggaattcctactttattaaatgtatttgatatgctagttattgtgtgcgatttaaactttttttgctttctccctttttttggttgtgcgctttcttttacaacaagcctctagaaacagatagtttctgagaattactgagctatgtttgtaatgcagatgtacttagggagtatgtaaaataatcattttaacaaaagaaatagatatttaaaatttaatactaactatgggaaaagggtccattgtgtaaaacatagtttatctttggattcaatgtttgtctttggttttacaaagtagcttgtattttcagtattttctacataatatggtaaaatgtagagcaattgcaatgcatcaataaaatgggtaaattttctgactta

SEQ ID NO: 1190 - DNA, 3605 bp, Homo sapiens
  source 1..3605: mol_type = genomic DNA
tcaaaatttcaacgatactgaatgagtcccgcggcgggttggctcgcgcttcgttgtcagatctgaggcgaggctaggtgagccgtgggaagaaaagagggagcagctagggcgcgggtctccctcctcccggagtttggaacggctgaagttcaccttccagcccctagcgccgttcgcgccgctaggcctggcttctgaggcggttgcggtgctcggtcgccgcctaggcggggcagggtgcgagcaggggcttcgggccacgcttctcttggcgacaggattttgctgtgaagtccgtccgggaaacggaggaaaaaaagagttgcgggaggctgtcggctaataacggttcttgatacatatttgccagacttcaagatttcagaaaaggggtgaaagagaagattgcaactttgagtcagacctgtaggcctgatagactgattaaaccacagaaggtgacctgctgagaaaagtggtacaaatactgggaaaaacctgctcttctgcgttaagtgggagacaatgtcacaagttaaaagctcttattcctatgatgccccctcggatttcatcaatttttcatccttggatgatgaaggagatactcaaaacatagattcatggtttgaggagaaggccaatttggagaataagttactggggaagaatggaactggagggctttttcagggcaaaactcctttgagaaaggctaatcttcagcaagctattgtcacacctttgaaaccagttgacaacacttactacaaagaggcagaaaaagaaaatcttgtggaacaatccattccgtcaaatgcttgttcttccctggaagttgaggcagccatatcaagaaaaactccagcccagcctcagagaagatctcttaggctttctgctcagaaggatttggaacagaaagaaaagcatcatgtaaaaatgaaagccaagagatgtgccactcctgtaatcatcgatgaaattctaccctctaagaaaatgaaagtttctaacaacaaaaagaagccagaggaagaaggcagtgctcatcaagatactgctgaaaagaatgcatcttccccagagaaagccaagggtagacatactgtgccttgtatgccacctgcaaagcagaagtttctaaaaagtactgaggagcaagagctggagaagagtatgaaaatgcagcaagaggtggtggagatgcggaaaaagaatgaagaattcaagaaacttgctctggctggaatagggcaacctgtgaagaaatcagtgagccaggtcaccaaatcagttgacttccacttccgcacagatgagcgaatcaaacaacatcctaagaaccaggaggaatataaggaagtgaactttacatctgaactacgaaagcatccttcatctcctgcccgagtgactaagggatgtaccattgttaagcctttcaacctgtcccaaggaaagaaaagaacatttgatgaaacagtttctacatatgtgccccttgcacagcaagttgaagacttccataaacgaacccctaacagatatcatttgaggagcaagaaggatgatattaagacagggtcttgctccgtcacccaggctggagtgcagtggcgtgatcatggctcacttcagtgtccaactcctgggctcaagcaatcctcctgccttagccttccaaacctgttaccctccaaatcttctgtgaccaagatttgcagagacccacagactcctgtactgcaaaccaaacaccgtgcacgggctgtgacctgcaaaagtacagcagagctggaggctgaggagctcgagaaattgcaacaatacaaattcaaagcacgtgaacttgatcccagaatacttgaaggtgggcccatcttgcccaagaaaccacctgtgaaaccacccaccgagcctattggctttgatttggaaattgagaaaagaatccaggagcgagaatcaaagaagaaaacagaggatgaacactttgaatttcattccagaccttgccctactaagattttggaagatgttgtgggtgttcctgaaaagaaggtacttccaatcaccgtccccaagtcaccagcctttgcattgaagaacagaattcgaatgcccaccaaagaagatgaggaagaggacgaaccggtagtgataaaagctcaacctgtgccacattatggggtgccttttaagccccaaatcccagaggcaagaactgtggaaatatgccctttctcgtttgattctcgagacaaagaacgtcagttacagaaggagaagaaaataaaagaactgcagaaaggggaggtgcccaagttcaaggcacttcccttgcctcattttgacaccattaacctgccagagaagaaggtaaagaatgtgacccagattgaacctttctgcttggagactgacagaagaggtgctctgaaggcacagacttggaagcaccagctggaagaagaactgagacagcagaaagaagcagcttgtttcaaggctcgtccaaacaccgtcatctctcaggagccctttgttcccaagaaagagaagaaatcagttgctgagggcctttctggttctctagttcaggaaccttttcagctggctactgagaagagagccaaagagcggcaggagctggagaagagaatggctgaggtagaagcccagaaagcccagcagttggaggaggccagactacaggaggaagagcagaaaaaagaggagctggccaggctacggagagaactggtgcataaggcaaatccaatacgcaagtaccagggtctggagataaagtcaagtgaccagcctctgactgtgcctgtatctcccaaattctccactcgattccactgctaaactcagctgtgagctgcggataccgcccggcaatgggacctgctcttaacctcaaacctaggaccgtcttgctttgtcattgggcatggagagaacccatttctccagacttttacctacccgtgcctgagaaagcatacttgacaactgtggactccagttttgttgagaattgttttcttacattactaaggctaataatgagatgtaactcatgaatgtctcgattagactccatgtagttacttcctttaaaccatcagccggccttttatatgggtcttcactctgactagaatttagtctctgtgtcagcacagtgtaatctctattgctattgccccttacgactctcaccctctccccactttttttaaaaattttaaccagaaaataaagatagttaaatcctaagatagagattaagtcatggtttaaatgaggaacaatcagtaaatcagattctgtcctcttctctgcataccgtgaatttatagttaaggatccctttgctgtgagggtagaaaacctcaccaactgcaccagtgaggaagaagactgcgtggattcatggggagcctcacagcagccacgcagcaggctctgggtggggctgccgttaaggcacgttctttccttactggtgctgataacaacagggaaccgtgcagtgtgcattttaagacctggcctggaataaatacgttttgtctttccctccctga

SEQ ID NO: 1191 - DNA, 2789 bp, Homo sapiens
  source 1..2789: mol_type = genomic DNA
gggaggagccatcccagccatgagcccctgtgggaatctgctgggggccaagtggcctggagtcctcaggctcccgcagctgctccggagggagaggtgagctcagggcagcctgcctgcagccagaggtgccgggagccccgggcctgtcatggtggccatctacagccggcctgaggcagtcacagacggatttgcagctgagcctgtctatctggtgtgggaagaagatggggagttacttgtcagtcccggcttacttcacctccagagacctgtttcggtgttcagaatgccaggattccctcaccaactggtactatgagaaggatgggaagctctactgccccaaggactactgggggaagtttggggagttctgtcatgggtgctccctgctgatgacagggccttttatggtggctggggagttcaagtaccacccagagtgctttgcctgtatgagctgcaaggtgatcattgaggatggggatgcatatgcactggtgcagcatgccaccctctactgtgggaagtgccacaatgaggtggtgctggcacccatgtttgagagactctccacagagtctgttcaggagcagctgccctactctgtcacgctcatctccatgccggccaccactgaaggcaggcggggcttctccgtgtccgtggagagtgcctgctccaactacgccaccactgtgcaagtgaaagaggtcaaccggatgcacatcagtcccaacaatcgaaacgccatccaccctggggaccgcatcctggagatcaatgggacccccgtccgcacacttcgagtggaggaggtggaggatgcaattagccagacgagccagacacttcagctgttgattgaacatgaccccgtctcccaacgcctggaccagctgcggctggaggcccggctcgctcctcacatgcagaatgccggacacccccacgccctcagcaccctggacaccaaggagaatctggaggggacactgaggagacgttccctaaggcgcagtaacagtatctccaagtcccctggccccagctccccaaaggagcccctgctgttcagccgtgacatcagccgctcagaatcccttcgttgttccagcagctattcacagcagatcttccggccctgtgacctaatccatggggaggtcctggggaagggcttctttgggcaggctatcaaggtgacacacaaagccacgggcaaagtgatggtcatgaaagagttaattcgatgtgatgaggagacccagaaaacttttctgactgaggtgaaagtgatgcgcagcctggaccaccccaatgtgctcaagttcattggtgtgctgtacaaggataagaagctgaacctcctgacagagtacattgaggggggcacactgaaggactttctgcgcagtatggatccgttcccctggcagcagaaggtcaggtttgccaaaggaatcgcctccggaatggcctatttgcactctatgtgcatcatccaccgggatctgaactcgcacaactgcctcatcaagttggacaagactgtggtggtggcagactttgggctgtcacggctcatagtggaagagaggaaaagggcccccatggagaaggccaccaccaagaaacgcaccttgcgcaagaacgaccgcaagaagcgctacacggtggtgggaaacccctactggatggcccctgagatgctgaacggaaagagctatgatgagacggtggatatcttctcctttgggatcgttctctgtgagatcattgggcaggtgtatgcagatcctgactgccttccccgaacactggactttggcctcaacgtgaagcttttctgggagaagtttgttcccacagattgtcccccggccttcttcccgctggccgccatctgctgcagactggagcctgagagcagagccccccccggggccgcaggagagggcccgggctgcgcggatgatgagggcccagtgaggcgccaagggaaggtcaccatcaagtatgaccccaaggagctacggaagcacctcaacctagaggagtggatcctggagcagctcacgcgcctctacgactgccaggaagaggagatctcagaactagagattgacgtggatgagctcctggacatggagagtgacgatgcctgggcttccagggtcaaggagctgctggttgactgttacaaacccacagaggccttcatctctggcctgctggacaagatccgggccatgcagaagctgagcacaccccagaagaagtgagggtccccgacccaggcgaacggtggctcccataggacaatcgctaccccccgacctcgtagcaacagcaataccgggggaccctgcggccaggcctggttccatgagcagggctcctcgtgcccctggcccaggggtctcttcccctgccccctcagttttccacttttggatttttttattgttattaaactgatgggactttgtgtttttatattgactctgcggcacgggccctttaataaagcgaggtagggtacgcctttggtgcagctcaaaaaaaaaaaaaaaaatgatttccagcggtccacattagagttgaaattttctggtgggagaatctataccttgttcctttataggccaaggaccgcagtccttcagtaacaccagtgtaaaagcttgaggagaaattgtgaagctacacagtatttgttttctaatacctcttgtcattctaaatatctttaatttattaaaaaatatatatatacagta

SEQ ID NO: 1192 - DNA, 2188 bp, Homo sapiens
  source 1..2188: mol_type = genomic DNA
agaggcaggtgagcgcgatgcagccggcgccgggtctggggctcggggactcctccctgcaccgctacctggacggcgacttctggagcctcaagaacgagctgcgcggactcctcggcggcgcccgctcttccggcaaaggtatgatttaagcttggatgaaatgagagctttgacagttcagagagtgaagtttgccatggacctgcctctgttaaaacgtgcaggtcaggatctggcagagaaaacaaagaattttgtcagccgaagccttgtcataggagaagtcctctccatggcggacatggccacaggagtgaagtgcggaataatttattggctatttggtggtgctatcaggaatctcggaagccctgaacatgttactaagtggtttcagccactccaggagcagaaatacactgggatgtttgcaatgaccgagaggggccatgggagcaacgcgagagggatccagaccgaagccacctttgacctctctgcccaggagtttgtaattgacacgccgtgtgaaaatgcggagaagatgtatattggaaatgccatgtacgggaattatgcagctgtctttgcccagctcatcatagatggaagatctcaagggccccactgtttcatcgttcctgtccgggatgaaaacggaagcttgtacccaggagtcacagctattgatatgatgtacaaggagggtctgcatggtgtggacaatgggatattaatatttgacaaggttcggatacccagggagaacctgctggataagtttggttccgtggctccagatggacagtaccattcgcctattaggaacaagagtgcaagattcaatgccatgctggcagcactgaccccttcgagattagctgtggctttccaagctatgggtgccatgaagcttgggttgacgatagccattcgctatagccacaggtccagaatcatctcccagaactgctgttcagctccagctggtctttattgagcccctcttgtggaccaggctaatttcctgaaaactggtttttgctaacgtttcttacgcttgctcgtgaaatcagccacttaactgttctgggttttcccgtggcagatccctataggcttctcactgcactatcccaaactttttatctgagaatgttgtgtggcaagatgtctgcagagtgccgcttaggagatgctggcctggcgtccacgggtctgctgtgtatgtctctccaggcagatggcctgtctctgcctggcaaggacgatctggggtggaaaaactctgatctgaaagtgaaatcattgactccgttaccatgttctgaattcccagatctccctgatatggaaagtgaaaattggcttctattacacaatgcatcaaaattcttttgtataggaccagaccactgatatcaagggcagtgcactgactttcagttcctctgcatcccttggtcatgttcccacctttcaatgggaacagagaataaaaattccagctctagggcccagcctagtggccacctctcacggacaggcacccggctgctcagtgttatccaattactagaggccattcctagcatttcaacttggggaattaatttactattactttatttttatctttagagacagagtcttgctctgtcacccagactagagtgtagtggcatgatcatagctcactgcagccttgaactcctgagctcaggcaatcctcctgccacagccacctgagtagctggaactataggcatgtgccatcatgcccaactaattttatttttatttcagttgtagagatggagccttaccctgttgcccaggctggtctctgactcctggtctctagtgatcctcctgccttggcctcccaaagtgctaggattataggtgtgagccaacatgctgtccccattattgactgttaccctaaagtgtgtgttgcctttctagtttgagtagaaagtccagcattatctttttggataatatccaggttttgctgtttctttctttatttttcataatgagaacatttgctctcttgctgacattggagggcgtctgtttacctctcctgtaggcacacaaaattcccaacgtttatttgaagaaaaagacaattatttgagtaatttgaataaataaacattttaagtgattcccaaaa

SEQ ID NO: 1193 - DNA, 2761 bp, Homo sapiens
  source 1..2761: mol_type = genomic DNA
cttcccatagccgcggcctcaactaaaagtggccattgacctttcaagctttcgagcagtgatgcaatagaatagtatttcaaagaaaaatgcttatcgaaattttggatccggttttcccgtgattgttaagggtttcttttaaaaagtaggtcacatttcaagtaggtcatatttcgggggcgggtgcgcagacaaggagatgagtttccactaaggccagggggcctccaacggggttggaggtgagaatcccaggtagggtagaggtgccgagatccttccgaatcccagccctggggcgtcagccctgcagggaatggcagagacactctccggactgagggaaccgaggccagtcaccaagccccttccgggcgcgcaggcgatcagtgggtgaccgcggctgcgagggactttgtcatccgtcctccaggatctggggagaaagagccccatcccttctctctctgccaccatttcggacaccccgcagggactcgttttgggattcgcactgacttcaaggaaggacgcgaacccttctctgaccccagctcgggcggccacctgtctttgccgcggtgacccttctctcatgaccctgcggtgccttgagccctccgggaatggcggggaagggacgcggagccagtgggggaccgcggggtcggcggaggagccatccccgcaggcggcgcgtctggcgaaggccctgcgggagctcggtcagacaggatggtactggggaagtatgactgttaatgaagccaaagagaaattaaaagaggcaccagaaggaactttcttgattagagatagctcgcattcagactacctactaacaatatctgttaaaacatcagctggaccaactaatcttcgaatcgaataccaagacggaaaattcagattggactctatcatatgtgtcaaatccaagcttaaacaatttgacagtgtggttcatctgatcgactactatgttcagatgtgcaaggataagcggacaggtccagaagccccccggaacggcactgttcacctttatctgaccaaaccgctctacacgtcagcaccatctctgcagcatctctgtaggctcaccattaacaaatgtaccggtgccatctggggactgcctttaccaacaagactaaaagattacttggaagaatataaattccaggtataaatgtttctctttttttaaacatgtctcacatagagtatctccgaatgcagctatgtaaaagagaaccaaaacttgagtgctctggataactatatggaatgctttctaagaacagctgaagctaatctaatttaaatttaacagcttgaagaggtagctaggtgtttaaagttcctccagatacttttacctgagtgatgcttcccttcctaaggctgaccaagacctgttgatccttttagattaaaaataaaatgtcgcatgtaaaggctgaagtcgcgttttatcagaatgccttgccttcttaggttcttttccattatgtcaaaggtccaggctccagtaggagagaaagaactcctcataggaatactgaagaagtgggaaggaaccaagctgacacaggcctcactgcaatttgatatgcctgctgatcagagtctcttgggcattttatattttgcattctgatgtacctaggagttttgttaaacagatgatgtatgtgagtatttatcccattttatgcaattaaccaaatcaaccaaaaaaagtgaccatgaagtcctgtatttgtctttttactacatgtaggaactctcatgtgaatgagtactgtagtaatccattctatgggagccttatttcagaaatatttcaaactggtgcaaatggaaaagactttctcttttcctttaaagctaaagacaagaatatcatgctatacaggtgcaactcaatccccgttaataaaaaccaatgtaggtataggcattctaccctttgaaatagctgtgtcccaacctgttgccattgattttttggaaatggctttagaaatatccaagttgtccttgaattgtctaaccatggacataaacagttgtctcccttctactgtgtagaatactttgacttaattttcttccagatacagggggatacctgcctgtttttcaaagtgtttatttactgctgttactatttgattagaatgtattaaataaaaaaaacctgatttctacaagttgcacttattgagttctagagaacgtacactttcatggtaatagaggattgccataaaaacttacgtcaagtgaaataagccaattattcaacaaaaggtagaacattacttgccattctgtaaagttatgggctgtacctgccccctttgcaatttggaaagcatggtttagaaactacaggcattgtcaagtggccgggtcttttataatttgaataggcataacactgatgtcctctgtgtttccaaaaacatggtttagaaactacaaacattatgacatggccagtcttttacaagttgagtaggcataatactaaagaaaaatacaaagttttgtggccacttattttttgctatgttagtctgcataactgttataaatgtaccatcttttctagagtccagacattatttattttatggctttaaaattttcctgcatagctacaatcctgtggtgtgtcaccataaaggtggaccctgtgtgaatgagaaaattcagttataaattgtaataaaacctgcttactgga

SEQ ID NO: 1194 - DNA, 1765 bp, Homo sapiens
  source 1..1765: mol_type = genomic DNA
aaagtggcgagagccacctcggcgcttgggcgctcagtcgcaggaggcgctccttggcggtgcctggagcccgggcgcaccccaccgctcccgggacctgttgggggctggcccgaaccgtcgtcgaagggagccgctcggccacccccgacgttcctcgccccgcccgacgttccctcaagtggccgaaccagccggacgagccaaactcgccgggcctcccggcggcagcaggtggccccgtccttccagggagggccctgcgccccgcggcgctccggagccctctcggccgcccccgccaggcgggatggaggcggatggggacggagaggagctggcccggctgcgctcagtcttcgccgcctgcgacgcgaaccgctcggggcgcctggagcgcgaggagttccgggcactgtgcacggagctgcgggtgcggccggccgacgccgaggcagtattccagcggctggacgccgaccgtgacggcgccatcaccttccaggagttcgcgcgtggcttcctcgggtccctccgcggggggcggcgccgggactggggtcctctggatcccgcgcccgccgtgtctgaggcggggccggagacacacgacagcgaggaggacgaaggcgacgaggacgcggcggcggcgctggccacctcgtgcggcccggcgagtcccggccgggcttggcaggatttccaggcgcgacttggggacgaagccaagttcattcccagatttggctacacaatttcaaaacctgcatttgtgttcgtgaggcatctcataacactgtgtgcattgtcatgggctaaaaaggaaggcagagaaacactttggacaatcgaggagggaggagccaagatggccgaataggaacagctccggtctacagctcccagcgtgagcgacgcagaagacgggtgatttctgcatttccatctgaggtaccgggttcatctcactacggagtgcgagacagtgggcgcaggccagtgtgtgcgcgcaccgtgcgcgagccgaagcagggcgaggcattgcctcacctgggaagcgcaaggggtcagggagttccctttccgagtcaaagaaaggggtgacggacgcacctggaaaatcgggtcactcccacccgaatattgcgcttttcagaccggcttaagaaacggcgcaccacaagactatatcccacacctggctcagagggtcctacgcccacggaatctcgctgattgctagcacagcagtctgagatcaaactgcaaggcggcaacgaggctgggggaggggcgcccgccattgcccaggcttgcttaggtaaacaaagcagcctggaagctcgaactgggtggagcccaccacagctcaaggaggcctgcctgcctctgtaggctccacctctgggggcagggcacagacaaacaaaaagacagcagtaacctctgcagacttaagtgtccctgtctgacagctttgaagagagcagtggttctcccagcacgcagatggagatctgagaacgggcagactgcctcctcaagtgggtccctgacccctgacccccaagcagcctaactgggaggcaccccccaacaggggcacactgacacctcacacggcagggtattccaacagacctgcagctgagggtcctgtctgttagaaggaaaactaacaaccagaaaggacatctacaccgaaaacccatctgtacatcaccatcatcaaagaccaaaagtagataaaaccacaaagatgggg

SEQ ID NO: 1195 - DNA, 986 bp, Homo sapiens
  source 1..986: mol_type = genomic DNA
gcccttgacgtagcagtaaaaaccttcccccctgagagacacgtggcagtgaagtgttttggaaaaaaaaaggaaaaaaaaaacaatgccaacagcccagcgtccgtgagcaacccaacagtaacaaagcatgcgttcgggatggaggaagaacttcagcgagagggaagcatcgagactctgagtaacagctcaggctccaccagcggcagcataccaagaaactttgatggctaccgatctccgctgcccaccaatgagagccagcccctcagcctcttcccgactggcttcccgtaggtaccagcaacctgcttctgactggccagccccctcccctgctggaggaggggagaagccccgctctggtcctacccttcagtctctgctcttccttcatcaaccaccttccccaagcttagtgacagcagccgcccatcctacctggatggagaagagacccttctccaagcacctcagcgcacttgccctctgccacacctgtcggtggaggctgtggccaggagagactgtagaagctcggtccctgtgtatgtttgcatatgacatcctgcattggatccgcttttgtattttttaaccatacccacggtggggcgggtggggggagcctggaacagtgaccagatctgggggcctgagtggggacagagttgatcgtccacctggccattttgaccctgagtggacagtcacagcctcagctcatgtctggctgtgacacacactgcccccagcttcccttggtcagccccactccagcacggggtgaacggaggcccagagtactagggaaggaggaagggaggacatgcctcttcttcctcctttctttccccatctgttcatgggaagagtttgtctttcttatctttaagcccctttaccctggtcctgtactgatcagtgaaggaaaccgtggttactgaggccctgttgaaaagtgcacgtcttgtccaataaat

SEQ ID NO: 1196 - DNA, 1701 bp, Homo sapiens
  source 1..1701: mol_type = genomic DNA
cgggagcagcggccgcaggcgccatggctgcggagcggacccggccgctgcaaggctctggcggtccgagcgtgcctagtagctgtgaacccggcgcgaggtcccgggccccggggcgctcgctcaggtaaatttttccataaccttatggagagaaaggactttgagacatggcttgataacatttctgttacatttctttctctgacggacttgcagaaaaatgaaactctggatcacctgattagtctgagtggggcagtccagctcaggcatctctccaataacctagagactctcctcaagcgggacttcctcaaactccttcccctggagctcagtttttatttgttaaaatggctcgatcctcagactttactcacatgctgcctcgtctctaaacagtggaataaggtgataagtgcctgtacagaggtgtggcagactgcatgtaaaaatttgggctggcagatagatgattctgttcaggacgctttgcactggaagaaggtttatttgaaggctattttgagaatgaagcaactggaggaccatgaagcctttgaaacctcgtcattaattggacacagtgccagagtgtatgcactttactacaaagatggacttctctgtacagtatttagcgtggactacaatgatgaactggatatcttggtgagcggctctgcagacttcactgtgaaagtatgggctttatctgctgggacatgcctgaacacactcaccgggcacacggaatgggtcaccaaggtagttttgcagaagtgcaaagtcaagtctctcttgcacagtcctggagactacatcctcttaagtgcagacaaatatgagattaagatttggccaattgggagagaaatcaactgtaagtgcttaaagacattgtctgtctctgaggatagaagtatctgcctgcagccaagacttcattttgatggcaaatacattgtctgtagttcagcacttggtctctaccagtgggactttgccagttatgatattctcagggtcatcaagactcctgagatagcaaacttggccttgcttggctttggagatatctttgccctgctgtttgacaaccgctacctgtacatcatggacttgcggacagagagcctgattagtcgctggcctctgccagagtacaggaaatcaaagagaggctcaagcttcctggcaggcgaagcatcctggctgaatggactggatgggcacaatgacacgggcttggtctttgccaccagcatgcctgaccacagtattcacctggtgttgtggaaggagcacggctgacaccatgagccaccaccgctgactgactttgggtgccggggctgcgggttttgggtgcaacctctgcggcagccgactgcatgaaccaaagttctcacctaatggtatcatcacgcagtgcacaatcatttatctatgttttgccaggggccagggctcggggtgggggagggcttgttttattgacatacaacgcagcatgctaatggggtacaccattgacttcatttgtacttagttatgttggtcagtgttagaggatgcattttgggttcatctttcttgagtggagtattggttttaagtaaagaaagttaaatgatccattaatctgctaattggttgcctatgaaatcacattgtctgttattaaagctttttacc

SEQ ID NO: 1197 - DNA, 4211 bp, Homo sapiens
  source 1..4211: mol_type = genomic DNA
gactgggagcaggcagcccgggcggagcgggccggtgccgaggacggccccaggcattgctctgccccgggcattgcgcggcgcgcgtgagggggatgcggcaggaggcggcgcggcgggaggagtaggcggcggcgccctcgggagggagctgcgcgcgggccagacggcgcccggaggctccgcagtgccgccgccgtcgcccgggaggctccgcgcgggagccatgtaaccctgcggcgggctccgggctgctccgtccttccccagctcccgggctagcgcggcagcggggccacgatgaagaagcagttcaatcgcatgcgccagctggccaaccagacggtgggcagggctgaaaagacagaagttttgagtgaagaccttcttcaggtggagaagcgtctggagctggtgaaacaggtgtcccacagcacgcacaagaagctcaccgcatgtctgcagggccagcaaggggcagaggctgacaagcgctccaaaaagttgcctttgacaacactggctcagtgtctgatggaggggtcagctatcctgggagatgacacacttcttgggaagatgctgaaactctgtggagagacggaggacaagctggctcaggagctgatacattttgagttgcaagtagagagagacgtgattgagcccctgtttttgctggcggaggtggaaatcccaaatattcaaaagcagaggaaacacttagccaagttggtgctggacatggattcctcacgaaccaggtggcagcagacttccaagtcttcaggtttgtccagcagcttacagcctgcgggtgccaaggctgatgccctcagggaagaaatggaagaggctgccaacagagtggagatttgcagggaccagctctcagctgatatgtacagttttgtggccaaagaaattgactatgcaaactactttcaaacgctaatagaagtgcaagctgaataccacaggaagtccctgacactattgcaggctgtattgcctcagatcaaagcacaacaggaggcctgggtagagaagccttccttcgggaagccgctggaggagcacctcaccatcagcggccgggagatcgccttccccatcgaggcgtgtgtgaccatgctgcttgagtgtgggatgcaggaggagggactcttccgagtagccccctctgcctccaaactgaagaagctgaaagcggccctggactgctgcgtggtggatgtgcaggagtactcggcagacccccacgcaattgcaggagctttgaaatcttacctccgagagttgccagaacctcttatgacctttgaactctatgatgagtggatccaggcttccaatgtccaggagcaagacaagaagcttcaggctctatggaatgcttgtgaaaagttgcccaaggccaatcacaacaacatccgatacttgataaaatttttatccaagctgtcagaatatcaagatgtaaacaagatgactcccagtaatatggcaattgttttaggacccaacctcctatggccacaagcagaagggaacattacagagatgatgaccacagtgtcgctgcaaattgttgggatcattgaacctatcatccagcatgcagactggttcttccctggggagatagagttcaacattactggcaattatgggagtccagtacacgtgaaccataatgccaactacagctcaatgccctccccagacatggaccctgctgaccggcgccagcccgagcaggcccgccggcccctcagcgtcgccacggataatatgatgctggagttttacaaaaaggatggcatgggtgtgagggtcatggacacaaactgggtggctcgaagaggctcctcggccggtcggaaagtgtcctgcgccccgccctccatgcagcctcccgccccgcccgccgagctggctgcgcccctgccttcgccgctgccggagcagcccctggacagccccgcggcccccgcgctctctccatccggcctgggcctccagcctgggcccgagcgcaccagcacaacaaaaagcaaggaactttctccaggctctgcacagaaaggaagtccaggctccagccagggcacagcctgtgcagggactcaaccaggggctcaacctggagctcagccgggcgccagccccagccccagccagccgcctgcagaccagagtcctcacaccctccggaaagtttcaaagaagctggcaccgattccacccaaggtcccctttggccagccgggggctatggcagaccagtccgctggccagccgtccccagtcagcctgtcccccaccccgcccagcaccccgtcaccctatggactgagctaccctcaggggtactccttggcctcgggccagctctccccagctgcagctcctcccctggcctctccttctgtctttacaagcactttgagcaaatcgcggcccactcctaagccgcgacagagacctactctgccgcctcctcagcctcccacagtaaacctctcggcctctagtccacagtccacggaggcccccatgctagatggcatgtcccctggggaaagcatgtctacagatcttgtccactttgatattccctcgatccacatagagctcgggtcgacgctccgcctgagtcccctggagcacatgcggcgacactcagtaactgacaagagggactcggaggaggagtctgagagcaccgccctctgacatgacaccgcccatcctgcctcgcgtgtacatacatcacgggccctaggaacgccgccaggagcagcgtccatgagcttgccaagtgttctctgctggctctttcctgccactgccaacacgaggttggaatttggcagaaaattgtgatctccagtccgtgtggtgatgctggtggtgcaggttttgtttgttcctttcgggtggtgacttcggccttttgtttgacctttgccttttgactttgtgcctcttttgatccactttcagcctccatgccagaaaacacccacctctccatccaaggctggtcaggaacgtcctttgcagggtcggggtggtgcgggagaggctcactttgcctggttagacccaagggctgctaccttttccttggacggctcatgtcaggtcttgcaggatcagtttaatggccacagaaaggaagcaggacagcagggcccctctcacccacaactggaccaggtccaggattctagcagtcctggggcactgacctttgccagctacctgggggagggcttgccactggaaaacctttcaggccgcccccatcagtgggctccaaagtaaatggctgaaaacaaaaatgtttcacttcctaacagttttcctttttccactgtgtgactgaaagctcctatatcattttatatttctgaatctataaaacaaaacaaacaagcctgacagtgtctggaggagccaaaggtggcctccctgtccccaaatatattggctatatgagagtaattttacccctctacgtacctaaaggcacccagttcactagtctgtggggtcctggagcctgtctcttctttctggaggttcaaactgaatagcaataattacgttacccaaagcatgtggaggaaaagtgaaaccagccacggagacgctggcccacgggctcggcctgcggtgtggcctgctttgctcaccagcgtcagccgctcatttccttctcatgaagtcccatctggtcatggggacgagggccgggagggcaccgggtagccttttcacacttggggattaggggagtgagaaaagatttgggccatgcatgcaaagtcaaagtttaaaattttatccttttcaaatagatgatataatatacctatacatgatataatatttgtatatatgaaatctctctatatttgtttaatttgagccattcaatctaaaccaatgtacaggtgtacaatgaaaaatttaaatgcttagttatttttcccaacacagtgtaaagtcaccctcctctgagagtgggatgtgcagagttttgatgttgcagctttgctcacttcctggcaagggcaggtcatgcctcaatttgtaatgggagtctggggtaagggtgggggttgaaagttgttatctttaaatacatgtacaaatcgttgtcaaaagtaacgttattaaaatagatttattatccctga

SEQ ID NO: 1198 - DNA, 1842 bp, Homo sapiens
  source 1..1842: mol_type = genomic DNA
cccgtggacgccgccgaagaagcatcgttaaagtctctcttcaccctgccgtcatgtctaagtcagagtctcctaaagagcccgaacagctgaggaagctcttcattggagggttgagctttgaaacaactgatgagagcctgaggagccattttgagcaatggggaacgctcacggactgtgtggtaatgagagatccaaacaccaagcgctccaggggctttgggtttgtcacatatgccactgtggaggaggtggatgcagctatgaatgcaaggccacacaaggtggatggaagagttgtggaaccaaagagagctgtctccagagaagattctcaaagaccaggtgcccacttaactgtgaaaaagatatttgttggtggcattaaagaagacactgaagaacatcacctaagagattattttgaacagtatggaaaaattgaagtgattgaaatcatgactgaccgaggcagtggcaagaaaaggggctttgcctttgtaacctttgacgaccatgactccgtggataagattgtcattcagaaataccatactgtgaatggccacaactgtgaagttagaaaagccctgtcaaagcaagagatggctagtgcttcatccagccaaagaggtcgaagtggttctggaaactttggtggtggtcgtggaggtggtttcggtgggaatgacaacttcggtcgtggaggaaacttcagtggtcgtggtggctttggtggcagccgtggtggtggtggatatggtggcagtggggatggctataatggatttggtaatgatggtggttatggaggaggcggccctggttactctggaggaagcagaggctatggaagtggtggacagggttatggaaaccagggcagtggctatggcgggagtggcagctatgacagctataacaacggaggcggaggcggctttggcggtggtagtggaagcaattttggaggtggtggaagctacaatgattttgggaattacaacaatcagtcttcaaattttggacccatgaagggaggaaattttggaggcagaagctctggcccctatggcggtggaggccaatactttgcaaaaccacgaaaccaaggtggctatggcggttccagcagcagcagtagctatggcagtggcagaagattttaattaggaaacaaagcttagcaggagaggagagccagagaagtgacagggaagctacaggttacaacagatttgtgaactcagccaagcacagtggtggcagggcctagctgctacaaagaagacatgttttagacaaatactcatgtgtatgggcaaaaaactcgaggactgtatttgtgactaattgtataacaggttattttagtttctgttctgtggaaagtgtaaagcattccaacaaagggttttaatgtagatttttttttttgcaccccatgctgttgattgctaaatgtaacagtctgatcgtgacgctgaataaatgtcttttttttaatgtgctgtgtaaagttagtctactcttaagccatcttggtaaatttccccaacagtgtgaagttagaattccttcagggtgatgccaggttctatttggaatttatatacaacctgcttgggtggagaagccattgtcttcggaaaccttggtgtagttgaactgatagttactgttgtgacctgaagttcaccattaaaagggattacccaagcaaaatcatggaatggttataaaagtgattgttggcacatcctatgcaatatatctaaattgaataatggtaccagataaaattatagatgggaatgaagcttgtgtatccattatcat

SEQ ID NO: 1199 - DNA, 3516 bp, Homo sapiens
  source 1..3516: mol_type = genomic DNA
acttcctgccgggctgcgggcgcctgagcggctcttcagcgtttgcgccggcggctgccgcgtctctctcggctcccgcttcctttgaccgcctcccccccccggcccggcggcgcccgcctcctccacggccactccgcctcttccctcccttcgtcccttcttcctctcccttttttccttcttccttcccctcctcgccgccaccgcccaggaccgccggccgggggacgagctcggagcagcagccaggtggagttttgctcttgtcgcccaggctggagtgcagtggcgtgatctcggctcactgcaacctccacctcccaggttcaagcgattttcccacttcagcctcccgataagctgagattacagagtttattaaccacttaacctctcagaactgaacaaagacaacattgttcctggaacgccctctttttaaaaaagaaagcataacccctactgtagaactaaatgcactgtgcatgaaacttggaaaaaaaccaatgtataagcctgttgacccttactctcggatgcagtccacctataactacaacatgagaggaggtgcttatcccccgaggtacttttacccatttccagttccacctttactttatcaagtggaactttctgtgggaggacagcaatttaatggcaaaggaaagacaagacaggctgcgaaacacgatgctgctgccaaagcgttgaggatcctgcagaatgagcccctgccagagaggctggaggtgaatggaagagaatccgaagaagaaaatctcaataaatctgaaataagtcaagtgtttgagattgcacttaaacggaacttgcctgtgaatttcgaggtggcccgggagagtggcccaccccacatgaagaactttgtgaccaaggtttcggttggggagtttgtgggggaaggtgaagggaaaagcaagaagatttcaaagaaaaatgccgccatagctgttcttgaggagctgaagaagttaccgcccctgcctgcagttgaacgagtaaagcctagaatcaaaaagaaaacaaaacccatagtcaagccacagacaagcccagaatatggccaggggatcaatccgattagccgactggcccagatccagcaggcaaaaaaggagaaggagccagagtacacgctcctcacagagcgaggcctcccgcgccgcagggagtttgtgatgcaggtgaaggttggaaaccacactgcagaaggaacgggcaccaacaagaaggtggccaagcgcaatgcagccgagaacatgctggagatccttggtttcaaagtcccgcaggcgcagcccaccaaacccgcactcaagtcagaggagaagacacccataaagaaaccaggggatggaagaaaagtaaccttttttgaacctggctctggggatgaaaatgggactagtaataaagaggatgagttcaggatgccttatctaagtcatcagcagctgcctgctggaattcttcccatggtgcccgaggtcgcccaggctgtaggagttagtcaaggacatcacaccaaagattttaccagggcagctccgaatcctgccaaggccacggtaactgccatgatagcccgagagttgttgtatgggggcacctcgcccacagccgagaccattttaaagaataacatctcttcaggccacgtaccccatggacctctcacgagaccctctgagcaactggactatctttccagagtccagggattccaggttgaatacaaagacttccccaaaaacaacaagaacgaatttgtatctcttatcaattgctcctctcagccacctctgatcagccatggtatcggcaaggatgtggagtcctgccatgatatggctgcgctgaacatcttaaagttgctgtctgagttggaccaacaaagtacagagatgccaagaacaggaaacggaccaatgtctgtgtgtgggaggtgctgaaccttttctggccatgaaccattataaaatcccaacatatatactgaaaatactgaaactgctttgaaaatttggaatttctgatacctccagtgggccgagagacacggtgggtaaaggatgtgggcagcagcagggaagacaacagaaacacaaggaggcggctgtggccgggctggactgtgctggggtttgttgtgatggccactcggtgacctggcggtccctacgcaatagcagctgcctgtggggaagaagggctgcccagccagctggttctcccgggacaccagcagatccacaccctgggcacctccgtgtttggtcttttttttcccctgtgtgaaagaagaaacggcacgaccccttctcaagctggctcactcagacacattgggacaaaccctggacagccatgccagagagaggcctttgaccggccccagagctaaaagcaccagagaaaatcaaatgcttcctactcagcgtgacccaacttttctagtgtgccacggccccaccacctcctgcagtacccacaccatcaccactgctttctcttccaacagtgatctgtattcttagtttcattattttcttttgattgatatgacactatataaaattttcatttgagaatttctcaattgtatctagttaaatagcacagtttggaaacttgtctgagactgactttatcaataatctaaccgacaaagatcatatccatgtgtatgtggttagacatttttatttcattgactaacccaggacagtttcagtgatgcaaattgtgtgccctctggttcagctgaaacagtcctggactttcaaaaaccttgaataagtctcccacagttgtataaattggacaatttaggaattttaaactttagatgatcatttggttccatttttatttcatttttatttttgttaatgcaaacaggacttaaatgaactttgatctctgttttaaagattattaaaaaacattgtgtatctatacatatggctcttgaggacttagctttcactacactacaggatatgatctccatgtagtccatataaacctgcagagtgattttccagagtgctcgatactgttaattacatctccattagggctgaaaagaatgacctacgtttctgtatacagctgtgttgcttttgatgttgtgttactgtacacagaagtgtgtgcactgaggctctgcgtgtggtccgtatggaaagcctggtagccctgcgagttaagtactgcttccattcattgtttacgctggaatttttctccccatggaatgtaagtaaaacttaagtgtttgtcatcaataaatggtaatactaaatttttttgttaatttattctcaaatgccactactgctaggttggtcccctcccaacttgcccctatcctttttttatttttaagaaaaaaactttgtaatgcttgtgattccatctgggcaaaagtctgaagatctgaaataactttatatcaaaccattgatcaataaacagctactaatg

SEQ ID NO: 1200 - DNA, 8259 bp, Homo sapiens
  source 1..8259: mol_type = genomic DNA
tcccaaagtgctgggattacaggcgcgagtggccgctggggttcttaacttgggtctttgaatcgccttaagaagtgtctctgaatctgggaattgcaagcaacgtttctgtgaggaccttcacacagttcatccactcttcgaagagtatggaccgaaaaaggcatagagcattcactgcacgtagagaaaatcagcaacccctgctccccaccctcagcctgaggtgcctacctccacgtggggtcaggaggcggaagcgaaaccagaagaaaaaaccctgagatctataaggcagttcaggtccctagtgacatgagctaaagagaacttggacgccaggactgtagcagacagagtccggcttcggggttcgcatcagtcgcacggaaggtggaaatagcccccaagttgtaacccgccgcggtcttccctcaacagcgcaggcgccaggactgctaggacgccgcgcacctcccgcgatgccccgccccggcgcgaggcaagacgggaaagtcaagatggacgcgtccatttgaacgtctcgcacgccttcctgccattagcactcgagcccgctgctgttgcccgttcttcctccagaataggggagggagagggaatgagaagctgctgcggcccaagagtcactgtgaaggaccccgccgctgccctcgggcctcctcggcccctgcgcctccggggagcagccggggctcgccgcgcctgacgcgtcccgagttatacagaaataatgttgatatttggaacccatgtcgaacttctatgaagaaaggacaacgatgattgcagcaagggatttgcaggaatttgttccttttggtcgagaccactgcaagcaccaccctaatgctttgaaccttcaacttcgccagctgcagccagcttctgaattatggtcttctgatggtgctgctggcttggtgggatcccttcaggaggttacaatccacgagaaacagaaggaaagctggcagttaaggaaaggagtaagtgaaattggagaagatgtggactatgatgaggaactctatgttgctggaaatatggtgatatggagcaaaggaagtaaaagccaggcattggcagtttataaagcatttacagttgacagtcctgttcagcaggcattgtggtgtgacttcattatatcacaggataagtctgaaaaggcctacagtagcaatgaagtagaaaaatgcatatgtatattgcaaagctcatgtattaacatgcatagcatagaaggaaaggattacatagcttcattaccatttcaggttgcaaatgtttggcccactaaatatggattgctgtttgaacgaagcgcttcttcacatgaagtacctccaggttcacccagagaacctttacctactatgttcagcatgctgcacccactagatgaaataactccacttgtttgtaaatctggaagtctttttggttcatcacgggtgcaatatgttgtagatcatgcaatgaaaattgttttcctcaatactgacccctctattgtaatgacttatgatgctgttcaaaatgtgcattctgtgtggactctccggagagtcaaatcagaggaagagaatgttgttttaaagttctctgaacaggggggaaccccacagaatgtggccactagcagctccctcacagcacatctcagaagcctctccaaaggagattcccctgtgacttcacctttccagaattactcctccattcacagccagagtcgctcaacctcatcacccagtctacattctcgctcaccttctatttccaacatggcagctctaagtcgtgctcattctcctgcgttaggagtgcactctttttcaggggtgcaaaggttcaacatttcaagccataatcagtctccaaagagacatagtatttctcattctccaaatagtaattctaatggctcctttcttgcaccagaaacggagccaattgttcctgaactgtgtattgaccatttgtggacagaaacgattactaatataagagagaaaaattcacaagcctcaaaagtgtttattacatctgacctatgtgggcaaaagttcctgtgctttttagtagagtcccagctccagttacgctgtgtaaagtttcaagagagtaatgataaaacccagctcatctttggttcagtgaccaacataccagcaaaggatgcagcaccagtggagaaaatagacaccatgctggtcttggaaggcagtggaaacctggtgctatacacaggagtggttcgggtgggaaaggtttttattcctggactgccagctccctctctgacgatgtccaacacaatgcctcggcccagtactccactagatggcgttagtactccaaagcctcttagtaaactccttggatcattggacgaggttgttctgttgtccccagttccagaactgagggattcttcaaaacttcatgattctctctataatgaggattgtactttccaacagcttggaacttacattcattctatcagagatcctgtccataacagagtcaccctggaactgagtaatggctccatggttaggatcactattcctgaaattgccacctctgagttagtacaaacgtgtttgcaagcaattaagtttatcctgccaaaagaaatagcagttcagatgcttgtcaagtggtacaatgtccacagtgctccaggaggacccagttatcactcagagtggaatttatttgtgacttgtctcatgaacatgatgggttataacacagaccgcttagcatggactagaaattttgactttgaaggatcactttctcctgtcattgcgcccaaaaaagcaaggccttccgagactggatctgatgatgactgggaatatttactaaattcagactaccaccagaatgttgagtctcatcttttgaacagatctttatgtctgagtccttcagaagcttcacagatgaaggatgaggatttttcacagaatctcagtctggattcttctacacttctctttactcacatacctgcaatttttttcgttcttcaccttgtgtatgaggagcttaagttgaatactctaatgggagaaggaatttgttcacttgttgaacttctcgttcagttggcaagggacttaaaattggggccttatgtagatcattactatagagactacccaacgcttgtcagaactactggacaagtgtgcacaattgatccaggtcaaacaggatttatgcatcatccatcattttttacgtctgagccaccaagtatttatcagtgggtgagttcttgtctgaagggtgaaggaatgccaccttatccttacctccctggaatctgtgaaagaagcagacttgtagtcttgagtattgcactgtacatacttggtgatgagagcttggtttctgatgaatcctcacagtatttaaccagaataactatagccccccagaagttgcaagtagaacaagaggaaaacaggtttagtttcaggcattctacatctgtttctagtctagctgaaagattggttgtctggatgactaatgtaggattcactttaagagatttggaaactcttccctttggaattgctcttcccatcagagatgcaatttatcactgtcgtgagcagcctgcctcagactggccagaagctgtctgtctcttgattggacgtcaggatctttccaagcaggcctgcgaaggaaacttacccaaagggaagtctgtgctctcatcagatgttccttcaggaacagaaactgaggaggaagatgacggcatgaatgacatgaatcacgaggtcatgtcattaatatggagtgaagatttaagggtgcaggatgtgcgaaggcttcttcagagtgcgcatcctgtccgtgtcaacgtagtgcagtacccagagctcagtgaccacgagttcatcgaggaaaaggaaaacagattgctccaattgtgtcagcgaactatggctcttcctgtaggacgaggaatgtttaccttgttttcgtaccatcctgttccaacagagccattgcctattcctaaattgaatctgactgggcgtgcccctcctcggaacacaacagtagaccttaatagtggaaacatcgatgtgcctcccaacatgacaagctgggccagctttcataatggtgtggctgctggcctgaagatagctcctgcctcccagatcgactcagcttggattgtttacaataagcccaagcatgctgagttggccaatgagtatgctggctttctcatggctctgggtttgaatgggcaccttaccaagctggcgactctcaatatccatgactacttgaccaagggccatgaaatgacaagcattggactgctacttggtgtttctgctgcaaaactaggcaccatggatatgtctattactcggcttcttagcattcacattcctgctctcttacccccaacgtccacagagctggatgttcctcacaatgtccaagtggctgcagtggttggcattggccttgtatatcaagggacagctcacagacatactgcagaagtcctgttggctgagataggacggcctcctggtcctgaaatggaatactgcactgacagagagtcatactccttagctgctggcttggccctgggcatggtctgcttggggcatggcagcaatttgataggtatgtctgatctcaatgtgcctgagcagctctatcagtacatggttggaggacataggcgctttcaaacaggaatgcatagggagaaacataaatcaccaagttatcaaatcaaagaaggagataccataaatgtggatgtgacttgtccaggtgctactctagctttggctatgatctacttaaaaaccaataacagatctattgcagattggctccgagcccctgacaccatgtatttgttggactttgtgaagccagaatttctcttgcttaggacacttgctcgatgcctgattttgtgggatgatattttaccaaattccaagtgggttgacagcaatgttcctcaaattataagagaaaatagtatctctctcagtgaaatcgaattgccgtgctcagaggatttgaatttggaaactttgtcccaagcacatgtctacataattgcaggagcctgcttgtctctgggttttcgatttgctggctcagaaaacttatcagcatttaactgtttgcataaatttgccaaagattttatgacttatttgtccgcacctaatgcttctgttacaggtcctcataacctagaaacttgtctgagcgtggtgctgctgtctctcgccatggtcatggctggctcaggaaacctaaaggttttgcagctttgtcgcttcttacacatgaaaacgggtggtgaaatgaactatggttttcacttagcccaccacatggcccttggacttctatttttgggaggaggaaggtactctttgagcacatcaaattcttccattgccgctcttctctgtgccctttatccgcacttcccagctcacagcactgacaaccggtatcatctccaggctctccggcacctctatgtgctggccgcggagcccaggcttctagtgcctgtggatgtggacacaaacacgccctgctatgccctcttagaagttacctacaagggcactcagtggtatgaacaaaccaaagaagaattgatggctcctacccttcttccagaactccatcttttaaagcagattaaagtaaaaggcccaagatactgggaactgctcatagatttaagcaaaggaacacaacacttgaagtccatcctttccaaggatggggttttatatgttaaactccgggcgggtcagctctcctacaaagaagatccaatgggatggcaaagtttgttggctcagactgttgctaacaggaactctgaagcccgggctttcaagccagaaacaatctcagcattcacttctgatccagcacttctgtcatttgctgaatatttctgcaagccaactgtgaacatgggtcagaaacaggaaattctggatctcttttcttcagtactctatgaatgtgttacccaggagaccccagagatgttgcctgcatacatcgcaatggatcaggctataagaagacttgggagaagagaaatgtctgagacttctgaactttggcagataaagttggtgttagagtttttcagctcccgaagccatcaggagcggctgcagaaccaccctaagcgggggctctttatgaactcggaattcctccctgttgtgaagtgcaccattgataataccctggaccagtggctacaagtcgggggtgatatgtgtgtgcacgcctacctcagcgggcagcccttggaggaatcacagctgagcatgctggcctgcttcctcgtctaccactctgtgccagctccacagcacctgccacctataggactagaagggagcacaagctttgctgaactgctcttcaaatttaagcagctaaaaatgccagtgcgagctttgctgagattggctcctttgcttcttggaaatccacagccaatggtgatgtgaccgtgtctggcggtgaacctaccctgaaacgtgacttctgcacaacaaacgtgaccaaacatcaaagctaaagcaatgtttataaagttttatggtataactagggggaaatgagctgcacaaacctcaatgtattttaaatctgttgctgtcatcattaacggtatatgacatataaaagcaagttaaaatttacttttgtaaataaagtttttggtttgtttccaaaactcttgatgattgctttagttttggacttagagaatagagcaggggttgctggagtgaatattgatttttaaagtctttgaactgtggtggtataggtgaagtgactatgcccaaaaatgccaagttttaaaagaagctatgtcataaagttttactttctgtggcaaaagagcgctttagcatttcctcagatgtcacagttgtcctgtctaaaataagtttgtacttctggtgacaatgccagacactcttatgatgtgatcaccttaaacaggagaaggagatttttgccctcagttgctcaacatgaagtactgtggactgaattgtgtcctcccagaattatatattgaggccctaatccctgtgtgactgtattaggcaatagggcatataggagattactaaggttaagtgaggtcatcataagggtggggccttaattcagtagaattggtggcctcctaagcagaggaagagagatttttctttctctctctgccatgtgaagacagtgaggagtcggccgtctgcaagccaagaagagcccttatcaggaacagacttggctagcaccttcatcgtggacctccagcctccagaattgcaagaaaatacatttccgtcgttgaaaccacccagtctgtggtattttgttatggcagcccaggcagactaatacgtgaagcctgctctaaatagataaaataagaaattactacagagggctctttagaaattgtatttaaaaacaagacaatccatatttacctaagatttacagaatgtatgtctataaaaggagggatttctggactagatgatgatgaaaaatgttcatataaaggcacctccagcttcgagttgccaacacaggaggaagaatgctccctgctgttcagatgctgatatgtgtcctgtgcttcctggatggccagtgggatcataagctggtagaagcaagaccttcatccactgacttcatatttcttccacatcctgaactgtggtgtttgactttaaaaataaattaaagcaaatagaaatgtttccattgagattttggcaaaaacccacatgacatttgcgtctgcagagtagacttggaaggcatgcacctggaggccaagtggtattctctggactctctgtccttgcatttgcgtggctgccccgaggactcgcttcttcctggatgtgaagcagaggcacgatggggctgactgagaggctgaaatgtgcttctcttcacagttacatagttttcttctaattaaaaataaattttaagtggtagattatgaaaattccatttgaatcaagattttaaaaattcaatatcaaaccagttgttactgtcttcactctccgttgtttacgattgtgtgcttttcctgaataaagaatgactggagagaca

SEQ ID NO: 1201 - DNA, 1524 bp, Homo sapiens
  source 1..1524: mol_type = genomic DNA
gagctggagtgaagggagctagtggtaaagggagctggtggaggggtggcggcaggggtagcagtcaccattatgctcaaagcggtgatcctgattggaggccctcaaaagggaactcgcttcagacctttgtcttttgaggtgcccaaaccattgtttcctgtggcaggggtccctatgatccaacaccatattgaagcctgtgcccaggtccctggaatgcaggagattctgctcattggcttctaccaacctgatgagcccctcacccagttcctagaagccgcccagcaggagtttaaccttccagtcaggtacctgcaggaatttgcccccctaggcacagggggtggtctttaccattttcgagaccagatcctggctgggagccccgaggcattcttcgtgctcaatgctgatgtctgctccgacttccccttgagtgctatgttggaagcccaccgacgccagcgtcaccctttcttactccttggcactacggctaacaggacgcaatccctcaactacggctgcatcgttgagaatccacagacacacgaggtattgcactatgtggagaaacccagcacatttatcagtgacatcatcaactgcggcatctacctcttttctcctgaagccttgaagcctcttcgggatgtcttccagcgtaatcagcaggatgggcaattggaggactcaccaggcttgtggccaggggcaggtaccatccgcctagagcaggatgtgttttcagccctggcagggcagggccagatatacgtgcatctcactgatggtatctggagtcagatcaagtccgcaggttcagccctctacgcctcccgcctctacctgagccgataccaggacactcacccagaacggctggccaagcacaccccagggggcccatggatccgagggaatgtgtacatccacccgaccgccaaggtggccccctcggctgtgctgggccccaacgtctccatcgggaagggggtgaccgtgggtgagggtgtgcggctccgggagagcatcgtcctccatggagccactttgcaggagcacacgtgtgttctgcatagcatcgtgggctgggggagcaccgtgggacgctgggcccgcgtggagggtacccccagtgaccctaaccccaacgatccccgagcccgcatggacagtgagagcctcttcaaggacgggaagctgctgcctgctatcaccatcctgggctgccgagtccggatccctgccgaggtgctcatcctgaactcgattgttctgccacacaaggagctgagccgaagcttcaccaaccagatcatcctctgagtagggctgccagaaggcccccagctcctacccactccccttgaggctgctgcctgcttggccagcctctgtccagaaaggaccagagaaagccaggctggatcgtcacatgccggggagcaatgtggatggcctggggactcctgggttttctccctcccgactccctaataaaccccgtgaaccttg

SEQ ID NO: 1202 - DNA, 1364 bp, Homo sapiens
  source 1..1364: mol_type = genomic DNA
aatcccgtgcggcgcgcacaggcaggaggttgcagttgggcgctcagcagctgtggcagccggttgaggtctggcagtagcgttgggctgaagcagcggagttcgccatgcgcgagtgtatctctatccacgtggggcaggcgggtgtccagatcggcaatgcctgctgggaactgtactgccttgaacatggaattcagcccgatggccaaatgccaagtgataaaaccattggtggcggggacgactccttcaacacgttcttcagtgagactggagctggcaagcacgtgcccagagcagtgtttgtggacctggagcccactgtggtcgatgaagtgcgcacagggacctacaggcagctcttccacccggagcagctgatcaccgggaaggaagatgcagccaataattacgccaggggccattacaccatcggcaaggagattgttgacctagtcctggaccggatccgcaaactggcggatctgtgcacaggactgcagggcttcctcatcttccacagctttgggggcggcactggctctgggttcgcatctctgctcatggagcggctctcagtggattacggcaagaagtccaagctagagtttgccatttacccagccccccaggtctccacagccgtggtggagccctacaactccatcctgaccacccacacgaccctggaacattctgactgtgccttcatggtcgacaatgaagccatctatgacatatgtcggcgcaacctggacattgaacgtcccacgtacaccaacctcaatcgcctgattgggcagatcgtgtcctccatcacagcctccctgcgatttgatggggccctgaatgtggacttgacggaattccagaccaacctagtgccgtacccccgcatccacttccccctggccacctatgccccagtcatctcagctgagaaggcctaccacgagcagctgtctgtggccgagatcaccaatgcctgcttcgagccagccaatcaaatggtcaagtgtgaccctcgccacggcaagtacatggcctgctgcatgttgtacaggggggacgtggtccccaaagacgtcaacgcggccatcgccaccatcaagaccaagcgcaccatccagtttgtggattggtgcccgactggatttaaggtgggcattaactaccagccccccacagtggtccccgggggagacctggccaaggtgcagcgggccgtgtgcatgctgagcaacaccacggccattgcggaggcctgggcccgcctggacctggcagctctagagaaggattatgaagaggtgggcgtggattccgtggaagctgaggctgaagaaggcgaagaatactga

SEQ ID NO: 1203 - DNA, 1562 bp, Homo sapiens
  source 1..1562: mol_type = genomic DNA
gggaaacgcctgctgctcttgcccttgcccacgggcccccagccccagcccctctcctgtggcccaccacccctgctttggtgccatgcagctgccacccttcgacatgtggaaggactacttcaacctgagccaggtggtgtgggcgctgatcgcaagtcggggtcaaaggctggagacccaagagattgaggagccaagtcccgggcctccgctggggcaggatcaggggctgggggcgccaggggccaacgggggcctggggaccctgtgcaacttctgcaagcacaacggggagtcccgccacgtctactcctcacaccagctgaagacaccggatggcgtggtggtgtgtcccatcctgaggcactacgtgtgtcccgtgtgcggggccaccggtgaccaggcccatacgctcaagtactgcccgcttaacggtggccagcagtccctctaccgccgcagcgggcgcaactcggccggacgcagggtcaagcgctgagcatcgtgagatgctcaccacccgcacccctgaccctcctggtccatcccacccaagtccctaaactctctcttccagtcacccagccctttggaatttctggcccccagaactccaccctggctggatcctgaaacagtggaggctgctgggagccaggccagccccgcccccttggacctgtcagccctcggagctctggcctgtgggcgttggcctgagggtccttggtgccgcgggaacccttcctgcacggccctgtagcgccctctgggccccggttcatggatcttttgtcctcgtggggcctgctggtgactggagccctgccccttcgacttctctgttccttgtggagttcttggatttttgaacctccaggattccacggtgctgtcccaagccagcccttaggagatactgaacaaggctggctgagaagtgcctactcaagaacttcaagatgggatgtcgacttaagaccagccttctccatcttcagcctcctgcagaaccacggtgtcatcgtggaccacgcctgttcattccttccctgacctcagtacccatccgtcaggagcggagtaggactctggagagcaccgtatcactggagggcaccgtgtcttcgcaggctcacctgtggatggagagccgtggggtgagctgacacctttcaatgccccctggttgttcttccccttgttcagcccattgcacccggtacctgcccccatccccaaatcaccgatgggtcctttcccccagcgagaagcatatctctcgaccacctcccgtccgaccccccaaatcgtgatagttgactaaaggacatttttttttcctcctgtgtttttcaacctccaacgttcaagtcaaggaaccgccgataagaagggggtttgagtacccggatgggaatggcaatggcctagcttttattttaggggcaaagagaagaagggcccccgtcagattttaagttgttcagtttttggcacagggtcgggaccctgagtattgagctctggtgaataaaaaggttttctagtcgtctttg

SEQ ID NO: 1204 - DNA, 1407 bp, Homo sapiens
  source 1..1407: mol_type = genomic DNA
atgcgcgcctcaccctgcatctcccagcccgcagccagctggcatcctagaccctctgccctgcgaccaacagccgggagcggaccagacaccagaactcccggaacggttgaagacggttccgctccctgtcccgcctttcgcagcccagcagtttcgccctgcggagaggagccttgctgtttccaaatctctcctgctgaagagacattggagctagggcggctagtttcacctggtaattgtgacaccctgtctcctcgagctgcaggcttttatgcttgtcatgttcgaagtttgataccttgcagatcaacaaagggccggtggcctctcactgcctccgcggcagggttgtcaagtttttcaggttaagtactgcacgactactcgcttctgaaactgatagacactgcctcagctccgtgcagggcagacgcacaagagcagaatctccgtgggacatctctctggagcatcaatattactgcagtatttggaagaaacaaatttaaataagttctaaggtgaagaatggaacatttaagacaagtctggaaagtcatctgcctttaataactgtcgtttgtccttaacgtcagactttctccaagaccaaaactctaagaacttatttccattcttacaaatagtaaaaatgataaatcatatcaagtcaattgaaagtcctgcctgctgctttcctaaattgcaatatggccttggtatggttttatttgtacttttgtgggggattcgtggatctttagattaaaaaaaaaaaaataggtttttgaacaatttttgcaagtttgcagctgttagttattgatttatttttccaacccatctaattcttctgtctctctcctctcctcaggctcaataattccatgggtctctaaggctgtgtttattttctttaaattttgttgatttacttttatactccatttgattttttctatctctcaccttttctcagactcagtcatcccacaggtctgtaaggctctgttcattttctttaaacttcttttttttttcctctcctcagattggataaattatattgctatgtctctgtttctgaactatagaaaagctcaaaattattatttttatttctcattttttatatggctattttttctctgctgatgtttcacatctattcatttatgagaatattttcctttgccctcatgagcgtgtttataatagctgccttcaaattcttgtctgccgtttacatcttggacatcttggagatggctactgcctgctttttatcttgtgtatttattacattttcacgtgtcttcacgcatcccttgaattggaaattgtgccctggagactgtatacaagactggattaaaaagactggattctgttttgtccctg

SEQ ID NO: 1205 - DNA, 2495 bp, Homo sapiens
  source 1..2495: mol_type = genomic DNA
gcgtcggtccaggcggcgcgcacggtatggcggcggcggcggcggcggcggcgcgcgcctgagaagaggggacgccagcccggtcaggcctcggcgcggcctacacgctccgctcgctcgctcgctcccgcctcccgccccgcgcccggccatggcggagccgtcgtccgcccgacgcccggtgcctctcatcgagtcggagctgtacttccttatcgcccggtacctatcggcgggcccgtgtcggagagcggcccaggtgctggtgcaggagctggagcagtaccagttgttgccgaagagattggactgggagggcaacgagcacaacaggagctacgaggagttggtcttgtccaataagcatgtggctcctgatcatcttttgcaaatctgccagcgcatcggtcctatgttggataaagaaattccacccagtatttcaagagtcacttctttacttggtgcaggaaggcagtctttgctacgtacagcaaaaggtaccttaatttgaagaagtgttctgctttgtattaatagcctaataattattataattgtgaagtaatgtaagcattgtggaagaaaggtgataatgtaactataaatcatgctgtggactataaaattctctgcatttagcatagaacattgaattttattacataagtgtttaatgggtccttctgcattaaaaagttgataaagatatagatgttaagctaaaaagcttgaatttattctgagatgttgtttgaggttttatcaatgtgagttcttaattttccattttgtagctcactcataacttcattgaatgtaattgtatgtgtctaataaactctttaaatgctagaggtatttcatttgatatttagcttctgaaagccctttgttataaagggaagtgattttctaaatttggtagcagcttgaaaacaagcaccacaaatgtaaaactgcatggttctttttttactaatttaatttttttgccaagttatgtgctagcaaaatgtttgaaattgctattctttttctgttagcttggtatatatgacttagactaagtatatgtatgtgatataatatatgtgtacatgtggctaaactgctaatgggcaaagattgttggttcttctgatgctgagtatacatcaagttcatcccatgattattttttattacgagctattgctgatgtgatgctactcttagctgcaccaccagtataaagcttaactgagaaagaacacccctccctcttagttccgtgccagactggtttgttagctttagttgtttcttagtgctctagccatgtcaccctgtggcactaatcaggacactgtttatattcttcctcttctgtgtccctattcactttgtaattattctattttagctggttatatggtagttaattggtagcctgttttcctttgttttctttacttgtgtcaagctccatgtcgttgttttgtgatgagcagtgatttagaactggccagaccttagaagagtcttcagcaagctgccctagggtaggggcgtattctctgtttgttttgtactggtaccccaggaggatgccttgtaactgctctttggtcatgatagtggtaatgaatccattcatgtaaaatgcaatatgtctgttagtttggggcacccgaggctcagtagaggtttagtatgatgccttccctttcttctttgagttatgaagaaactaatttctggcacagtgtgactgcttcaaacctatgttctgctgctatctcctatagaggagggcagacttttttttcttagtgcatttgctggtaggtcaaggagggatggactttgaattagtgttcagagtcacagatcctacgtatgtgctcttcagtagaggattttctgtgatcctacaatgaagggaaagctatataatttattggtacttcctaaagatagagactaaagtcatggtagtattggccaaattaattttaaaactgaacaagtcatgaattttcatataaatcaaagaactttttccttataaaagcttccatttttgaaaagttggatcagttgtaagacctttcatctttagtattgtatgatataattctacattgaaaaataaacacttggcattaaatgggacttggagtcaaaagatctggttttatggtccatcttttaccaatcatttgctgtggatctctttaaaggtcctggaacctttgagcctcagttacctcacttgtaaattggcaaaaatacctacctcacagggttgttgtgaggattcaatgagctaatgtatgttgaaagcactttgtgaattgtaaagtgctacacaaatgttagttgttgttgctgctgtatctgagatgtcttaattttctttttcttcagaaatagtctaataaacctccagggcttttctgttaaagtatactagttggtaaaatgttgaataaacagtttattacaatata

SEQ ID NO: 1206 - DNA, 3332 bp, Homo sapiens
  source 1..3332: mol_type = genomic DNA
atgatcccaaagagcctggtccaggcagcggaaacccagaggggtctctgcgagccaggagggaaaggaagagaggggagaagtggaggaaaaggggagacacgccccagaggagttggaacgcaggagggaaaggggaccatacccggtagcccgagggaaaaacgaggcgagaggggagaaggcgaccccgcgctgctacccgcggaagatttatggcgcctcccgggttccaaggacaggctgcgttcgtcgctgctgccaccgccgggacccccttcttctgactccgggcccggacccccctcctctcactcagggaaaaccgcgcagggacccaggaccctcaactgggccagaaagcaaagtgcaaggaccagcagcaacttgtgtgcctggagccttgcaatggctacgaagatggctgagattccttctagcccatatgagccgggacagcgaggcatgaaggatactcagagaggtgatgcccctcaaagaggaagcccagagccccgaatcctgcagttggcccgagtgggaaacgtatatctgaaggaggaaagctcaaggagtgggcgactggaagctaagaagtggatcccaacaaagttccttgagaacctctctgtcccacacgttgacctcggtggaaaccagctttggagcggcggcatggaggctctcaccactcagctggggccggggcgcgagggcagttcctcgcccaactccaagcaggagctgcagccgtactcgggctccagcgctctcaaacccaaccaggtgggcgagacgtcgctgtacggggtgcccattgtgtcgctggtcatcgacggccaggagcgcctatgcctggcgcagatctccaacaccctcctcaagaactacagctataatgagatccacaaccgccgcgtggccctgggcatcacgtgcgtgcagtgcacgccggtacagctggagattctgcgtcgggccggggccatgcccatctcgtcgcgccgctgcggcatgatcactaagcgagaggccgaacgcctgtgcaagtcgttcctgggcgagcacaaaccacccaagctgcccgagaacttcgccttcgatgtggtgcacgagtgcgcgtggggctcgcgtggtagcttcatccctgcgcgttacaacagctctcgtgccaagtgcatcaagtgcggctactgcagcatgtacttctcgcccaacaagttcatcttccactcgcaccgaacacccgacgccaagtacacgcagcccgatgccgccaacttcaactcctggcgtcgtcacctcaaactcagtgacaagtcggccacagacgaactgagccatgcttgggaggaccgcggacttggcctggcgactggagctagtggcccggcgggcccaggagggcccggtggcggcgccggcgtacgaagctacccggtgatcccggtgcccagcaaaggctttgggctcctgcaaaagctgcccccaccacttttcccccatccttacggcttccctacggccttcggcctatgccccaaaaaggacgacccggttttaggcgcgggcgagccaaagggcggctcctacgtgtcggccttccggccggtggtcaaggacaccgagagcatcgctaagctctacgggagcgcccgggaggcgtacggcgcggggcctgctcgggggccgggacccggcgctgggagcggcggctacgtgagcccggactttctgagcgagggcagctccagctacaattccgcctcgcccgacgtggacaccgcggacgagcccgaggtggacgtggaatccaaccgcttccccgacgacgaggacgcccaagaggagaccgagcccagcgcacccagcgcagggggcggcccagacgctggccggcccgcatttggggacttggcagccgaagacttggtgcggagacctgagaggagcccgccaagcggcggcggcggctacgagctgcgagagccttgcgggcccctaggaggccccgcgccggccaaggtgttcgcgcccgagagggatgagcacgtgaagagcgcggcggtggcgctggggcccgcggcctcctacgtctgcacccccgaggcccacgagccagataaggaagacaatcactcgcccgccgatgatttggaaacgaggaaatcctatccagaccaaaggagtatctcccagccaagtcctgcaaatacagacagaggcgaagatgggcttaccttggatgtcacaggaactcatttggtggagaaagatatcgagaacctggccagagaggaattgcaaaaactgctcctggaacaaatggagctccgcaagaagctggaacgggaatttcagagtctcaaagataattttcaggatcaaatgaagagggaattggcttatcgagaagaaatggtgcaacagctgcaaattgtcagagataccctgtgtaacgaactcgaccaggagcggaaggcgcgctatgccatccagcagaaattgaaagaagcccacgacgccctgcaccatttctcctgcaagatgctgacgccccgccactgcactggcaactgctccttcaagccaccgctgttgccctagggccggcctggccgcacccctgcgccctcaagccatgctgctccttgtaaatacccgctgctgcggtggccctgagcgaggaacaagccattcggacccgaccgatgtaaatacagccgcccgtccgcccgccttcctcccgggctccccggccttgcccgccccctcccgggcgtccctgtccagggccccggcttggtttccaagtgtaaataccgcctcgcgcctcaaatccccctaccccgtgtgaactctagggcatcggacctcaaggggttaactggacagacggggggcgggaggggagagcgccccctcccattgtatagccttgaacccgattgtgaatacaatgtagcaacttcgctggcgcctgccccgcactccccgtcccgtccacttctgaaactcctgttcctaatgacaaagtggctatgtgcaatggatataaatgtactgtgagtctctcggttcagtattaggttcactttaatttatttatgctgtaagttatttttgcttccttctcctggacccacttccagtcccgttttgcattcccctttggattttgctttggctattttttgttgtaacctcttgatgtaacagcactttaaaagggcgacaactgactcacgagatggcaaccacctggagcctgtttggggagaccaccctgtacccgtgactttcgtttttaataataataataataataataa

SEQ ID NO: 1207 - DNA, 5512 bp, Homo sapiens
  source 1..5512: mol_type = genomic DNA
gcaggctgcggacccagttgcgagaggcctattatctgctgatccaggccatgcacgacctgccccctgactcgggcgcgcggcggggcggcaggggcttggcggatcacagcttccccgcgggagcccgggctccgggccagccgccttcccgcggcgccgcgtaccgccgagcctgcccccgggacggggagcggggaggcggcggacgccctcggcagcaggtgtccccgccccggtcgcctcagagggagccgcggggaggccagctgcggactcctcggatgcggccgtcctgcagcagaagcctcgagagcctccgggtgggtgccaagccgcctcccttccagcggtggccgagcgacagctggatcaggtgcggcgcgcaccgggactgggacgagcccccgccacgtggaggcaggatggacggctggagtggggaccgcgcccgggcggctgcacccaccggcctccagcctccaggctgcaaggaccacggctgctcctcgggaagccctttcagggatccagcggggtcctctgtgatacgcagtggcaaaggagaccgccaggaaggcccctccttcctcaggccgccggcagtgacagtcaagaagctgcagaagtggatgtacaaagggcgtctgctgtccctgggaatgaagggtcgtgcccgtgggacggctcccaaagtcacaggaacgcaggcagcctccccaaatgtgggcgctttgaaagtgcgtgaaaaccgtgtcctgtcggtgcctccagaccaaagaattacgctgacagatttatttgaaaatgcctatgggtcttcaatgaagggaagagaacttgaagagctgaaggataatattgaattcagaggtcataagccacttaacagcatcactgtttcaaagaaacgcaattggctatatcagagtactctgaggcctcttaatctggaagaagaaaataagaaatgccaagatagaagtcatttatccatctcacctgtgtctctacctaaacatcagctatcacagtctttcctcaaatcatctaaagagtactgtacatatgtggtatgtaacgctacaaactcttcattatcgaaaaactgtgctttagattttaatgaggaaaatgatgcagatgatgaaggagaaatatggtacaatcccattcctgaggatgatgaccttggtatatcaagtgccttgagttttggtgaggccgactctgctgttctgaagctccctgctgtcaatttgagcatgttgtctggcagtgacctgatgaaagcagagcggcatactgaagactcactgtgctcttccgaacatgcaggtgatattcagaccacacggtcaaatggaatgaatcctatacatcctgcccattccacagaatttgtgcagcagtacaagcaaaagctaggacacaagacacaagaaggtataatggtggaggacagtcccatgttgaaatctccttttgcaggttctgggatcctggctgctacaaatagtactgaattgggaattatggaaccatcttctccaaatcctagccctgtgaaaaaaggcagttcaattaattggtcattgccagataaaataaaatctccacgaactgtgaggaaactttccatgaaaatgaaaaagttgccagaatttagccgaaagctaagcgttaagggaacattgaattatataaacagtccagataatactccttctttgtctaaatataactgccgagaagttcatcatactgatattctgccctctgggaacacaaccaccgctgctaagaggaatgttataagccgataccatcttgataccagtgtatcctcccagcagagctaccagaagaaaaactctatgagttctaagtattcctgcaaaggtggttaccttagtgatggagactcacctgaacttacaactaaagctagcaaacatggatctgaaaacaaatttggaaaaggaaaagaaataatttcaaatagttgtagcaagaatgaaatagacattgatgcttttaggcattatagcttttctgatcaacctaagtgttcacagtacatatctgggctcatgagtgtacatttctatggtgctgaggatttaaaaccacctcggatagattcaaaagacgtcttttgtgcaattcaggtagattcagtaaacaaagcaagaacagctttgctcacatgccgaacaacatttttagacatggatcacactttcaacatagaaattgaaaatgcacaacatttgaaactagtagtattcagttgggaacccactccaagaaaaaatcgagtttgttgtcatggaactgttgttcttcccaccttatttagagtgacaaagactcatcagttggctgtcaaacttgaacctagaggtcttatttatgtgaaagtgactcttatggaacagtgggagaattctcttcatggactagatataaaccaagaaccaataatatttggagttgatattcaaaaagttgtagagaaagaaaatataggactgatggtgccccttctgatacagaaatgtattatggaaattgaaaagagaggctgtcaggtagtaggcctgtatcgattatgtggttcggcagcagtcaagaaagaactgcgagaggcttttgagagagatagcaaagctgttggtctgtgtgaaaaccagtacccagatataaatgtaataacaggtgttcttaaggattatttaagagaactcccttctcctctgataacaaagcagctttatgaggctgtattagatgcaatggcaaaaagtcctttgaaaatgtcatcaaatggttgtgagaatgacccaggtgactctaagtacactgttgacctgctggattgtctgccagagattgagaaggcaaccctaaagatgttgttggatcatttgaaattggtggcttcctatcatgaagtgaataagatgacgtgccagaatttggctgtgtgctttggaccagtattattaagtcagaggcaagagccttccacccataacaacagagtctttactgattcagaagaacttgcaagtgctttggattttaaaaaacacattgaagttcttcattacttactccaactctggccagtgcagcgtttaactgtcaaaaaatcaacagacaatttattcccagagcagaagtcttctctgaattatctgaggcagaagaaagaacgacctcatatgttaaatttgagtggtactgattcatcaggagtacttaggccaaggcaaaaccgattagacagtccacttagcaatcgttatgcaggagactggagcagctgtggggaaaactactttttaaatacaaaagaaaatttaaatgatgtggattatgatgatgtcccttcagaagatagaaaaatcggagaaaattatagcaaaatggatgggccagaagtaatgattgaacagccaattcccatgtccaaagagtgtacatttcagacatatttgacaatgcagacagttgagtctacagtggatcgaaaaaacaatctcaaagatctacaagaaagtattgatactttgattggaaatctggaacgtgagctcaacaaaaacaagcttaatatgagtttttgagattgagggtttttttttgtaatgtcttaaagtttcaaatctgtttttgttttattttcttataccacccacagcgatgttttcatttttttactcttgaaatctttaattaatttttaataagtttatctgattcaattaaaaacactattcattaatacaatttttacttatctcactagaaaacttttctggggatcaataaaacttggacttcttgggatattttactaaatcttgccaactctatggagataactttcaaatgcacttaagaaggttcacataagttattagcccctcaaggtttttctgctttatgggaaccactcttctgtagctgagacagatgtccttttttttgttgttttttgagacagagtctcactctgtcgcccaggctggagtgcactggtgcgatctcaggtcactgcaacctccacctccctggttcaagtgattctcctgccacagcctcccgagtagctgtgatgacggggcccaccaccatgcccagctaattattgtatttttagtaaagatggggtttcaccatgttggccaggctggtctcgaactcctgatctcagatgatccgcccaccttggcctcccaaagtgctgggattacaggcgtgagccactgcgcctggcctctagatgttcttttagaggaacatcacagctgctcagtctgatttgcagtactggtcctggtacactgcaacatcctttggtcaaattttatttgtaatgcaaatgctgctataagaaaatctttttataaataaaagtgaaattatacaagtattaatgttttctgtattaacagtaattatttaagcttataaaaattaaatatttttataatcctgaaactgtatatatttataaatgcatatatgtatagatatcaggatgggggaggggttattgtagaatcacatgtatttttaaagtatatatgtcatgaggccaaaattattatcttaaagtatttttttcagggaaagaacatttaaattaaaggaggaattacataaaaacacttgaacaataatactctagaagcatctgaatagaaataatagactttctttcctttattcacagaaagtcacaatgtcccctgggaaaagtcatcttttaaatttgaaatcctctaactccttaagggattaagtacccagatttctgcactggtgacttagatttaataaatctgctcctgttctatgcatttttatattctgctttgttttaattatttatttgtagtagtacatttataacattgactttataattacccccatttgtttctaaatagtcttgccagcatattacatgttactgatttttaaaaattaacttattttggctaagtatatatacaatgttatagaatcacagtaatgtttgaaaatgtaaatttagaaggcttttgtattaaatcaaaatgtatttttttaacttttatatctacagaatatgtaattttaaaattataaatagactttaagttaccaacttttaagacatggcagccattgaaaaactggcttcctgatgtttttctaaatattaaagtacttaaaatatttctatgcaataaatattgataaacagacattatttaatttgaaaacccattgttaaaaaagataaatatttttatatgaaattttcattttttaaaactttgtgttaacaattcagaagaataccaagagaacatatatattgagtaaacagtcaaaggaaagtactcttgaatgttttataggaaagctgtctcagtttccttccttttgttgctatatcatgtatgaattgaataaattgctctagaaatgtaaaaattttattaaaatatta

SEQ ID NO: 1208 - DNA, 1353 bp, Homo sapiens
  source 1..1353: mol_type = genomic DNA
atggatccggggaatgagaattcagccacagaggctgccgcgatcatagacctagatcccgacttcgaaccccagagccgtccccgctcctgcacctggccccttccccgaccagagatcgctaaccagccgtccgagccgcccgaggtggagccagatctgggggaaaaggccattgaaagcgccccggagaagcgactgacacttgcccagatctacgagtggatggtccgtactgtaccctacttcaaggacaagggtgacagcaacagctcagcaggatggaagaactcgatccgccacaacctgtccctgcacagcaagttcatcaaggttcacaacgaggccaccggcaaaagctcttggtggatgctgaaccctgagggaggcaagagcggcaaagccccccgccgccgggccgcctccatggatagcagcagcaagctgctccggggccgcagtaaagcccccaagaagaaaccatctgtgctgccagctccacccgaaggtgccactccaacgagccctgtcggccactttgccaagtggtcaggcagcccttgctctcgaaaccgtgaagaagccgatatgtggaccaccttccgtccacgaagcagttcaaatgccagcagtgtcagcacccggctgtcccccttgaggccagagtctgaggtgctggcggaggaaataccagcttcagtcagcagttatgcagggggtgtccctcccaccctcaatgaaggtctagagctgttagatgggctcaatctcacctcttcccattccctgctatctcggagtggtctctctggcttctctttgcagcatcctggggttaccggccccttacacacctacagcagctcccttttcagcccagcagaggggcccctgtcagcaggagaagggtgcttctccagctcccaggctctggaggccctgctcacctctgatacgccaccaccccctgctgacgtcctcatgacccaggtagatcccattctgtcccaggctccgactcttctgttgctgggggggcttccttcctccagtaagctggccacgggcgtcggcctgtgtcccaagcccctagaggctccaggccccagcagtctggttcccaccctttctatgatagcaccacctccagtcatggcaagtgcccccatccccaaggctctggggactcctgtgctcacaccccctactgaagctgcaagccaagacagaatgcctcaggatctagatcttgatatgtatatggagaacctggagtgtgacatggataacatcatcagtgacctcatggatgagggcgagggactggacttcaactttgagccagatccctga

SEQ ID NO: 1209 - DNA, 1712 bp, Homo sapiens
  source 1..1712: mol_type = genomic DNA
tgggcggggttatataagccagcggcgggcggaaggcggggcgtgggggtctgtggctgctgggctggcggggcgcaggccgcgggacccgagcccggggaagcgagagagcggaggcgccgaggatccgattcactccctggggagacctatgggccgaagccgtgtaaatgcgttttaagcagaggcctcggctccgcaactgccactcctcctcggggtgttgcacaagtttcgaggtcaccggcgaccccccctagcagcgcgcctggctctggcccccgcgaaggaggacggagtttggagcttgcggcccccacccaccgcgtggcgtccccaggcacgcctagaattctagcacctcaggatcagtccagcccccatttacaattggggaaactgcggctccgaaagggtcagagggtacccgaggtcaagcagtagagagcggactcgaacttaagctcttgctcttaggctgagacgccttgatgtggccaccggctaccctctagtgtgttgcatactttctaaggcggcggctgcagcagcggctccatccagcccgtcagctcctcctgcaaggcatggctggctacctgagtgaatcggactttgtgatggtggaggagggcttcagtacccgagacctgctgaaggaactcactctgggggcctcacaggccaccacggacgaggtagctgccttcttcgtggctgacctgggtgccatagtgaggaagcacttttgctttctgaagtgcctgccacgagtccggcccttttatgctgtcaagtgcaacagcagcccaggtgtgctgaaggttctggcccagctggggctgggctttagctgtgccaacaaggcagagatggagttggtccagcatattggaatccctgccagtaagatcatctgcgccaacccctgtaagcaaattgcacagatcaaatatgctgccaagcatgggatccagctgctgagctttgacaatgagatggagctggcaaaggtggtaaagagccaccccagtgccaagtttgtccagcagaggggcactgcgtgtctcatcaggatggttctgtgcattgctaccgatgactcccactccctgagctgcctgagcctaaagtttggagtgtcactgaaatcctgcagacacctgcttgaaaatgcgaagaagcaccatgtggaggtggtgggtgtgagttttcacattggcagtggctgtcctgaccctcaggcctatgctcagtccatcgcagacgcccggctcgtgtttgaaatgggcaccgagctgggtcacaagatgcacgttctggaccttggtggtggcttccctggcacagaaggggccaaagtgagatttgaagagattgcttccgtgatcaactcagccttggacctgtacttcccagagggctgtggcgtggacatctttgctgagctggggcgctactacgtgacctcggccttcactgtggcagtcagcatcattgccaagaaggaggttctgctagaccagcctggcagggaggaggaaaatggttccacctccaagaccatcgtgtaccaccttgatgagggcgtgtatgggatcttcaactcagtcctgtttgacaacatctgccctacccccatcctgcagaagtctaagaaccactcaccctgctacatgtctctagagtccattcatttcattgccgtgtag

SEQ ID NO: 1210 - DNA, 2989 bp, Homo sapiens
  source 1..2989: mol_type = genomic DNA
tcagtctttcgcggcccgggagctcagcagagctaccagctgccctgttggcttcgctggtcggatcgtcctcctggccccgccaaacaggcggggggagcggccccgactgtggggccatggcagtagtctcctcgttcgccgccgccgctagcctagctgagtcgccggcttctgcgctaggggctcccaccgcctccgcaggctaaggagccgctgccaccaacgagctgtgagggttactatgctccctctttgccgccgtctcctcctcttgcccgcgcaggcacccctctggctgctcagtcctgcctcagtgtcaaaccagaagagaagtaaaattcaacaaaaatttatgtgtggagttccttcttaaaagaagaaaaaagtgattatttagactatggatcggagcaaacggaattcaattgcaggatttcctccacgtgtggagcgtcttgaagagtttgaaggaggtggtggaggagaaggaaatgtgagccaggtgggaagagtttggccatcttcgtatcgagctcttataagtgccttttccagactgacgcgtttggatgatttcacctgtgaaaaaatagggtctggcttcttttctgaagtgttcaaggtacgacaccgagcttctggtcaggtgatggctcttaagatgaacacattgagcagtaaccgggcaaacatgctgaaagaagtacagctcatgaatagactctcccatcccaacatccttaggttcatgggtgtatgtgttcatcaaggacaattgcatgcacttacagagtatatcaactccgggaacctggaacagttgctagacagtaacctgcatttgccttggactgtgagggtaaaactggcctatgacatagcagtgggcctcagctaccttcacttcaaaggcatttttcatcgggacctcacatctaagaactgcctgataaagagggatgagaatggttactctgcagtggtagctgactttggcctggctgagaagatccccgatgtcagcatggggagtgagaagctggccgtggtgggttccccattctggatggcacctgaggttctccgagatgagccctataatgaaaaggcagatgtgttctcttatggtatcatcctctgcgagatcatcgcccgcatccaggccgatccggactatcttccccgcacagagatggatcccaaactgcgcccatcttttgtggagattgggaagaccctggaggaaattctgagccgcctacaggaagaagagcaggagagggataggaagctgcagcccacagccaggggactcttggagaaagcacctggggtgaagcgactaagctcactggatgacaagatcccccacaagtcaccatgcccaagacgtaccatctggctgtctcgaagccagtcagatatcttttcccgtaagcccccacgtacagtgagtgtcttggacccatactaccggccacgagatggtgctgcccgcacccccaaagtcaacccttttagtgctcgccaggacctcatggggggcaagatcaagttttttgacctgcccagcaagtctgtcatctctctggtatttgacctggatgcaccagggcccggaactatgcccctggctgactggcaggagcccctggccccacctattcgccggtggcgttccttgcctggttcgcctgagttcttgcatcaagaggcttgtccatttgtgggccgggaagaatcgctatctgatgggcccccaccacgcctaagtagtctcaagtacagagttaaagagatcccaccattccgggcatctgccctaccagctgctcaagcccatgaggctatggactgctccattctccaggaagaaaatggttttgggtccaggccccaggggaccagtccatgccctgcgggtgcttctgaggagatggaggtagaagaaaggccagcaggctcaactccagccaccttctccacctcaggcataggcctgcaaacccagggaaagcaggatgggtgagggggtttagtccctgcctcaccttggggatggaccttcagctgaaaccatatggccccctaggtgcacagccttgattcttccctggagcctacagagcaggcaggctaggccaagccaggctcaacttctgggctcccagtgcccattggctgtgtatgacgggaggcagcagtgagaggccttcctagttagggccaacagctgataccaagcctctgaaatccagcaaggaggtctgcctcccaccagaccctctccagtgtacttccccagataggaccagaggatgtctagttctaggctgagctggcaggcagctattaccccggttctttccccaccccaggtctgtctcttgccttttcttggggcatataagctactgagtggaacatggagctgatcaagaggccgtaatggtcatggctgtttcccagacctgaatattggggtgcttcttgccagtattctaagacatttgagtaattgctgtttgcacttactgcatggtcagaccacgtcactacatttctatgcaaggggacagcaaggcagcgtggtggtcatggctcttagctaacctattcaaagaccttttcctgttgattaatctattttcatatttataaaggagtcttaatgttctgccccataagactttcaaccttgtggttgggagtggggctggttttgtaggccctagggcctgcttctatgtatttatcaacatgtgatacattcaattggttaaatggtttatacagggactgatttgcttcccttcctgccatggctggagctttgggaacagtctgtccttacagagctgcaataagaaataaccaaagatgaagctggtcaaatattttcataacttgcttctgttgatttttttttttgtaaaactttcccaagacattttcagacttaaaaataaagtcagtgttacaggtg

SEQ ID NO: 1211 - DNA, 814 bp, Homo sapiens
  source 1..814: mol_type = genomic DNA
aacagggcttcgtcttctttgcagagccatgggcagcaggaagaaggaaattgccctgcaggtcaacatcagcacccaagagctttgggaggaaatgctcagttccaaaggactaactgttgttgatgtctatcaaggctggtgtggcccctgcaaacctgtggtgagcctcttccagaagatgaggatcgaggtcggcctggaccttctgcactttgcattaattaaagatgaggctctttctgatgaagatgaatgtgtttcccatggaaagaataatggtgaagatgaggacatggtttcatcagagaggacctgtaccttggccatcattaaaccagatgcagtggcccatggaaagactgatgagattatcatgaagattcaggaagctgggtttgaaattctaacaaatgaagagagaaccatgacagaggcagaagtgcgacttttctaccaacacaaagctggagaggaggcatttgagaagctggtacatcacatgtgcagtggaccaagccacctcctgatcctcaccaggactgagggcttcgaggacgtggtcactacctggcgaaccgtcatgggcccccgtgaccccaatgtggccaggagggagcagccagaaagtctccgagctcagtacggcacagaaatgcccttcaatgccgtccatggaagccgggacagagaagatgctgacagagaactggcattgctcttccccagtttgaaattttcagacaaagatacagaagcccctcagggtgagtccagtacacagccaaggttgaagatcactgacctagactaa

SEQ ID NO: 1212 - DNA, 3328 bp, Homo sapiens
  source 1..3328: mol_type = genomic DNA
agtgaagcctgcccacttgtgaagacggagactccccgctccccggatgagaagcaagtgcgtcagagggaagcagcccaactggttgctgagttgtggaaaataagctgggggagaaaaaacacttcttttaaaaatcaggttagggatgaatgtgcagggcgtggttcctgtgcaattatctgctctgctggctgcggggctccctgcttctcccgggccgctgtgtcaggcttgtgcctgttgctcctcccctccactcctccccctcctcctcctccgcctcctccccctcctcctcctcacaggtgtgtctctagtcctcgtggttgcctgccccactccctgccgagacgcctgccagaaaggtcacctatcctgaaccccagcaagcctgaaacagctcagccaagcaccctgcgatggaagctgcagatgcctccaggagcaacgggtcgagcccagaagccagggatgcccggagcccgtcgggccccagtggcagcctggagaatggcaccaaggctgacggcaaggatgccaagaccaccaacgggcacggcggggaggcagctgagggcaagagcctgggcagcgccctgaagccaggggaaggtaggagcgccctgttcgcgggcaatgagtggcggcgacccatcatccagtttgtcgagtccggggacgacaagaactccaactacttcagcatggactctatggaaggcaagaggtcgccgtacgcagggctccagctgggggctgccaagaagccacccgttacctttgccgaaaagggcgagctgcgcaagtccattttctcggagtcccggaagcccacggtgtccatcatggagcccggggagacccggcggaacagctacccccgggccgacacgggccttttttcacggtccaagtccggctccgaggaggtgctgtgcgactcctgcatcggcaacaagcagaaggcggtcaagtcctgcctggtgtgccaggcctccttctgcgagctgcatctcaagccccacctggagggcgccgccttccgagaccaccagctgctcgagcccatccgggactttgaggcccgcaagtgtcccgtgcatggcaagacgatggagctcttctgccagaccgaccagacctgcatctgctacctttgcatgttccaggagcacaagaatcatagcaccgtgacagtggaggaggccaaggccgagaaggagacggagctgtcattgcaaaaggagcagctgcagctcaagatcattgagattgaggatgaagctgagaagtggcagaaggagaaggaccgcatcaagagcttcaccaccaatgagaaggccatcctggagcagaacttccgggacctggtgcgggacctggagaagcaaaaggaggaagtgagggctgcgctggagcagcgggagcaggatgctgtggaccaagtgaaggtgatcatggatgctctggatgagagagccaaggtgctgcatgaggacaagcagacccgggagcagctgcatagcatcagcgactctgtgttgtttctgcaggaatttggtgcattgatgagcaattactctctccccccacccctgcccacctatcatgtcctgctggagggggagggcctgggacagtcactaggcaacttcaaggacgacctgctcaatgtatgcatgcgccacgttgagaagatgtgcaaggcggacctgagccgtaacttcattgagaggaaccacatggagaacggtggtgaccatcgctatgtgaacaactacacgaacagcttcgggggtgagtggagtgcaccggacaccatgaagagatactccatgtacctgacacccaaaggtggggtccggacatcataccagccctcgtctcctggccgcttcaccaaggagaccacccagaagaatttcaacaatctctatggcaccaaaggtaactacacctcccgggtctgggagtactcctccagcattcagaactctgacaatgacctgcccgtcgtccaaggcagctcctccttctccctgaaaggctatccctccctcatgcggagccaaagccccaaggcccagccccagacttggaaatctggcaagcagactatgctgtctcactaccggccattctacgtcaacaaaggcaacgggattgggtccaacgaagccccatgagctcctggcggaaggaacgaggcgccacacccctgctcttcctcctgaccctgctgctcttgccttctaagctactgtgcttgtctgggtgggagggagcctggtcctgcacctgccctctgcagccctctgccagcctcttgggggcagttccggcctctccgacttccccactggccacactccattcagactcctttcctgccttgtgacctcagatggtcaccatcattcctgtgctcagaggccaacccatcacaggggtgagataggttggggcctgccctaacccgccagcctcctcctctcgggctggatctgggggctagcagtgagtacccgcatggtatcagcctgcctctcccgcccacgccctgctgtctccaggcctatagacgtttctctccaaggccctatcccccaatgttgtcagcagatgcctggacagcacagccacccatctcccattcacatggcccacctcctgcttcccagaggactggccctacgtgctctctctcgtcctacctatcaatgcccagcatggcagaacctgcagcccttggccactgcagatggaaacctctcagtgtcttgacatcaccctacccaggcggtgggtctccaccacagccactttgagtctgtggtccctggagggtggcttctcctgactggcaggatgaccttagccaagatattcctctgttccctctgctgagataaagaattcccttaacatgatataatccacccatgcaaatagctactggcccagctaccatttaccatttgcctacagaatttcattcagtctacactttggcattctctctggcgatggagtgtggctgggctgaccgcaaaaggtgccttacacactgcccccaccctcagccgttgccccatcagaggctgcctcctccttctgattaccccccatgttgcatatcagggtgctcaaggattggagaggagacaaaaccaggagcagcacagtggggacatctcccgtctcaacagccccaggcctatgggggctctggaaggatgggccagcttgcaggggttggggagggagacatccagcttgggctttcccctttggaataaaccattggtctgtcacttctcttgta

SEQ ID NO: 1213 - DNA, 6210 bp, Homo sapiens
  source 1..6210: mol_type = genomic DNA
atgaaaaagaagcagacggtgcagggcaccttcagcaaactcttcgggaagaagcacaccacgacccccagcacctccctctacgccaccaatccgccctggatcttcacccaggaggccccggaggaggggaccgggggcttcgatggcatctattatggagacaatcggtttaacacagtgagcgagtcaggaacagccacgctgaaagctcggccaagagtccggcccctgctgaccttccttccgctgaatgcccaggaaaaccatgggctggctgtgcccaccccctcggttccagatgattttgcagacaaagaagtgacaggtaccagctcactagtcaatggcaacctccgactgtacagctctgtgggtgacctgaggcctggacaatatggccaggatctactcatccccccacctcccccaggcccagccccagggccccctcaggacatttcagaacctccaggggggtcgccactgccatctccaccttccacagcacccccaccacctcccctgctgctggaacccccacccccgcccagcatggccccacctccacccccagtattggaggccctatccccaccacacactctttcctccccatccatacccacccctcctgacttcattccccctgccccacccttggcctttctagcccccccaccgcctcctgtgccagccccagcacccccagctccagcatctcctcacacagtggggactcgtctctttccccctgggggtgtcaccaagtggaaatcagatgtagcactgaatggcaggcaggcagaggccaccagagccagccccccgagaagccctgctgagccaaaggggagcgccctgggacctaacccagagccccatctcaccttcccccgttctttcaaagtgcctcccccaaccccagtcaggacttcgtccatcccagttcaggaagcacaagaggctccccgaaaggaagagggggccaccaagaaggctcccagccgactcccactgcctcccagcttccacatccgccccgcctcccaggtctacccagacagggcccccgagccagactgccctggggagctcaaggccacagcaccagccagcccaaggcttggccagtcccagtcccaagcagatgaacgagctgggactccgcctccagcccctcccctgccccctcctgcaccccccctccctcccccagcacccccacttcccccagctgcacctcctttgccctgtgctcagaaggcagcccatccacctgctgggtttacaaaaacccctaaatccagctctcctgctctcaaacccaaacccaacccccccagcccagagaacacagcgtcttcagcacctgtggactggagggaccccagccagatggaaaagctgcggaacgagctggcagcctatctctgtggctccaggagagaggaccgattcctcagtcacaggccaggcccaacagtggcccctcagagcaaggagggcaagaagggcccccgcctgcctgagaaggagactctcctgagcctgccagcaaaggacactcccccaggtgttcctgaaaagagtcttggcggcagcagcctgacagagacagaggctgcccccagcctgaccctgccctctgtggactacattccccaagactctccaactcccagtgtgcggcagatccggaatgagctggaggcccggctctcctcagcagcagagaaggaggctaagcccagcataggatctctgccccctaagcctcggctagaagggggaagaatttgtgaaaacggggctgatgatgacaaactctccaagcctgtggccaagaatctgccacctcaatccaccaccctgctgccaactacatcactccagcccaaggctatgttgggaccagccataccacccaaggccacacctgagccagccataccacccaaggctacactttggccagccacaccacccaaggccacacttgggccagccacaccactcaaggccacatctgggccaaccacaccactcaaggccacatctggccctgccatagcatctacagccacaactctgcccaccaccacatcccaactgatggcagagaaggactcaggcccagctggccagccagagaagccagcatctcaagaagtttccactccctcccaggcaaggggagaggggtccccctcagaggccactaggctgcccacacagggagcccgctcatctgcagccttcccaccaaagacatctcctggtggaggagaggtgccatgtctctacaagccccactgccaccagagcagcctcagccgtgaggttgctgtggtgatgcccaccctggccagaggaggggctgcagggccaggggagcccgtggaggtgaaggagcccccagggctgccagccaagcctcctgcctcggcccagcccactgatgaactcctcaggcacccggtgactggggaggtggtggagcggggctcgccgatggccctgctcctggcggccaggcagagggctcagaagggaaggtctgtaggggctgccctgggtcggtcctctctgccaggaagtctccgtgaccacagccaccaagccgaggccagctctgacagcatcttccacagccagggcacgcccaactccttcactgtggtgcccaagttacccaaggaggctgagaaggactccccgctgacgaccgaaatacccaataagtgggggccgcggctgggaagagacgcagagggcacagagctgagccgcaggcacaactggacaaagccagagccccaggcccctgtggcctgggaaagagtagctccctccaacctcccccagggccacccgctgcccaagtccttctcctccccaccttctccttcgaacaagagggaggaggaggaggaggagttcaacttcgaggtcatcccaccgccgccagagttcagcaatgaccctgagcccccggccccggccctccagtatctgggccgccagagctcccctccccggaacaactactcagacttgaggcagctcccgaacgctggccccggggcgcccccggctctcggcttctcgcgctttcccgcgggcgcgcgctacgccggggctgggggcctggagcgcttctcgggagggggccgctcgctcataaagaagcgcctgtacgtcggggagccgcaccgaggcccagggctaccccacggtggcaccggccgcagcctgagctctcccaactgcttcgggccgcagcccggaggccccgagatgcggcgcgtgaactcggcgggtcgcgcgccccccggaggcctgcacgcgccgaggctgtccctggagggcgccgcccggggcgccgcggaggccaagcacaaagcgcccggcagcgccgactacggcttcgccccagctgccggcaggtctccctacaccaccacccgctatggaagccccatcaacacgttcaccgtgaggcctgggacccgccatcccatctcctatgtctgctcaggggcccatcggaaagccacctcctgagccaggggttctcttagctctactccaacaaactgtgtctttaaggatctgggcacttgtttcttgtggggggtgggaggtacacagcaggtgttgggcgacctgactcagacacagaggagtctttgatccccaaagaccaacgatgagaagcagtggcccaggaagaccgagagtgggcttctgtttcccaaagcgctggtgtgactgtggactgtttacacgtggggggtgggaggggaaggagggtagagagaaggaaccattaaggacctgggcgctgagtttctgctctctggtactatctgctttagcaagagttatttaaaacagttttacaagcacggcctactgagcaggttctgaaagcaaggggtggggcactgactgaactggaacccatcgagatagctgtgattgcctgtcaggcccttgcaaagggctgaggcccagctctgtctggtgggtgtgcagggcaccgaagggagatctttagcctccatcacctgccatcccaagcaagagtggacacctggggttcctagccgcattgaggtgggaccaggaatgtgtatgtataacatgtggagaaggaccatgtgtggggtggggagtgaagctcccacatgtggaatggaagccctttgcattggccaagggcagaggtgggagattgatggttcatttttccttggccctagcccttagctacagggaggcctagagagaggacacttggcaagtttaggatgggaaacaaggttaagcctggctttgctattcagacctgtgcagccctgattttggggactgggcccaaggagccatgagtcttaggcttgacactaggggccttacatggccaggtctcatatgggatttggagaaggcatttttcctaacactgatactacaagtcaccaatactcttgatgccttaagatgctagaaagccttggagagtggaggcagcagagatgggaatggaggtctgaagaagcttgctgctgttggggaatgtgtttgggaaagtcaagagtggtaggattggttggctgggcgcggtggctcacacctgtaatcccagcactttgggaggccgaggccggtggatcacttgaggtcagaagttcgagaccagcctgcccaaatggtgaaaccccatctctactaaaaatacggaaaaaaaaaaaaaaagagtgctaggattgggccagttaagagcaggggagacctggctgggcatggtggctcacacctgtaattctagcactttgggaggctgaggcgggtggatcatgaggtcaagagattaagaccatcctggcctacatggcgaaaccctgtctctactaaaaataaaaaaatgacctgggcatggtggtgggcgcctgtagtcccagctactcggggcgctgaggcaggagaatcgctcgaacccaggaggtggaggttgcagtgagccgagattgcacaattgcactccagcctggcgacagagcgagactcgtctcaaaaaaaaaaaaaaaaaaaaaaaaaggagcaggggagacctatcagtagggtgaccacgtgtcctttgcctgggcagtccaggtttatgcttgttttccagtgaattagacccccttccacttttcaaaaaagtcctggtttagatgctgtgatcaccaaacatatcaggaaacaatattccttggtcttgcttccctatcttcaggtactggtgggccaaattcctgggaccaggtcaaggtgggctgcctcagtaagaaggaaggactggagagtgcccatttcagaggagcaggctggtgggggccagccagaaagtagttccctttggggggaagatgttggacctttattatttgtggtaaccagccgaggctggttgtcaggacagcaggtgagccactttagggaagaaagtgcaggggtgggtggatgcccagattaccaaggccagccaccctgatggggtagggtctggttatctgtgttcaagaagcaaatcccaccccagccccagcactagctctctatgtatgtattttccctgtacaatgttttataaaagagatcattaatttatctgctatgttaaggctcgaggggtggggcgtagactctcagctgtatattgctctggggtgggcagggaaggctgagtctcacttgacttggaagataaacaggccagtttggactggcctccagctccgtggctgtgtttgtctaacaaggatttgggtaactactggatacaagccactgtgcttagtatggatagactgccatcagctcacccacatgactcctgttcatggcaagctaatagtctgtctggtggaagaggattgaaaaagcacacaaaaacatcataaattacaaggagtagtaagaaggaaaaaacagggaacgtgagagaataactagcgagtggggagaggagtggatttactttaacagggtagtcagggaaggcctcttgtggtggtgacatactgatttaggcaaagcgtccagcacgtgcctagcgcttagtagttgctcagcaaatggcatctttgggtgatgaatacctcacatttgtatatggcctgtcacagttttccataaagcttttttttttaaggccat

SEQ ID NO: 1214 - DNA, 8361 bp, Homo sapiens
  source 1..8361: mol_type = genomic DNA
actacagacggggtttctccatgttggccaggcgggtctcgaattcccgacctcaggtgatcagcctgcgttgacctcccaaagtgctgggattacagacgtgaaccactgcgcccggcctggagattatattttaaagttattttgaatactccctggaaaagttcttggttcatacttatacccgtaagtcaaaagatttgtcaaatattcaagaacaatcaaacaatcacttaaaaatactgtataaaagtttctatttcggcatactttacttttacttaactaaaatttcaaataaaatgtatccacttttatgatctcaacaagatcggtcattcctatagcggagttgaaaactttcaacttattcacaattatcaaaagaatggagcagcccccacagagacttccagcaatgagttgtaaaatgcagtctgcattaagtagcttccttacaatcatcccgatggtaaaagtgtcaaatttcgcaaacgcctggacaaggaagtgaaatgatcatctaataacgcagttgactcatctgtcaaataagcgagtgggccagggtccctgagctcactaccctcagattctaactccagcttcacatcattaggcgtaagcagccaattgggccgtctgggagccgtgcatcctgggagttatagtttccggctccctccttcagattacaagctccacagagccgcgggaggacggttgcctggtattattagcaagcagcaaatatggcggtggcgcgcgtggacgcggctttgcctcccggagaaggatcagtggtcaattggtcaggacagggactacagaaattaggtccaaatttaccctgtgaagctgatattcacactttgattctggataaaaatcagattattaaattggaaaatctggagaaatgcaaacgattaatacagttatcagtagctaataatcggctggttcggatgatgggtgtggccaagctgacgttgcttcgtgtattaaatttgcctcataatagcattggctgtgtggaagggctaaaggaactagtacatctggaatggctgaatttggcaggaaataatcttaaggccatggaacagatcaatagctgcacagctctacagcatctcgatttatcagacaataatatatcccagataggtgatctatctaaattggtatccctgaaaaccctgcttttacatggaaacatcatcacctctcttagaatggcacctgcttacctacccagaagtcttgctatactttctttggcagaaaatgaaatccgagacttaaatgagatctcttttttggcatccttaactgaattggaacagttgtcgattatgaacaatccttgtgtgatggcaacaccatccatcccaggatttgactatcggccgtacatcgtcagctggtgcctaaacctcagagtcctagatggatatgtgatttctcagaaggaaagtttgaaagctgaatggctctatagtcaaggcaaggggagagcatatcggcctggccagcacatccagcttgtccaatatctggctacagtctgccccctcacttctacactaggtcttcaaactgcagaggatgccaaactagagaagattttgagcaaacagaggtttcaccagaggcagttgatgaaccaaagccaaaatgaagagttgtctcctcttgttcctgttgaaacaagggcatcccttattcctgagcattcaagccctgttcaagattgccagatatcccaggaaagtgaacccgtcattcaagtgaattcttgggttgggataaacagtaatgatgatcagttatttgcggttaagaataattttccagcctctgtacacactacgagatattctcgaaatgatctgcacctggaagacatacagacggatgaggacaagttaaactgtagtcttctctcttcagagtctacttttatgccagttgcatcaggactgtctccactatcacctacagttgagctgaggctgcagggcattaacttgggcctagaagatgatggtgttgcagatgaatctgtgaaagggctggaaagccaggtgttggataaggaagaggaacagcctttatgggctgcaaatgagaattctgttcaaatgatgagaagtgaaatcaatacagaggtaaatgagaaagctggactattaccttgtcctgagccaacaataatcagtgctatcttgaaggatgataaccacagtcttacattttttcctgagtcaactgagcagaaacaatcagacataaagaaaccagaaaatacacaaccagaaaataaagaaaccatatctcaagcaacttcagagaaacttcccatgattttaacccagagatctgttgctttgggacaagacaaagttgcccttcagaaattaaatgatgcagccaccaagcttcaggcctgttggcggggattttatgccaggaactacaaccctcaagccaaagatgtgcgttacgaaatccggctacgcagaatgcaagagcacattgtctgcttaactgatgaaataaggagattacgaaaagaaagagatgaagaacgtattaaaaaatttgtacaagaagaagctttcagattcctttggaaccaggtaaggtctctacaggtttggcaacagacagtggaccagcgtctaagttcctggcatactgatgttcctcctatatcaagtactcttgtgccatcgaaacatccattatttacccaaagccaggagtcctcttgtgatcaaaatgctgattggtttattgcttctgatgtagctcctcaagagaaatcattaccagaatttccagactctggttttcattcctctctaacagaacaagttcattcattgcagcattctttggattttgagaaaagttccacagaaggcagtgaaagctccataatggggaattccattgacacagtcagatatggcaaagaatcagatttaggggatgttagtgaagaacatggtgaatggaataaggaaagctcaaataacgagcaggacaatagtctgcttgaacagtatttaacttcagttcaacagctggaagatgctgatgagaggaccaattttgatacagagacaagagatagcaaacttcacattgcttgtttcccagtacagttagatacattgtctgacggtgcttctgtagatgagagtcatggcatatctcctcctttgcaaggtgaaattagccagacacaagagaattctaaattaaatgcagaagttcaggggcagcagccagaatgtgattctacatttcagctattgcatgttggtgttactgtgtagcatgtcttttgggaggcagatatccacttaacttttcttaaaaatactttcagttgcctttgcttttttttggagggaaatactccctacccctaattttgttactacttatatagaatttgtattcatgtcttatatttttcagattctagatattgagctgagttttcattttgattttgttagctttttacttagctgtaaggtaccaaactatttatattgaaagctatatgcactttatttcttaactgaattgcatcaacaatgttcctgtttctttcatgtactcatttactttcaaaaataagctagaatatattaaagaaaatagaaaaaattaccttaaatatataaataagagaattttggcccttctgtgtctgagaaaattaattatatagcaaggaatgaaatttgataaagcaaatataaatgagaaatatgaggattgtgaattattgaaatttgccagtctccctggtgtaaaatgtttttttaaagccttttttcctcctttcggagtcaaggaaagcctttctataagcaaattaaggaagaaaaggtaggattataagatttctcaatggggatgattaaattgtctcatggaaaacttcagttaatgtcatgcatcagttttaacatatgaagtaaagtgttctatccaggattaaagtcaagtttacttaggcaacacaagaatatttcacttagatatgaagaaaggaaacactagtctccattcacttgaaatactctcatggcaaatatttatcctctcattaagtgctttttcaccctataggtaagcatttttgtgccaacatgttgtcagaaattaatgtatgttcatctcctctgttcctgcttatttttacttatatatttcagcagaaggtccgtggccattcacttcaattttgacctctgtcccatagtgaagaacatttaaagtaatactactggtcgaatatgaatgactttttaggaactactttttgtctaacctgaaaaagttccacatttggaagacaatttaatgatggtgaagaaataataaacctcactttacttgttaaaagggatatatatatatatatatatgtctgcaacttcagggagaaataagattgtgtttgaatattgtaggtagatgcatttgtaattaaggataatatcgtttaacaacatgtatttggtttccctcaacttacagacatacagctatttaaaactatggcaatacttaagcatctctaaatttaggtgctaaatatctattattctgttgtagtcattaggtgcccttctctgaagttatgtaaaataaaagcatctgatccttcaaggataaagttgaggatcacatggtacgtggcatttgttgttattgttttttaaagagatggaggctggctctgttggtgcggtgccatgatcatagttcactataacctcgaactcctggctcaagtgatctcccacttcagcctcccgagtatctgggattataagcaagagccactgctcccagctcatggtatttgttgatagtcataacatttttcctgtatggtaagacgtatttttctcagtttataaatacgtagcactcaggttgagacgacttggattttattcttagaaatccagaatcccttgaaaaggaaatattttctgtttcttataaataaaagagtaatcttactttcagaaggattttccttagtgaaacatgtgtaacattgaatgcatgttaaataaaaatggaatttctaactttttttcaatagtgctaattatcttttctgaatgattttgaatgtcttcttaaatataccctatttttctattttaaagttaagtgcctcacttgctgtccatagttagacaaagaaaaaccaatttccactgcactagtaccaaaatactactttatacattagtttttcataaaagctgctggaatgtcatgattcagtattacctaaatagatttctgctaaaatcctctccctcctgtcttttttaagttatggaaaaacacaactaaattcatttgatcatcagcacttgttagcaggatttccttttttacctttgccttgtttctttagcccacaaatagtactcagcatactttcattaaaaatttggcacaatatgataattgttaatattctgttcttcgtctgtgttttatttaacttttactagtgtttagaagtgcaagaatattaaatagccccttccttaactgtacatattatcttgaatgtagataaaatgaaaatactgtaaattagagtgtaggaaaactggcatagagttaatatattttaatgggtttacattatactttaaaagtaatttatataattaaaatatttggttttaactctatgggctattctttggttggctgaagagggaatgggtctagtaaggtttggaaagttaagctttgaacatggtctttgtgtttttttcctaacaaggaaaggtttagttcagctgtgctattttagtacacatcagttctcttgatttatggaagattcagtttatcaattaagaattcctgcagaagcacagaatcataccatgtaagagttggaaggaagcttaagagatttctgttcgaatctctttgtttcaaagatgaaactaaagcacagcatgttaaatgacttgtctaagttatagctagttagtagtaaataaactgaaaacctatatgctactgtagtccaaaattttattatgtcctcttaatctttacatttagtgagtcagtaaggaaatctctgcatatttctcattctctttgaaagaggaaaaaaacttctaagagagctacaactctatcactcatgacagagttgcttgtagaaaataactaattccttcagaaccctgagtgaattttttctaagaaatgtgacttgattaaaatggtttcaaaagagcaatagtggaaattaaagttttagaaaagagacctggcgtggtggttgacaactgtaatcccagtgctttgggaggctgaggccagaggatcacttgaggccaggagttcaagaccagcctggacaacatagcaagacccccctctctacaaaaaaaatttttttctgaaaagaataagtacattttagagtccatttatttgacgacaggcagtatgacaggttgctgaggtatataaaattttctagagaaatgctgagtttgatgacattttatcttcagttttgtagaacagatgttaaaatgttaactctcctggtgtgcagaaagctgtaatcatgacagttgataatatgcaatttagtttgattttataggtttaattataaaaggcttcacaatatgcatgttttaggaaaatgttcatttatttagtcatataatcgtttgtatatatgtaaataactttattctggaataatgtgggtgccatcttgagcgtgtgtttttatctgttttggattattttttgtatacaaacaccataatactgtattttcctgttatctacttaagtctagttctactttttcccaataatttcaggaaaatacaagcttgagatattatactatctcccttggtattttttgtgtgcaaagtcttagaattggatttataacattgataataaaaatataaaacgtttttcctcgggagttaagatggtaaaaagaaaaaaatagaatgaatatgatcatttctccatcataaaggaaagaagagacttcattgtgtgtgtgttttttttttttttttcgagatagagtttcactgttgtcacccaggctggtctcagctcactgcaacctccacttcctgggtacaagcgattctcctgcctcagcttcctgtgtagctgggattacaggtgtgcaaccacaaggctcggctaatttttttgtatttttagtagagatggggtttcaccatgttggccaggctggtctcgaactcctgacctcaagtgatccacccacctcggcctcgcaaagtgctgagattacaggtgtgagccactgtgcccagccgagacttcattgtttaatgtatatttttattttttccaaacaccagctcgaatcagagtatatttttattttgccacatacctttaaaaggtatttattgtgtcataatgttttaaatgttaaatatatgataccctcattcatgaagtgaagcagaaagggtctgtaaggaacattctaaacatttttaatgatattgcttttactgatcaagcttgttgtgccatattaaaattaaaagtcaaataaacaaagcagtcctcacagccttggaaagaaatagataattgtcttcttaagatgaggtgctttttatctgtggatgaatggaaatcacactgaattttaattcttatttattttagtggatagcaggaatcactctgtagtagttgtgttcattttcttttctttttcttttcttttttttgagagagtctcgctctgtcaccaggctggagtgcagtggcgtgatctcggctcactgcaacctccatctcctgggttcaagtgattctcctgcctcatcctcccgagtagctaagactacaggcacacgccaccatgcccagctaatttttatatttttagtagagatggggtttcaccatgttggccaggatggtctcaatctcttgacctcgtgatccacccagtttggcctcccaaagtgctgggattacaggcgtgagccactacacctggccttgttcatcttctaattaaatatctttgaatgttttgtaataattttaatgttgacaataagagtttaaaaataatttgattttggactgtatttagatttctctttaattttgctgtagaaatagtaaatgatttaaagtggttatgatgtgttttatgaaggcttactattttatattgtacttatttaatttgtatttgagtctgtctaattttaaataaaaggtttatacatttga

SEQ ID NO: 1215 - DNA, 4992 bp, Homo sapiens
  source 1..4992: mol_type = genomic DNA
agccgcgatgccgcgatggagcgcagcccgggcgggcgccggggccggggcccgagcgccaggcggagcgcgagctggagccgcagccggagcccgggccaggccgggggccgggagcgcagggccgggctgctcgtagcggcggcgaccgagccccccagcggctgaggggcttccagcgcccgccggtggccgggacccactaaagcccccgcagccgaggagtgcggggagcccccttccacatccaggatccggcgagcctcggggaagagggggggccctcccggatccgacaccgagcgactcccctgcggggaaagcggagacttcctcggtatttagaagacagcaagccccctacggcaccgcaaggactccccctcctcagtctgggcccccgccccaagacctagaacgcagtgcccccaggccgggattgcgagaaccccctcccaagatccggtcattacaactccacacctcaagacaagaagacccagctcagaacgcccctagatcaggggatcccaattccccccaactccggtacatagaaatcccaaatctaggcagccggggacagcaagagacactctcaccagcaagaagcctcggggatcccccccctaaagctccaggacttgggcgactgagcccctggcggcaccgcttgcaccccggtccatggtcgtggcgccctgagcccccggggccgggcagacgaagaccgcgacggcgcccaggccccctgccgcggcgtccccgcggccccagcccagggagaagatgagcgtgggctgcccagagcctgagccgccccgctccctgacctgctgtgggccggggactgcccctgggcctggtgccggtgtgccccttctcactgaagacatgcaggccctgactctccgcacactggccgccagcgacgtcaccaagcactacgaactagtccgggagctgggcaaaggcacctatgggaaggttgacctggtggtctacaagggcacaggcacaaaaatggcactgaagtttgtgaacaagagcaaaaccaagctgaagaacttcctacgggaggtgagcatcaccaacagcctctcctccagccccttcatcatcaaggtctttgacgtggtctttgagacagaggactgctacgtctttgcccaggagtacgcacctgctggggacctgtttgacatcatccctccccaggtggggctccctgaggacacggtgaagcgctgtgtgcagcagctgggcctggcgctggacttcatgcacgggcggcagctggtgcaccgcgacatcaagcccgagaacgtgctgctgttcgaccgcgagtgccgccgcgtaaagctggccgacttcggcatgacgcgccgcgtgggctgccgcgtcaagcgcgtgagcggcaccatcccttacacggcgcctgaggtgtgccaggcgggccgcgccgacgggctggcggtggacacgggcgtggacgtgtgggccttcggcgtgctcatcttctgcgtgctcaccggcaacttcccgtgggaggcggcgtcgggcgccgacgccttcttcgaggagttcgtgcgctggcagcggggccgcctgccggggctgccttcgcagtggcgccgcttcaccgagcccgcgctgcgcatgttccagcgcttactggccctggagcccgagcgccgcggcccagccaaggaggtgttccgcttcctcaagcacgagctcacgtccgagctgcgccgccggccctcgcaccgcgcgcgcaagccccccggggaccgcccgcccgccgccgggccactgcgcctcgaggcgcctgggccgctcaagcggacggtgctgaccgagagcggcagcggctcccggcccgcgccccccgccgtcgggtcggtgcccttgcccgtgccggtgccggtgccagtgcccgtgccggtgcctgtgcccgagcccggcctagctccccaggggccccccggccggaccgacggccgcgcggacaagagcaaagggcaggtggtgctggccacggccatcgagatctgcgtctgagtcgcctccgccgccctcggacccgggagcagcccgggcccgccccgagccggtgcccggtgcggcggtagggaatggagccacctcgccgcggggcagggggcgcagcggtagactaggcaggacgcggcccggcacctggtccgtccccggcgggctggtgagggggccaccaaagacccctagcgcggcctggtgagcgggggcttggcccagaggagccaagccgcacagacccgagaattcggaggccaccacacaacacacacacacacacacacacacacacacacacacacacacacacacacacacacgccaggagcaagggagctttcgggccacactcccagacgcctccctgagccctggaacccggactcgttgctcctggccttccataccccctggcagatcatcctgcggtcccaccccagatcccctcctcctcgccatcccattctgccccctccccaccctgggtacagaaagggactgaagtgttgggcagagagggggcttaaggcccctgggcacaggctgggatcagggcagtgagcgaagggcagctgtgtcctgccctcccttctggaggctggaggggagaggccaagcccttggaaaatgtagcaaatgtctggatgtcgcataagtgcgtgtatgtgcgggacaggccccgagaagctagtgactcctgcacacccccattgcacaaatgaaatcacagcccaggagggagggtagcttggcactggctgagaaatagagctctctccccgcccctccccctaaccacaagggattgtcctgacaacttgtggggatagaagggctcacagggcaggggtctcagctgcccccatccttagggcaggggagttagtgtggagccgagagcaggtcccagctccccctgccagccgcactgtcccaggcccagggacctctgccgggtcctcccagcccttgccacacagcctagacgtagtagcctgggcttccagcaggtggcgagctggttcgtgctggaaatttctcctgggtttcttggggtcaaacatgccaacctccaagaccccatcctcacgtctcccacttttctggcgctggagtgtgcagggcgtaggacctgcatgtgtgggtgtgagaatgggggcggtggacaccagggggcgagtgtgtgactaggtgtgtgtgcacatgtgtagggtgcagacgcatgggtgccatcctttgcgttcagtgactgtgcgtccagacccctcaccagcggcccccccaccacaccctggtcctcccaggcagctgtcccagggcgcccaggcctgccttgcaccacagccctcaggaaatccggcaaggaggcccctgcaggttggttcaggcccccaggtagcaaaacagagacaacagcagccccgcctgaccccctgcccctctctgtggaggcccgggacccccgcaataagcaccacatgggtgaggctgtccctgtcagggtcccctgccagggtccctcctggggttctgggccatttgaggggctctttgatgggccaggccggccagagtgaactccgagcactttctggctggtgccccaacctctccactccccactcattcccaccttgaaaaagggctataggtcccctgccctgcccgggtccagtttacaaacagtgtggggtggccccagggcctggccccactctccctgctgtgcccactcctctccagactccacctccccagtgggtatgggccctccacatgccaggtaagtagcaaacccccactccctccaaggaccaggtctcagagaaggccctggtcactgcccccggcccacctggagcccatcggggctgcctctcccagccgcgacttctccttttgccttaggcctcgcgacatcctgatctctcctgcaataactaggaatcgagattccacagtagacgtcccttgccgtgctcgctctctctctcgcgcgcgctctctctctccctctctctctctctctctctctctctctctctctctctctctctctctcctctctttctctctctccctctctctgttaagatcctgttcgggagtttccccagccgttgtagtatctagtatgttagagttgggaggggaccatagttatgtagcccagccccctcattcccagaggcacccagagggccagcctccagcctgaccccagagcagaaccggaacaccaggttggggccctggtgctgccacctcctctgctggtcgggctgggaccctttgccccttaggagaggtgttggtcacagatgtttacctcagtttatgtcactgtcgaagaaacaaaaaataatagcaaaaaataacactgtagacatgaagacttagaagacaaaaaaaaaaaaatcacacaaaaaatctcccttgttgcgattcttctgtgaaggtacagtgtgtatgtgtgtatgtgtgtatgtgtgtgcgtgtctctgtcccagaccctgtgtcccccacactgccccctgtccttcggtgcttcccagagacccctctgagctggcctgtggggcacgggaagccccctggatgggaggcggggccacaggtcggctagagggtctccaccaggcccactgaacagaaccccacggctgccagaatgttccctgagcccacactgtggccagtgggacagtcctggtggctgacatcagcgtccatgcttggctcagggcctggggcggggtcctgggtagagtcctagccccagagccccagcccctcatgtcttgccgcccttcctccatgtgtttgtaaatactctggcatcctttggccctgagaaggtttttaaatgtgttatttacttctctaaacatgacgattgctataaaaataaacaaaagtttagaaaaatga

SEQ ID NO: 1216 - DNA, 1739 bp, Homo sapiens
  source 1..1739: mol_type = genomic DNA
ggtcaccatggcgaccaggcgccttggggtcggggagacgctgggggccctcaacgcggccctggggccaggcggtccggtgtggatcaaggagacgcgcacccgccacctgcgttcccgagactttctggcaccgcaccgcgcgctgcaggcgcgcttcgatgacggccaggttccggagcatttgctccatgccctcgcctgcctgcagggccccggtgtggccccggtgctgcgctgcgcgccgacccccgcgggtctgtctctccaactgcagcggtccgccgtcttcgagcgcgtcctcagcgccgtggccgcctatgccacgcccgcctcgcctgcctcgctgggccagcgcgtcttactacactgcccagcactgcgcagctccccctgcgcactccgcttgagccagctgcgtacggtgctcgtggccgatcacctggcgcgagccctgcgcgctcacggggtgtgcgtgcgcctagtgccagctgtgcgggatccgcacatgctgaccttcctgcagcaactgcgggtggactggcccgctgcctcggagagagcttcctcccacaccctgaggagccacgcccttgaagaacttacctctgctaatgacgggaggacactgtcccctggcatcctaggcagactgtgtctgaaggagctggtggaagaacagggccgcacagctggctatgaccccaacctggacaactgtctggtgactgaggatctcctctctgtgctggctgagctgcaagaggctctatggcattggcccgaggacagccacccaggcctggctggggcctcagatactggtacaggcggctgcctggttgtacatgttgttagctgtgaggaggagttccagcaacagaagttggacctgctttggcagaagttggttgacaaggctccactcagacagaagcacctcatctgtggccctgtgaaagtagctggtgcacctggcactctgatgactgcccctgagtactacgagttccggcatacccaggtgtgcaaggcctcagcactgaagcatggtggggatctggcacaagacccagcctggacagagatctttggtgttctctctgtggccaccatcaagtttgagatgctgagcacagccccacagagtcagctcttcctggctctggctgacagcagtatctccacgaagggcacaaagagtggcacctttgtcatgtataattgtgcccgtcttgccacactctttgagagttacaagtgtagtatggaacaaggtctgtaccccacttttcctcctgtgagcagtctggacttctcactgctacatgatgagggtgagtggttgttgctcttcaacagtatcctcccctttccggatctgctgagccggacagcagtgctggactgcacagccccggggctccacattgctgtacgcacagagatgatatgcaagttcctggtacagctcagcatggatttcagctcctactacaaccgggtacacatcctgggggagcctcgaccacacctctttggtcagatgttcgtccgcctgcagcttctgagagctgtgcgtgaggtgctccatactggcctggctatgctgggtctccctccactgagccacatttaaggccacagaggctccaatacctgggaatgttcacaaagtcatcaactggaaaaaaagcaaaaacccacggccaaaataaattggtactgtttgttacaaa

SEQ ID NO: 1217 - DNA, 1921 bp, Homo sapiens
  source 1..1921: mol_type = genomic DNA
cttgctgctggaaacgcagttccggttaggcggctgagtttgtttacgttgctaacagatctagcccctgctttccctagttccagttccaagatggggaaatccttcgccaacttcatgtgcaagaaagactttcatcctgcctccaaatccaatatcaaaaaagtatggatggcagaacagaaaatatcatatgataagaagaaacaagaagaattgatgcagcaatatcttaaagaacaagaatcatatgataatagattgcttatgggagatgaacgtgtaaagaatggccttaatttcatgtatgaagccccaccaggagctaaaaaagaaaacaaagagaaagaagaaacagaaggagagaccgaatacaaatttgaatggcagaaaggagccccacgagaaaaatatgccaaagatgacatgaacatcagagatcagccctttggtattcaggttcgaaatgtgaggtgcattaaatgtcacaaatggggtcatgtcaacacagatcgagaatgtcctttgtttggtctttctggaatcaatgcaagttcggttcccactgatggctcagggccatcgatgcacccctcggagctaatagcggagatgagaaacagtgggtttgcactgaaacgaaatgtactggggagaaacttgaccgcaaatgatccatcacaggagtatgttgcaagtgagggtgaagaagatccagaagttgaatttttaaagtcactaacaaccaaacaaaaacagaaacttctcaggaaattagatcgactggagaagaaaaaaaagaaaaaagatagaaaaaagaaaaagtttcagaagagcagaagtaaacacaaaaaacataagtcctcttcttcctcatcttcctcctcctcctcctcttcctctactgagacttcagaaagcagtagtgagagtgagagtaacaataaagaaaaaaaaatacaaaggaagaaaagaaagaaaaacaagtgttcagggcataacaacagtgattctgaagagaaggacaagtctaagaagagaaagcttcatgaagaactttctagcagtcaccataaccgggaaaaagccaaggaaaagcccaggttcttaaaacacgagagttctagggaggacagcaaatggagccattctgattctgacaaaaagtccagaacccataaacatagcccagagaagagaggctctgaaagaaaggaggggagcagcagaagccacggcagggaggaaaggagccggagaagccggagcagaagtcctggtagttacaagcaaagggagacaaggaaacgggcacagcgaaatcctggtgaagagcaaagcagaagaaatgacagcagaagccatggcacagacttgtatagaggagaaaaaatgtacagagagcacccaggaggtacacatactaaagtgacacaaagagaatgaagcagaagtagagaagaaagactgtatgtgacaattacctgggaataaaaatatctccacttttttattgaatacctttagcaaggggtaaattatgtactgttgtctttctaataaaaaagctcaattttaatttttcatctctagactgtcaattcaagtacaaaactacatgagtactataagaatgaattttgcaaatatttgtaagtaagctattttggggctgtggaaatattttctgttggtaactgtttcttgttccccataccagataaaaaccgcatataactctgtgacattttctttgttctgaaacatcattaaaagaatgacagtacattgaatgggtataatttacttttttcaattcaaatttgttattctaggatttgaatttgcttgaagtgaattgtaataattattcaaattcattagtataaattaaggattaataaatctttaagacttttaa

SEQ ID NO: 1218 - DNA, 1681 bp, Homo sapiens
  source 1..1681: mol_type = genomic DNA
gggtacctgtaccccacgtagtcgccggttaccgatcggactaagttccagaagcaagagataaagtaataatgggtactgtggggaaaaacacagaagaacaattcggtaatatagtggtgatttacaagtcaagttaaaatgtccccagaagtggccttgaaccgaatatctccaatgctctcccctttcatatctagcgtggtccggaatggaaaagtgggactggatgctacaaactgtttgaggataactgacttaaaatctggctgcacatcattgactcctgggcccaactgtgaccgatttaaactgcacataccatatgctggagagacattaaagtgggatatcattttcaatgcccaatacccagaactgcctcccgattttatctttggagaagatgctgaattcctgccagacccctcagctttgcagaatcttgcctcctggaatccttcaaatcctgaatgtctcttacttgtggtgaaggaacttgtgcaacaatatcaccaattccaatgtagccgcctccgggagagctcccgcctcatgtttgaataccagacattactggaggagccacagtatggagagaacatggaaatttatgctgggaaaaaaaacaactggactggtgaattttcagctcgtttccttttgaagctgcccgtagatttcagcaatatccccacataccttctcaaggatgtaaatgaagaccctggagaagatgtggccctcctctctgttagttttgaggacactgaagccacccaggtgtaccccaagctgtacttgtcacctcgaattgagcatgcacttggaggctcctcagctcttcatatcccagcttttccaggaggaggatgtctcattgattacgttcctcaagtatgccacctgctcaccaacaaggtgcagtacgtgattcaagggtatcacaaaagaagagagtatattgctgcttttctcagtcactttggcacaggtgtcgtggaatatgatgcagaaggctttacaaaactcactctgctgctgatgtggaaagatttttgttttcttgtacacattgacctgcctctgtttttccctcgagaccagccaactctcacatttcagtccgtttatcactttaccaacagtggacagctttactcccaggcccaaaaaaattatccgtacagccccagatgggatggaaatgaaatggccaaaagagcaaaggcttatttcaaaacctttgtccctcagttccaggaggcagcatttgccaatggaaagctctaggaaacaccagtcttgagaggtggccagccagactgcctgtccacatgcgtgtcagcacatacagccgcttcctggaagccgcctggaatgtcttcacggcagcgttttgctcacacagcagcttttgcacgccccaggcagccccgactgctgaaatccaacttgagctggctggtggtccctggatcctagagcccttcacttcgggttactccctctttcttgcctctatttcttagttggaagaaataaactcacaaattatggtgcagtaattttccggggaaagtaaagcctcaggaatgcccacgcctttcttccaaagcctttgtctctgagacctcttaagttctaagattaaatgcccctcgctgttcttcctctgaaa

SEQ ID NO: 1219 - DNA, 2959 bp, Homo sapiens
  source 1..2959: mol_type = genomic DNA
gggtgacgcaggcgcagcgcgggctgcgcgcgctactgcccatccccggttgtcccacttttgttcgcctctcttcggccctctactcaagagctccgtctccgtctcgccctcctcgaagtcctcgtcgcgcgcccgcgacccaggtcgccctgaaatctagcccgtccgagcgcgagtccaacgccgcggccgcaccaaggccccctcagaccgtgccatgggtgacagtgatgacgagtacgatcgaaggcgcagggacaagttcagaagagagcgcagcgactacgaccgttcccgcgagagagatgaaagacgtcgaggggacgattggaatgacagagagtgggaccgtggccgtgagcgccgtagtcggggtgaatatcgggactatgaccggaatcggcgagagcgcttctcgccacctcgccacgaactcagcccgccacagaagcgcatgaggagagactgggatgagcacagctctgacccataccacagtggctatgagatgccctatgctggggggggtgggggcccaacttatggcccccctcagccctggggccaccctgacgtccacatcatgcagcaccatgtcctgcctatccaggccaggctgggcagcattgcagagattgacctgggtgtgccgccgcccgtgatgaagaccttcaaggagtttctcctctccctggatgactcggtggatgagacggaggccgtcaagcgctataatgactacaagctggatttccggaggcaacagatgcaggatttcttcctggcgcacaaagatgaggagtggtttcggtctaagtaccacccagatgaggtggggaagcgtcggcaggaggcccggggggccctgcaaaaccgactgagggtcttcctgtccctcatggagactggctggtttgataaccttctcctggacatagacaaagctgatgccattgtcaagatgctggatgcagccgtgattaagatggaaggaggcacggagaatgatcttcgcatcctggagcaggaggaggaggaggagcaggcaggaaagcctggggagcccagcaagaaagaagaaggacgggctggagcaggcctaggggacggggagcgcaaaaccaacgacaaggatgagaagaaggaagacggcaagcaggctgagaatgacagttctaatgatgacaaaacaaagaagtcggagggtgatggggacaaggaagagaagaaagaagactccgagaaggaagccaaaaagagtagcaagaagcggaaccggaagcacagtggtgacgacagctttgacgagggcagcgtgtcagagtctgagtcggagtcagagagcggccaggctgaggaggagaaggaggaggccgaagcgctcaaggagaaggagaagcccaaggaagaagaatgggagaagcccaaggacgccgcggggctggagtgcaagccgcggccgctgcataagacctgctccctcttcatgcgcaacatcgcgcccaacatctcccgggccgagatcatctccctttgtaaaaggtacccaggctttatgcgggtggcgctctcagagccccagccagagaggaggtttttccgtcgtggctgggtgaccttcgaccgcagtgttaacattaaagagatctgttggaacctgcagaacatccgtctccgggagtgtgagctgagccctggtgtgaacagggacctgacccggcgcgttcgcaacatcaacggcatcacccagcacaagcagattgtgcgcaacgacatcaagctggcggccaagctgatccacacgctggatgacaggacacagctttgggcctcagaaccagggacgcctcccctgcccacgagcctgccctcgcaaaacccgatcttgaagaatatcaccgactacctgatcgaggaagtaagcgccgaggaggaggagctgctggggagcagcgggggcgctcctcctgaggagcctcctaaggaagggaacccggcagagatcaacgtggagcgggatgagaagttgattaaggtcttggacaagctcctcctttacctgcgcatcgtgcattccttggattattacaacacctgtgagtaccccaacgaggacgagatgcccaatcgctgtgggatcatccacgttcgggggcccatgccacccaaccgcatcagtcacggggaagtgctggagtggcagaagacttttgaggagaagctcacgccgttgctgagtgtgcgggagtcactctcagaggaagaggcccagaagatggggcgcaaagacccagagcaggaagtggagaagttcgtcacctccaacacgcaggaactgggcaaggataagtggctgtgtcctctcagtggcaagaaattcaagggtcctgagtttgtgcgcaaacatatcttcaacaagcatgcagagaaaattgaggaagtgaaaaaggaagtcgcgttttttaacaacttcctcactgatgctaagcgcccagctctgcctgagatcaagccagcccagccacctggccccgcccagatactccccccaggtttgaccccaggactcccctacccacaccagactccccagggcctgatgccctatggtcagccccggcccccgatcgggctatggagctggtgctgtccgccctgctccccacaggaggccctccatacccccatgccccgtatggtgctggtcgagggaactatgatgccttccgaggccagggaggttatcctgggaaacctcgcaacaggatggttcgtggagacccaagggccattgtggaatatcgggacctggatgccccagacgatgttgatttcttttgagccgtcccccgttcctcagtcctgtatcatccatacttgtactaccttgtcctatgaagctctgagaattttttgtacgatcagccttactgctaataaaagcacttccacaggg

SEQ ID NO: 1220 - DNA, 6472 bp, Homo sapiens
  source 1..6472: mol_type = genomic DNA
aggggcggaggtgacagcgggctggggactggcggctgcaactgcctgccgcgccgagggaccgccgggcggcggaaagcaggttataaaacatggaggctggctcagtggttcgagccatttttgacttctgccctagcgtatcagaagaactgccgctctttgtgggagatattattgaggtgctggcagtggtggatgaattttggcttctaggaaagaaggaggatgttacaggacaattccccagcagttttgtggaaattgtgaccattcccagtctaaaagagggagagaggctgtttgtgtgcatttgtgaattcacatcccaagagttggataatcttcccctccatcgaggtgacctggtgattctcgatggcattcccactgcaggctggctgcagggccgaagctgctggggcgcacggggcttcttcccatcttcatgtgtccgcgagctctgcctctcctcacagagccggcagtggcactcccagagcgccctgtttcagattccggaatattccatgggacaagcccgggccctaatggggctttctgctcagctggatgaagagctggacttcagggaaggggatgtgatcaccattattggagttcctgaaccaggctggtttgaaggggagttagagggccgaagaggcatttttccagaaggttttgtagagctgttggggcccctgaggactgtggatgagtcagtaagttctggaaatcaagatgactgcattgttaatggtgaagtagatacccctgtaggagaagaagagatagggccggatgaggatgaggaggagccagggacctatggggtcgccctgtacagattccaagccctggagccaaatgagctggatttcgaggtcggggataaaatccgaattctggcgaccttggaagatggctggctggaaggatccctgaagggcaggacaggcatctttccttaccggtttgtgaaattatgtcctgacacacgggtggaggaaaccatggctctgccccaggaaggcagccttgccaggatcccggaaacttctttggattgtttggagaacaccttaggagtagaggaacaaagacatgaaaccagtgaccatgaggccgaggagcctgactgcattatttctgaagcacccacttctcccctcggtcatctgacttcagagtatgacacagacagaaactcttatcaggacgaggacaccgcaggagggcccccgagaagcccaggcgtggagtgggaaatgcctcttgccacagactctcccacatctgaccctacagaagtagtcaatggtatttcctcccaacctcaggtcccttttcatcccaacttgcagaaaagccagtattattctacagtgggagggagccacccgcactcagaacagtaccccgaccttcttcccctagaagcaaggactagagactatgccagcctacctcccaaaagaatgtattcccagctaaaaactcttcagaagccagtgctccctctttacaggggctcttctgtttcagcttcaagggtagtcaaacccagacaatcaagtcctcagctccacaacctagcaagttatactaaaaagcaccacacgtccagtgtttactccatctcagagagattggagatgaagcctggtccgcaagcccaagggcttgttatggaagcagcaacacattcacagggagacggcagcactgacctggactcgaagctgacacaacagctgatcgagtttgagaagagcttggcagggcccggcacagagccagataaaattttacgccacttttcaatcatggactttaactctgagaaggatattgtccgaggttcctcaaagttaatcaccgagcaggagctgccggaaaggagaaaggccctaaggccaccgccacctcgtccctgtactccggtatccacttctccccatttgctggttgaccagaacctaaaacctgcaccacccttggtggtgcgaccctctcgcccagctcccctgcctccctcagcacagcagagaacgaatgcggtatcccccaagctcctatctcgacaccgtcctacctgtgagaccttagaaaaggagggccctggtcatatgggaaggagtctggaccagacctccccatgccccttagtgctggtgaggattgaggaaatggagcgggacttggatatgtacagtagagctcaagaagagctaaacctcatgctggaggagaagcaggatgaatcatcaagagcagagaccctcgaggatctcaagttctgtgaaagtaacattgaaagtttgaatatggaactccagcaactaagagaaatgacgctcctctcctcccagtcttcatcactggtggccccttctgggtctgtgtctgccgaaaatccagagcagaggatgctggagaagagagccaaggtcatagaagaacttcttcagacagaaagagactacattcgggatctggaaatgtgtattgagcggatcatggtacccatgcagcaggcacaggtaccaaacattgattttgagggactttttggaaatatgcagatggtgattaaggtctcgaagcaattattggctgctctggaaatcagcgatgctgtaggacctgtgtttcttggtcaccgggatgagcttgagggaacatacaagatttactgccagaatcatgatgaggccattgcgctgcttgaaatctacgagaaggatgagaagatccagaagcatcttcaggactccttggcagatctgaagagcctatacaacgaatggggatgcacaaattatattaacctgggctccttcctcatcaaaccagtacagagagtaatgcgttacccgctgttgctaatggagttgctgaattccaccccagaatcccacccagataaagtgcctttaaccaatgcagtccttgcggtcaaggaaatcaacgttaacattaatgaatataaacggcgaaaggacctgggtaagaacagcataattgctgaaaaggagtatgcccatgctgaggaaagtgcttttctgacttactccctagtcctcaagtaccgtaagggtgatgaagatagccttatggagaaaatttccaaactgaacatccactccatcatcaagaaatccaaccgagttagcagtcacctgaagcatctcactggctttgctcctcagataaaagatgaagtatttgaagaaacagaaaaaaacttccgaatgcaagaaagattgattaagtcttttatccgagacctgtctctctacctccagcacatccgggagtccgcatgtgtgaaagtggtggctgctgtgagcatgtgggatgtgtgcatggagagaggacaccgggacctggagcagtttgagagggtgcatcgctacatcagtgaccagctcttcacaaactttaaggagaggacagagcggcttgtcatctcccccttaaatcagttactgagcatgtttacagggccccataagctggtacagaaacgctttgacaagctcctggacttctataactgtacagaacgggcagaaaagctaaaggacaagaagaccctggaggagctgcagtcggcccggaacaactatgaggccctgaatgcacagctgctggatgagctgcccaagttccaccagtacgcccagggcctcttcaccaactgtgtccacggctatgctgaagcccactgtgactttgtgcaccaggctctggagcaattaaagccactgctttcgttactcaaagtggctggcagagagggaaaccttattgccatcttccacgaagagcacagcagagttctgcagcaactccaggtttttaccttcttcccggagtctcttccagctaccaagaagccatttgagaggaaaaccattgaccgccagtctgctcgaaagccactcctgggcctgccaagttacatgctacagtcagaagaactccgggcctccctcctggccaggtatccccctgaaaaactcttccaggcagaacggaacttcaatgctgctcaagacttggatgtctcacttttggaaggtgacctggtgggtgtgattaagaaaaaagaccccatgggcagccagaaccgctggctgattgacaatggagtcaccaaaggcttcgtgtacagctctttcctaaagccctacaatcctcgccgcagccactccgatgcctccgtgggtagccactcctccacagagtctgagcacggcagctcctcccccaggttcccacgccagaacagcggcagcaccctgaccttcaaccccagcagcatggctgtatcctttacctcggggtcttgccagaagcagcctcaagatgcatctcctccgccaaaagaatgtgaccaaggaactctcagtgcatccctaaatccgagtaattcagagagtagtccttccagatgcccttcagacccagactccacctcccagccaaggtcaggggactctgcagatgtagctagagatgtaaagcaacccactgccacgccgaggagctaccggaacttcaggcatccagaaatagttggctactccgtaccaggacgaaatgggcaaagtcaagacctcgtcaaaggatgtgcaagaacagcccaggctccggaagacagaagtacagagccagatggcagtgaggcagaaggcaaccaggtctattttgctgtctacaccttcaaggcacgaaacccaaatgagctgagcgtgtcagccaatcagaaactcaagatcctcgagtttaaagatgttacaggaaatacagagtggtggttagctgaggttaacgggaagaagggctacgttccctccaattatatccgcaaaaccgagtacacctgagcccacgttgcctgccacccagccttgctgcctttgctttcagtccgccgagggttctggcggcccaccgagagggcgcctgctcctgagacacaggccctgtctgcgttgcttaaccatggcatggtggagcacaccacagatcttgttctcctcgattgggttgtaaaccttgatgctcactagaatctctagaatttgaaatggaccctggggctttgcaaatgacttagtgactatgagaagagagacaagtcttagagctggcttttggaaaggagaaacttgcagtcagaagcccagtgtcctatgtatgcaggaagctgtgctctagcaatagacagtgttggtaatggttgtgctgtacggcgtttggggtggccccatgttccatgctcagctgaccggatgccaactcagatgaaaagaattcatggctctgggcaccccgtgaggcagtgcttgcacatggctgggagtttgtcgggattgaaccaaacctagtgcttcaaagctcctgggacacctccagtgtccagcacacattctcatacatactgcccctaatttctaaagtccctaaagcactacattctgtaaccttgtttcttttactccattcccagattagttatgcaaaattcaactgcgttctacttttagaagtgtttagggtctttattttctgttgacccttcatctgaaagattctcttcccttgttaggtacaatcactgcccccccgcttttttttttgagatggggtcttgctatgttgcccaggctggtcttaaacgcctgggctcaagcaaccctcccgcctccctgctgagattacaggtgtaagccaccataccgcaacctcaatgacacctttctgatggtctttacacagtctgtgatgtctggtggcccccctgccctggactcaataattgatagattttcctagagtaacagtatgagagctccagccattccattaaaagtattagttctgctttgagctgaaaccagttgagcctaatggaagactggatgtctttcttcttcatccaagcaccctaatgactgtttagttacatccatagatgcagacaacataacacctgtgacttacttgaattgggataagccattccagaagtagcttatcctagacttggaaataagatttttttcaccactaacttccatgcttcagagatgacattcaaagccagattcccaagtgcctgatcatacctcccagtctcaggaagatatttgcttaccccttagaccaagaatcttaagatcttccccagctatgaagcctatcttggaatgggaaaccatgaaatttgtcttttaaaagaaagggaagaaatagccttacagcccctgttcctccaagtgcacatttagccttaaaatcctgggagtcgggagacaccgtggagtcctaacatccacagtgtctgctggtcgtggtcagaaggcagtaatgcaagagtccttttgtgaagagtgtttctatgtagagatgtttatatttaagtagttcttttataaataaaagcatttctaatggc

SEQ ID NO: 1221 - DNA, 2309 bp, Homo sapiens
  source 1..2309: mol_type = genomic DNA
gcgctcccgcttgccgcagcctgcgtcgtctgccgccaccgcgcgccttcactgacctacaccaccgccgccgccgccgccgccgccgggctcgctggctggcccggtgcgggcggcggactcccgccggagaggactgccagcgccgccgccgccgccgcttcggcccgggcccgggccccgaccccgtcccgggccccagcgccggccgcccgcccggtcgggcgatgaagtgtcactatgaggcgctgggggtgcggcgcgacgccagcgaggaggagctcaagaaggcctatcggaagctggccctgaaatggcacccggataaaaatctggataatgccgcagaagcagctgaacaatttaaattaatccaagcagcatatgatgtgttgagtgaccctcaggaaagagcatggtatgataatcatagagaggccctacttaaaggtgggtttgatggcgaatatcaagatgacagcttagatttgctacgctatttcaccgttacctgttattctggttatggagatgatgaaaagggattttacacggtgtatcgtaatgtttttgaaatgattgccaaggaagaactagaatctgtgttagaggaagaggttgatgatttcccaacttttggagactcccagagtgactatgatacggtagtccatcctttctacgcttattggcagagtttctgcactcaaaagaattttgcatggaaggaagaatatgatacacgacaggcttcaaaccgctgggaaaaacgagccatggaaaaagaaaacaaaaagattcgggacaaagcaaggaaagagaagaatgagcttgtccgtcagctggtagctttcattcgtaaaagagataaaagagtgcaggcgcatcgaaaacttgtggaagaacagaatgcagagaaggcgaggaaagccgaagagatgaggcggcagcagaagctaaagcaggccaaactggtggagcagtacagagaacagagctggatgactatggccaatttggagaaagagctccaggagatggaggcacggtacgagaaggagtttggagatggatcggatgaaaatgaaatggaagaacatgaactcaaagatgaggaggatggtaaagacagtgatgaggccgaggacgctgagctctatgatgacctttactgcccagcatgtgacaaatcgttcaagacagaaaaggccatgaagaatcacgagaagtcaaagaagcatcgggaaatggtggccttgctaaaacaacagctggaggaggaagaagaaaatttttcaagacctcaaattgatgaaaatccattagatgacaattctgaggaagaaatggaagatgcaccaaaacaaaagctttctaaaaaacagaagaaaaagaaacagaaaccagcacagaattatgatgacaatttcaatgtaaatggacctggagaaggagtaaaggttgatccagaagatactaacttaaatcaagacagtgccaaagaattggaagatagtccccaggaaaatgtcagtgtcacagagatcattaaaccatgtgatgatccaaaaagtgaagctaaaagtgttcctaaacccaaaggaaagaaaaccaaagatatgaaaaaacctgtcagagtacctgctgaaccacaaacaatgagtgttcttatcagctgtacaacctgccatagtgaatttccatctcggaataaactttttgaccatctaaaggccacaggtcatgcaagagcaccttcatcatcgtctttaaacagcgcaacaagtagtcaaagcaagaaagagaaacgtaaaaacagatagagattctgcctgtgcttttgtttgactgtctctagattttgaaaccaaaaaactgaactgaaatcatctaaagagttaaaatttcagtgatctgcaattaattacattgtggaagattattttttatcttgtaaaaacacttttttggtttaatatatatttttaaaacatttcactagtgattgaattctacttttgccatctgaattgacttgaatgtcttaaaacaggtaaatactgtaaagtgtgtattcttgatgtttattggctcatgtggacagaaatgtacagggagaattacattattttaacacacagaagtgcaactttctgctttattttctgaatttcacattacttttacttaatgcttttgtgttttgttaatacttcataatatgtgaaaaactcggatcttttaaaaagcatcatagatcatttttccatatgacactggttccgattttaaaaattatttttaaataa

SEQ ID NO: 1222 - DNA, 1741 bp, Homo sapiens
  source 1..1741: mol_type = genomic DNA
tctgcagccacgagaagcaaagttgacatttctggatcactctccccagacgcgtcacttgcccacaagcgggacacggcagtctcgctgagccagctgtgcagagggacagatggaagaaagctagagatgctgcttcgtgggcgctgaagttgcagaacttgggctggttttctttcttcccatcccccctcctcctgacaaaccacatcttgactcagatggtcgaaagaaaaactctttcagttatttgatatttgggaaccctccaggagaccataacttatttttgagggaggctccttctctccctttgctgggaacacacacacacacacacacacacacacacacacacacacacacacacagctgtacaccatggtggttcaggctgcagtggctccgaatagatcccaaagacttttactgaaaattccttatggatctctgagaaggcgcagcgttgaaaggatgacggagggccgccgatgtcaagtacatcttcttgatgacaggaagctggaactcctagtacagcccaagctgttggccaaggagcttcttgaccttgtggcttctcacttcaatctgaaggaaaaggagtactttggaatagcattcacagatgaaacgggacacttaaactggcttcagctagatcgaagagtattggaacatgacttccctaaaaagtcaggacccgtggttttatacttttgtgtcaggttctatatagaaagcatttcatacctgaaggataatgctaccattgagcttttctttctgaacgcgaagtcctgcatctacaaggagcttattgacgttgacagcgaagtggtgtttgaattagcttcctatattttacaggaggcaaagggagatttttctagcaatgaagttgtgaggagtgacttgaagaagctgccagcccttcccacccaagccctgaaggagcacccttccctggcctactgtgaagacagagtcattgagcactacaagaaactgaacggtcagacaagaggtcaagcaatcgtaaactacatgagcatcgtggagtctctcccaacctacggggttcactattatgcagtgaaggacaagcagggcataccatggtggctgggcctgagctacaaagggatcttccagtatgactaccatgataaagtgaagccaagaaagatattccaatggagacagttggaaaacctgtacttcagagaaaagaagttttccgtggaagttcatgacccacgcagggcttcagtgacaaggaggacgtttgggcacagcggcattgcagtgcacacgtggtatgcatgtccggcattgatcaagtccatctgggctatggccataagccaacaccagttctatctggacagaaagcagagtaagtccaaaatccatgcagcacgcagcctgagtgagatcgccatcgacctgaccgagacggggacgctgaagacctcgaagctggccaacatgggtagcaaggggaagatcatcagcggcagcagcggcagcctgctgtcttcaggtaggcagaggccagctggagggacgccccctgagcatggctgggaccccagaggggacccaggaaggtggggagagctgcagctggggagactgcagggcaagctgctccaaagctggctttgctttccagaccaaggttgggatccaaatgcgaatctgagaaaactgctcccaggaatcaaatagtggaagg

SEQ ID NO: 1223 - DNA, 4064 bp, Homo sapiens
  source 1..4064: mol_type = genomic DNA
gaggcctgcgcgtgcggtctgcagttcggccgcttcctcttggcgggtgggctgcagctatggagggcgagcctccacctgtggaggagcggcggcggctgcaggaggagctgaacgagttcgtggagagcggctgccggacgttggaggaggtgaccgcgtccctgggctgggacctagatagtctggatcccggggaagaggaggcggcggaggatgaagttgtgatatgtccatacgattccaatcatcacatgcctaaatcatctttggcaaagcacatggcatcttgtagattgaggaaaatgggctataccaaagaagaagaggatgaaatgtataatcctgagtttttctatgaaaatgtgaagataccttcgattactttgaataaggactcacaattccagataattaaacaagctagaactgcagttgggaaagacagtgattgttataatcaaagaatttattcttcattgcctgttgaagttcctttgaatcacaaacggtttgtttgtgatctaactcaagctgatcgtcttgccctctatgatttcgtagttgaggagacaaagaaaaagcgctctgattctcaaattattgaaaatgacagcgatctctttgtagacttggctgccaaaatcaatcaagacaatagtcgaaaaagtccaaaatcctaccttgaaatcctggcagaagtacgagattataaaagaagacgccagtcctatagagccaagaatgttcacataaccaagaaatcatatactgaggtgattcgagatgtgataaatgtgcacatggaagaactcagcaatcattggcaagaagagcaagagaaggcagaggatgatgccgaaaagaatgaagaaaggcgatcagcttcagtagattcacggcagtctggtggaagctatttggatgctgagtgttcacgacatagaagggataggagtagaagcccacataaaagaaaaagaaacaaagataaggataaaaactgtgagtcgagaagaaggaaagagagggatggggaaagacaccatagtcataaaagaagaaagcaaaaaatataaatgaagtacttgtacctatattaattatgcttacgccatgataaccaatatacagatatattaattggaattcctttgcataggagaatgtttttatgatctgtttagtgcttattattttttttatgatctgtttagtgcttattattttccagtaaatatgcttcaaaccatgagtacactattaggccctacaactttgttttccttatattttattagatgatttgcttcctataactgatgttgttttgttcgttttgctaatatatgtatctcaaaattctttaagtcaatatttatcatatgtaaattaaacatgaatacattctcatcttataactacatcttataaataaggctaataacccttagaacaccacctgcggttctgtcctcaccccagtggtgactactgtttaccactacactggtgaattgtagtagggaaaaacaatctaaatattgaagaggaatggcctaattaaaatatgatgtagtcataggatagattattgtattggagttaaaagaaataatctagatccatattaacctggattggtctcaaaaacataatgctcagtgaaaatagcaagttgtagaaagttatatacaaattatatatatgtacaaaacaatactatgcattctctatggctatataatgtacgtaaatctatttttaaaggttcagaggaatccataccaaagttctaacagcgagtaggaggtatagatgagagattaggggtgcaaatcaggattgggagggtggtcagagggaactttagctttatccataacattaatttttttaaaaaataaggtcttaatgtttcatttaatttaaaatatactgtcatgttgtgttttgtaaatcaactgaattgaggtactatttacttagatttattgcaccctttttacgtgtgtattttattgggttttgacagattcatacctctgtgcagccactatcacgatcaagatacaaatattttcattgcccccaaaattctcataccccctttcccaatcaattcctctacccctagccctaggcagccacagatttgcttttggttaccgattagatctatccattgtagaattcatgtaaatagaatactgtagtatgtactttgccttcttcctctctgcagatttttgagattgatccctgtgtgtcagttgtgcattttttttgttgctgagtagtatgttctatcttatgtcagatcattcacgtgagactttggcatgaaatgttaagcatccgacatctaaatagcaatattttgaatactggaaactcaggttaaagattttgtttccaagtagaaatgaaatcttattattttaataagtagctgacagtgacagaaagattggatttggatcagattggctgttaggcttcaggtatgggaaacagctctcagatttataaattggaaatcaccaggttacttgccaatatatagtcatattgctgccattgtacttaatttctaaatatataaaatccacatttaaaaattataaaagcaaggacttgggagtgactgatgaatcatgaaattgctgcttttatagatcaaaactacttgaatcatcaggaatttcatatttttcatattgtgtgacaacttataattttgtttcaaattgtgatttcattgattttactaactggaaggaagaagagtaaaattggcatatttaggttttttgtagaagaaagatacaagtgaaaattaggagtggattggagaaattggggggaaatagaagagtacggagaaaggaagagattgaaaatgttaccagagttctttaaagctcacattttatagtatcactgctacaaactatttaatgaaatgtggcatcgggtgaaaagaggcatttgtttgatccttgaacgaattaatctcacgtacttccctgtttgtggtttgagcctttcactggatgtgagctacttgagagcagggtttatgccttcatcagcgtgacccctgtgcctgcagcctcataggtgttaatctgtaattttaaattttgacaaaagcattttcacagccctgccacataagatctagtttttatttctagagtgctgctatgaataattactatagctgctgtccatcttgcccatccattaaggtaccttctcacaaacatttctaatctactggctggagtgcagtggtgcagtctgtagctcactgcagcctcaaactcctaggctcaggcgatcctcttgccctggcctcccatgtagctgcaactataggtgtgtgccactacacctggctaatgtttttagttttttagagatggagtcttgctctgttgcctaggctggtcttgaactcctgggctcagatgatcctcctgtcctcagcctcccaaaatgctgggagccaccaggcaccaggtgtgatctaccacacctgtctaaaaagtatgtatttttaaatttttttgtagagacaggatctcactatgttctccagctggtctcaagctcctggcctcggcctcctaaagtgctgggattacaagtgtgagccactgtgcctagtcactttaattgagatattggcaagtcaactgccatgcagagcccagggcactggttatattcagtaggaaactgaactcagcactcagaattttaaattaaatcaatgatcttcaagtatttgccactttcgagtacagctaattggataatctcaaaccctttagtgaaaatatcttaaatgcattgagaatattttctaattacctgtgtatgctacagtacagacattaattctataaacatgttcataggtcttccccctcgccccgcccgtcttctaagggcattttctgtttctttttagtgagttcatgaatgtttaacggttctggcgcaaagctttcttgcattctgagcataaaaataataaaacccacttatatttg

SEQ ID NO: 1224 - DNA, 12929 bp, Homo sapiens
  source 1..12929: mol_type = genomic DNA
cgccagcccggtcaggcctcggcgcggcctacacgctccgctcgctcgctcgctcccgcctcccgccccgcgcccggccatggcggagccgtcgtccgcccgacgcccggtgcctctcatcgagtcggagctgtacttccttatcgcccggtacctatcggcgggcccgtgtcggagagcggcccaggtgctggtgcaggagctggagcagtaccagttgttgccgaagagattggactgggagggcaacgagcacaacaggagctacgaggagttggtcttgtccaataagcatgtggctcctgatcatcttttgcaaatctgccagcgcatcggtcctatgttggataaagaaattccacccagtatttcaagagtcacttctttacttggtgcaggaaggcagtctttgctacgtacagcaaaagactgcaggcacacagtttggaagggctctgcctttgctgctcttcatagaggaagacctcctgaaatgccagtgaattatggttccccaccaaatcttgtggagatacatcgaggaaaacaactcacagggtgttccacttttagtacagcatttccaggaactatgtatcagcatataaaaatgcacagaaggattctcggacatctatctgctgtttactgtgtagcatttgataggacaggacatagaatctttacaggttcagatgactgtttggtaaagatttggtcaacacataatggccgcttgttatctacattaagaggtcattctgcagaaatttcagatatggcagtaaactatgagaatacaatgattgctgcggggagctgtgataaaattattagagtgtggtgcttgagaacttgtgccccagttgctgtgctccaaggacacacaggatcaattacatctttacagtttagcccgatggccaaaggctctcaaagatacatggtttccactggtgctgatgggacagtttgcttttggcaatgggatttagaatccttaaaatttagcccacgtcccctgaagttcactgaaaagcctaggccaggcgttcaaatgctttgttcttcttttagtgttggtggtatgtttttagccacaggtagtactgatcatgtaatcagaatgtattttttgggttttgaagcacccgaaaaaatcgcagaacttgaaagccacactgataaagtagatagtatccaattttgtaacaatggtgatcggttcctaagtggtagcagagatggaacagcacggatttggagatttgagcagttagaatggaggagcattttattggatatggctaccagaatctcaggggacttatcttccgaagaggaaaggtttatgaaacctaaagtaacaatgatagcttggaatcaaaatgatagcattgttgtcacagctgtgaatgatcatgtcctcaaagtgtggaattcttacactggacaactgcttcataacttaatgggacatgctgatgaagtatttgttctggagacacatccctttgattccagaattatgttatctgcaggacatgatggcagcatatttatatgggatattacaaaaggtaccaagatgaaacattattttaatatgattgaaggacaaggacatggagctgtgtttgactgtaagttttcacaggatggacagcattttgcctgtacagattctcatgggcaccttctgatatttggttttggatgcagcaaaccatatgaaaagattcctgatcagatgttcttccatactgactatcgaccacttattagagattctaataattatgtcttagatgagcaaactcagcaggctcctcatcttatgcctccaccattcttggtagatgtagatggaaatcctcatccaaccaagtatcagagattagtaccaggccgagaaaattctgcagatgaacatttgattccacagctgggctatgtggcaacaagtgatggagaggtgattgaacaaattataagcctgcaaaccaatgataatgatgaacgcagcccagaatcgagtattcttgatggaatgataagacagttgcagcagcagcaagatcagagaatgggagcagatcaggatactattccaagaggactttcaaatggtgaagaaacaccccggagaggttttagaaggctgagcttagacattcagtcccctccaaatattggtctgcgtcgtagtggacaagttgaaggtgttcgtcagatgcatcaaaacgctccacgcagtcagattgctacagaacgtgacctgcaggcttggaaacgaagagtggttgtaccagaggtaccactaggcatatttaggaagctggaagacttccgattagagaaaggtgaagaggaaagaaatctttatataataggaagaaaaagaaagactcttcagctctcacataagtcggattcagtggttttggtatcacagtctagacaaaggacatgtaggcgtaaatatccaaattatggtagaagaaatcgtagctggcgtgagttatcttctggaaatgagtcttcaagctctgtaagacatgagacttcctgtgatcagagtgaaggttctggttcttcagaagaggatgaatggagaagtgacagaaaaagtgagagttacagcgaaagttcaagtgactcttcatctagatattccgattggacagctgatgcgggcatcaatttgcagcctcctttaagaacatcatgtcgtcgacgaattactcgattttgtagtagttcagaagatgaaatatctactgagaatttatctcctccaaaaagaagacgaaagagaaagaaagaaaataagcctaagaaggagaatttgcggaggatgactccagcagagcttgcaaatatggagcatttatatgaatttcaccctccagtttggattactgacaccacacttagaaaatctccttttgttcctcaaatgggtgatgaggtaatatattttcgacagggtcatgaagcttatattgaggctgtaagaagaaataatatttatgaactgaaccctaataaggagccatggagaaaaatggatcttagggatcaagaattggttaaaatagttggaatacgatatgaagttgggccccctacactctgttgcctaaaactagcatttatagatccagcaactggaaaacttatggacaaatctttctctattagatatcatgatatgccagatgttattgactttcttgtattgcgtcaattttatgatgaagcaagacagaggaattggcagtcttgtgacagattccgctctattattgatgatgcttggtggtttggaacagtgttaagtcaagagccatatcaaccacagtatcctgatagtcatttccagtgttatattgttaggtgggataatactgaaattgaaaaacttagcccatgggacatggaaccaattcctgataatgttgatccacctgaagaattaggagctagtatttctgtcacaacagatgagctagagaaattgctctataaaccacaagctggtgaatggggtcagaaatcaagagatgaagaatgtgatagaattatcagtggtatagatcaacttttgaatcttgatatagcagcagcttttgcaggccctgttgatttgtgtacatacccgaagtactgtactgtagtagcttatccaaccgatctttacacaattcgaatgagacttgttaatcgattttacaggaggctgtctgcgttagtttgggaagtcagatatatagaacataatgccagaacatttaacgaacctgagagtgtaattgcaagatcagctaaaaagataactgaccaacttttaaaatttatcaagaatcaacactgtacaaatatctcagaactttctaacacatctgaaaatgatgagcaaaatgctgaggatttggatgatagtgatcttcctaaaacatcttctggaaggaggagagtccatgatgggaaaaaaagcatcagagctacgaactatgttgaaagcaactggaagaaacagtgtaaggaactagtgaacttaatttttcagtgtgaagattctgaaccatttagacaacctgttgatttggttgaatatccagactacagagatattatagataccccaatggattttggaacagtaagggaaactctagatgcgggaaattatgacagccctttggagttttgcaaagacatccggctgatatttagcaatgcaaaagcgtatacaccaaacaaaagatcaaagatttatagtatgaccttgagattatctgccttatttgaagaaaaaatgaagaaaatctcttctgattttaaaattggtcaaaaattcaatgaaaaacttcgaagaagccagaggttcaagcaacggcaaaattgtaaaggtgacagtcagcctaacaaaagtatcagaaacctcaagccgaagaggttaaaatctcagacaaaaataattcctgagttggtaggttctcctacccagtctacctcaagtaggacagcttatcttggaacccacaagacaagtgctggtatctcttcaggtgttacttctggtgactcttcagattcagcagaatcatcagaaaggaggaaaagaaatagacctataacaaatggttctacattatctgaaagtgaagtggaagattctttagctacctctttgtcatcgtcagcttccagtagttctgaggaaagcaaagagagttccagagctcgtgaatcctcctcacgcagtgggctatccagaagcagcaatctcagggtaaccagaactagagctgctcaaagaaaaactggtcccgtttcattagcaaatggatgtggcagaaaagccactcgaaagagagtctatttaagtgattctgataacaattcattggagactggtgaaattctaaaagccagagctggaaataaccgaaaagtcttaaggaagtgtgctgctgtggctgccaataaaataaagctaatgagtgatgtagaagagaattctagctctgaaagtgtctgttctggtcggaagctgcctcaccgcaatgcttctgctgtagctagaaaaaagttattacataattctgaagatgaacagagcttaaagtcagaaattgaagaagaggagctaaaagatgaaaatcaactattaccagtgtccagttctcacactgcccagagcaatgttgatgaatctgaaaacagagactcagagtcagaaagtgatttgcgggtagcccggaaaaattggcatgctaatggttacaagtcccatactccagcaccttcaaagacaaaatttcttaaaatagagtcttctgaggaagactctaaaagtcatgattcagatcatgcatgtaacagaactgctggcccatcaacgtctgtgcagaaacttaaggcagagagcatctcagaggaagcagattctgaaccaggaagatctggtggtaggaaatacaatacatttcacaagaatgcgagtttctttaaaaaaaccaagattctgagtgactcagaagactctgaatctgaagagcaagatagagaagatgggaaatgtcataaaatggaaatgaacccaatttcaggaaatctgaactgtgaccctattgctatgtcccagtgttcctcagatcatggatgtgaaactgatttagattcagatgatgacaaaatagaaaaaccaaacaattttatgaaagattctgcatcacaagacaatggactaagcagaaaaatttccaggaaaagggtctgttccagtgactcagacagtagtttacaggtggttaagaaatcatcaaaagccagaacaggtctcctgaggattactcgaagatgtgcagctacggctgccaataagatcaagctcatgagtgatgtagaagatgtcagtttagaaaatgtgcacactagaagcaaaaatggaaggaaaaaacctctccatcttgcttgtactacagctaagaagaaattgagtgattgtgaaggaagtgtacattgtgaagtaccaagtgaacagtatgcctgtgaaggcaagccacctgatcctgactccgaaggtagtacaaaagtgcttagtcaggctctaaatggagactcagactctgaagatatgttgaattcagaacacaagcacaggcataccaatattcacaaaatagatgcaccttctaaaagaaaaagttcctctgttacatcttcaggagaagattcaaaaagtcatattccagggagtgagactgataggacattttcttcagagtcaaccttggcacaaaaagctactgcagagaataattttgaagtggaactgaattatgggctgcgcaggtggaatggcagaagactcaggacctatggaaaggctccttttagtaagacaaaagtgattcatgattcacaggaaacagcagagaaggaagtaaaaaggaagagatcgcatcctgaattggaaaatgtgaaaatctctgaaacaactgggaattcaaagtttagacctgatactagttccaaatcatcagatttgggatctgtaactgaatcagatattgactgtactgataatacaaaaaccaaaaggaggaaaacgaaaggaaaagcaaaagtagttagaaaaggtaaaacttttacagctaacatatctaaaactgtgagacgtcaaagacaaagcaaacgccctaggttaagtgtggatgataatgactgggaggatttggactatgcaaaatctaaaagagttcttcgacgttcaaaaataaaaacgagaaatcagggtagaaggactgtgagataccatgatggggatgatgacagaagtttagaaaatgtgttagatttcaatggttgcaccttatgaccttgagggaaagccagttcatttaagaggaaatggactggcatttatggtgaaagctggctgttaaaattatttttttgtcttacaattcagggaatatatttatatttttctatgaaaagttatgaatgtgactaaatcatgactgttatttttatttgcacttgctggtctttgtagcagcattcagcacaggtgccaaaatatgcttcattttgggggcagatctattttgacagtatttgactacatatagcaagagtttgaaatatgttaaacactagacatcctggttatcaaaaccaatgagcattactttcatggcagcaagtgtcatgcagttattttctgaatttgtcaaagaggcagtagtttctaacccctgttctatagtagttacaacaatttcacaacctatgtttacagattcttcataaatacatgcatactgacactataatcatgggaggtgtaaccatgattagtaggcgaggtacctaccacttttttttttttcttcccctggctacttgagtagaatgcattataccagatctggtcactttcattgaaatggtttctaattttcttcccaagtgctgttgggtttttttcttcttaaggaaaacgttgtcacttttatgttataaacttgaatttataaagtgctggtaaattatttttaatgatttgagtgcatgttttaaacctctaggaccagagcatagtcagagcattttcttttaaattgtgcactaacaaaatgctatataatctgtcttctgtccaagatctcctggtttccattgtaagggatttaaccaaaatcttgctcttccataatcttactctgtgaaatagaggaattcgtgtgccttagatttagaagtgtgttctttaatagagtgtacagggctaaaagagtatttaagttaatatgtaggtttcccccatctgtattccaattgtagaggtgagttttgttaagagtacaattgcaaatcttatctatataggaaaatagctaaatgtcattctccatctctttgttttagtttactgcttccatgtgcaatcctaagcattctttgctggggcaactaaatgtatctttattagtgacttctagtccaaatataagaaactgtcatgttttgtgggaaaataattttataatccatttaaagtgaaagtttatcacacaaatagtacacttattttctaaccaaatacttgataggttatgctactccagtgtagatggccattcctaacttgtttgtgcctgaagatggacttgattcaaatggtttacatatttagtgggtaagggatatgttacagtaccccacctgtaagttatttattagccctaattgtgtttgatttcagacaaaattaacccttttctcctgtgtatctttgaagtggcagataaggtgaagcatcagactggtatcaatattagacaatgttatttattagccctaattgtgtttggtttcagacaaaaccttttctcctgtgtatctttgaagtggcagacaaggcgaagcatcagactggtattaatgttagagaatgttctgaagtgttcctattttgtagttatctattccatttgacatagtagaaggtacattttctttctactctgatgcatggggaaggatgtttttggacattatcaactgagataggtgggaaacctcctctcatttgtggcttagagagctatcaccatttcagaactatgatgcttttcttctcagaacttgtgttaagtagatagtaaacagattgattcatgataattgtccttgactaagactgaaaagactaatgggatgccttttactttgctaattttaaaaactggtgatagatgtcaaatccattaatttatttaaactcttcttaaccttctcttttataatctgttctcaggttttaactccatgtttaccatcatttgcaaaaaggtaccaaaaaaatccataaataaatatggaatacattcataagtacatacattcttttggtataaaacaatattttgacagtttaggcttcattaatagaactattctgattatttggactgcattaattggtcattgactggccatccaattaccattttttctttcagtccaaaatagttagacccttgcatacagaagtggtattttggtttttaatcagatttggtttcatcagaagcagcaagaatggacctgatgtctttaaaagcatagccgacaatggtagcttctcaagttatgaaataaaactgagagataatggagaaaataatttttatgggtttttttggttatggtgctattcctaaggttaactttgaatatgtgacacacacactcctaagtacctttaaggaaaattaataaatcattaatagttaaaatgtttacattgagcactagaacatgtttggccttttttttctacgttatgcaaaatgcccagggatttaatgcacaggtgtactttaatgtttagggtcagtttgtagtattcttgagaaaaagataaagggttataatttgaatgtgaactgatccagaaataagtgctgtacctttccactgcacttgaagttcaacttaatggtgtatgtgaaaaacaaaaactactttggttgtgtatgtccaaagtcctatggttttattcatttatggttttacaggctttgaagtactcagatttgatttttgctttcttggaaagactcactttaccaagcatataaaggaaaaatgatttcaaacattgacaagatagatgagtgttaacaaagctttcttttttcgtgtcctccttatttaaaaaggtatacttacaatgtgaagtaacttatgaataaaaggaaaagtttatcccatattcaaataattcctaaggtcagcctccctttttgtaagtggcaaatatctgattaaatcatttctcagtttattaatccttggaaacaatgatatagcagttactcacagcttgtaaattacaacagaaaggttcctttcaaatagtagagctgcacctaaagaggaaattgggtttataagaaaatggaggcaaagaacttaagttttaagaaaaagcacttcaaaacagaagggcaaatggaaaaggggaatataaaacaaaccaataaaaataccatctgagggtgttactgtccaaaagtaaagaataagatgcatcactaagccctttgcactcgttatgacctcgtaagtaaaaattatcacttagaataaggggtgcacactacattccctctgtcttctagacttttttttttgtagaagaatcagaaaacaatttactaacctccctgtttgatattaaaaataggaagaattttaatattttctgttagtacaagttgaacttgattgtgccaactgaaaccccagaggtttgtatatcagtagaatgcaagaacattgttaaaggtgcttacgatcttttttgttttcctttccactccattgtatcaattttttgagtaacttttaaatggctagaaaatggtctttttgctttgcccttttaaagctgaaataaccagctccattcttttcatgaatagtaagttgatatatttatttatcaggtatcttgcagttgtcaccaaatactgtagttttcttatgttgtatggaaattatagttcaattattttaatgtgatagagtgcaacaagtcattgtagaacttttcacctgttaatgttgaagttatacctctgaatttctgctgtggatatcaaggaaataataaagcagaaaccccaagaaatttgcaacttaacagtttgagactgtctcttatcctagtatttgggaagagaaggaataaatttgtcaaaactaggtgagaaaatagagcattgtgggaaaaactgagtccaactagattagcaaatgttaattcctagctcaaactgtgaatagtaaggattgaaaagtaaagtatgtaatgctaagggctgtgttgtcttttcttacgattttaagttttaaaggctgttaaattacagagatgttgcccaaggatacatggggattctcaaaagtaagagatttttacctttttcataatctgccaagctggttcctaatatattgttaaattggtagaaaaatatctttaaattggtgtctgctcaagaattgcttttctagatttgatggagggagggggagagtcacatcatttggattctaccaatctgcaggctctatctttggcaacatgtaaataattagactatacatctgtttctcaagtatggcaagaccaatagtttgaatttaattatcaatgctatggtatactttctggtcatattttagttatgtcagttttaaggtaagttttttcatttattaaagcccttaaatgagattttagactgccaaagagaagaggcagtccaattgacctaactgaaatgagatgaccagtatatagagcctagatggactgtagcagctctacccctttgttttacaaggtaaatcattttaaaaattaccttttttgatcagtgggtaaaagttaaagggatctttaatttttgatatattcaagttaattttctaaatgtgaatcagtccttggactgcaactatatattcacctacaaaatcccaatcaaaaaattacatgagcctgtcaagcagatctttagttttccacttcacataagatcgttaatgttctaaattaatctattcatttagatgatttttgtcagttcttaaatgggatataataaatttagcattttcatcttaacaagcaaaagagttaaaaaacaaaacaaaacactactccaagccaaatacattctagctggttaattccagacttgtcccaagtggttccccaacctcttttccactggtaatttcttttcatgcaggcagaatataggggtgcgagcgctgtgagttttacatatgagcttggataggggaactgaagcgagtcaggagccctgctggaaaaggggtttgccattggattgtctgtggcctggtttctttccagtagtacagtaatagggtagattgaaaacaagtatttacttctgattctgcctgcatttagtgtgaaatgctcttaaggtattgcttctaaaaagcaaattaagcagttaagtataaagtccctgaattcatatttcaaaataaggcttttatgagatttttattaaaaattgcaatagccatcacaaatctgagtttttctaggggtgagagaaaactgtattgtgatgagctagattagttgtagttccagaataagaacaaaaattcagagttgtgtggtgcccatcattgagtaaatgaaccctaaaaatgaataagctaatgaactagttcatggaattatttctgatggtcttttgacctgatgctgccatactgcagtgttaccagctccccctagaaaacggaactgtttaaaaacacagcaagttacagaaaccattttattctacagccattggggtacttcagtttatgggatgtttttggaaacttctgctttgggagggatgaagatcattgataaatgttatttgctttctgagttttggggtcatttcattgcttatcaatgaagggcagacagaggagagaatatctcaagtcttttctgataaaaggcttgcttgagggagcttataacttgcacctagagggtttacccactttgtggatttgatttatccaccaaccacagcaaccaataatgtcaagattctaggagtttatgaaagaggctagtatgttttcattttgagtcagacattcttttctcattctcaaatctgttttaaatgctccaattttaaaaatgccaatgaaaattttataatgcttctgtagtaaccatatgcagtttactttgaatttaggaaaacagttttgtatgatgaaatattgtgcagaatctgtaaataaggtagcttaaaaattaaaaaaaagtctaattagaa

SEQ ID NO: 1225 - DNA, 1157 bp, Homo sapiens
  source 1..1157: mol_type = genomic DNA
acatgcgcacagagcccgggcggctacggaagcggtgagactgtctctcggctgcagccctggtgcgacccggcccgttgccgtagagatgggcagggctggatggagtggggtgcggtgagctgagctgaccctgcttcgccacggggactgcagtgaccccggcttgccggcagggcgggtaacaggttgagccagggtggggctgctcaggggcgtggagccgaggccaggatttctctgaagacccggcacaggctattcctttctgcgacgagcccattgctatggaaaccaaagcgttaggccagcggggattgaggctgcgggatcatgacgggtctctctcccgaagaaccttgcctaaggcttccccaagcggctacttcctgagcgaacccgcccacccgcctgaaggagagagctttgtttaagactgagaaagtgagggtccgagagtctaatgaatgctctgggcacccaggccgcacctgaggagcaccgacgactgcacggtctgcggcgcgggaagcagatctgcggctgaacctctaccccaattacttagcggcgactgagcctatcgagcagttttccatggacacagcctagcagaaagacgcagccttcgtgcttcgctgactgctgaccactgacccaccgccttgatgacagcaccctcgtgtgccttcccagttcagttccggcagccctcagtcagcggcctctcgcagataaccaaaagcctgtatatcagcaatggtgtggccgccaacaacaagctcatgctgtctagcaaccagatcaccatggtcatcaatgtctcagtggaggtagtgaacaccttgtatgaggatatccagtacatgcaggtacctgtggctgactcccctaactcacgtctctgtgacttctttgaccctattgctgaccatatccacagcgtggagatgaagcagggccgtactttgctgcactgtgctgctggtgtgagccgctcagctgccctgtgcctcgcctacctcatgaagtaccacgccatgtccctgctggacgcccacacgtggaccaagtcatgccggcccatcatccgacccaacagcggcttttgggagcagctcatccactatgagttccaattgtttggcaagaacact

SEQ ID NO: 1226 - DNA, 4039 bp, Homo sapiens
  source 1..4039: mol_type = genomic DNA
gactgtactcccaggcccaggccagcagctaatgcaagctgcaatgccaaatggtactgttcagcgattcctctttaccccattggcaacaacagccaccacagccagcaccaccaccaccactgtttccacgacagcagcaggtacaggtgaacaaaggcagagtaaactgtcaccccagatgcaggtacatcaagacaaaaccctgccaccagctcagtcatcaagtgtgggtccagcagaagcccagccacagactgctcagccttcagctcagccccagccccaaacccagccccagtccccagctcagcctgaagttcagactcagcctgaagttcagacccaaacaactgtttcatcccatgtcccttctgaagcacaacccacccacgcacagtcatccaagccccaagttgcagcacagtctcagcctcaaagtaatgtccaaggacagtctcctgttcgtgtccaaagtccatcacagactcgaatacgtccatcaactccatcccaactgtctcctggacaacaatcccaggttcagactacaacctcacaaccgattccaattcaaccacatacatctcttcagataccttcccaaggccagccacagtcacaaccccaggtggtgatgaagcataatgctgtaatagaacatttaaaacagaaaaagagcatgactccagctgaaagagaagagaatcaaagaatgattgtctgtaaccaggtgatgaagtatattttggataagatagataaagaagaaaaacaggcagcaaaaaaacggaagcgtgaagagagtgtggagcagaaacgtagcaagcagaatgccactaagctgtcagctctgctcttcaagcacaaagagcagctcagagccgagatcctgaagaagagagcactcctggacaaggatctgcaaattgaagtgcaggaagagctgaagagagacctgaaaattaagaaagaaaaagacctgatgcagttggctcaggccacagcagtagctgcaccctgccccccagtgacaccagctcctccagcccctccagcccctccaccttcacctccccctccacctgctgtgcaacacacaggccttctgtccacgcccaccttacctgctgcttcccagaagaggaagcgggaagaggaaaaagactccagctcaaagtccaagaaaaagaaaatgatctctactacctcaaaggaaactaagaaggacacaaagctttactgtatctgtaaaacgccttatgatgaatctaagttctatattggctgtgatctttgtactaactggtatcatggagaatgtgttggcatcacagaaaaggaggctaagaaaatggatgtgtacatctgtaatgattgtaaacgggcacaagagggcagcagtgaggaattgtactgtatctgcagaacaccttatgatgagtcacaattttatattggctgtgatcggtgtcagaattggtaccatgggcgctgcgttggcatcttgcaaagtgaggcagagctcattgatgagtatgtctgtccacagtgccagtcaacagaggatgccatgacagtgctcacgccactaacagagaaggattatgaggggttgaagagggtgctccgttccttacaggcccataagatggcctggcctttccttgaaccagtagaccctaatgatgcaccagattattatggtgttattaaggaacctatggaccttgccaccatggaagaaagagtacaaagacgatattatgaaaagctgacggaatttgtggcagatatgaccaaaatttttgataactgtcgttactacaatccaagtgactccccattttaccagtgtgcagaagttctcgaatcattctttgtacagaaattgaaaggcttcaaagctagcaggtctcataacaacaaactgcagtctacagcttcttaaagttcagcgtgttaacctaacataaaacacagcaagaatctggttgtctgaactattttaaattaaggagccagatgtttttagtcaggctatcctgacaagacttgacctaaacttcgtttttattggtcataacagtccaattatattcttggccaattttgtccaacggacaagaaaaaagcaaagtcaacgacaccattatcttgtcaagatcagatggttttactattgtggcagaagcgagaaaactttgtttattgaaaaaaaaagaaaaagaaagcaagaaaaaaagatactatggggtcaagtgtaactccatggaaatgccacgtctgctcttcagtgaagaagctggtttagagtctcacagaaaacttttgactgtatttatttattgttgcaaaaaagacgcttttttattgctgccctcatttgtcagctaattattttttcttataaaatccagccccggttacatataatcatctgtatcttatcatgattcctgtaggtaaaagtacaagacgacctctagatgtcttttctttctatgaaaggagctgctatgtacacatgtgcacacacacacaactgggaatcaacaatgagtttattgttcatggtagattaaaattaagcttgcataaaggttgggctaagtggtcctggactacagactctgttgccttgaatataacagtacaatttgtcaattactctgcaccaggctaaaatgagtaaaatctatttgaaggtatcttgtttgtaaacatttgtcagattctaatttttttcttttgtattaaaattcaactatggatgtatatgaaacaaaataaatggagataatttttctcccacagacagaggtgtctttgaatgtgcgctaatgattatctgtaagcctttgtggggagggaggcctgcaaggtcatgaaaggcagaagagtctaattgtgcctggatttctccaggacagcagtggcccctcgttttatcattcccagtccattgtcatcacgtcagagaaaaatcttcaggggtgctaatcctgttgcatcagttgatcatactaacgagaacggtaatgcgacaagatacacattgccttcatctgtacattctgtgataccaggcaaattaccaattacacacagctacttatattttatgaagggcattttttagatgacctcatcctctgtgttatttgttgattgggtttgttttctgtttgttggtttgtttgtttcttccacgtaaggaaaagtagtgtaaacagtagcgagaaaatggaaaccacagaggaagatgtattttgcatgtttttcctttcagtgttcttacacgttgtatcactgcattgtggtaatagcttctataaaatctgccatagttggattatgcagctttgcaaaaatttttactagattttgcactaactcatattagctttgtcctaccaacttctggaatttatctaattattgtttttcaaagtttctttccttttaatgtttccctgctatgcaaaacctttcccagacctcagtttcttaaaagaaagatgttgctacagttcccgattctttcttattacaggctcaggtgtacaggttattctgggttaattttatctaatgaagcccattcctttttgtacataaagatgtcacttaaacttatgcttacaaactaaagactaatcgctcaatatgaaaacatgaaaaaatttttgcttaaagtattaagatggaagtagttaaatatgggttattttgtccttttacttttttaaaaaatgttacatattgtatgcactgtgctgatgcaagaattctacattttaatgagttataaaattattctgcatctcatcacgtcacagtatttctgtactatttattcatatatataaatatatatgggcttaatcatttaaaatttgttgcagcaagaactttcctacctgtaggcaatagattgctatgtttttaacaaattgtggcaaattctaaacagcaattcttttgtacgtaataggacatttcatcctagaaaaataaagtaatgtttttgacattg

SEQ ID NO: 1227 - DNA, 1117 bp, Homo sapiens
  source 1..1117: mol_type = genomic DNA
tctccaacgaagtcttatattttaccattctgcgtgtattagaaagctaaatttaaacagcaacaataagaaatcttccccagtggatccctcgagcctttcgggaaaatgcaggtttctggctgacaggaagaagaaacagcatccaatcggcacttgtgtctcaatgaccaatcaaatttcgccttacattgcatcgctgggataaacggagctggacgactcagtctcttggtctgtggctgctgcggttacctggatgggcgagcacctctgaggctggctttgttacctgggcaataagggactagcagttcagccgttttctatgcctgctggatttgtttgtatttgttcccagccactgctcatgtaatgtactcccttaaccaggaaattaaagcattctcccggaataatctcaggaagcaatgcaccagggtgacaacgctaactggaaagaaaattatagaaacatggaaagatgccagaattcatgttgtggaagaagtagagccgagcagtgggggtggttgtggttatgtgcaggaccttagctcggacctgcaagttggcgttattaagccatggttgctcctagggtcacaagatgctgctcatgatttggatacactgaaaaagaataaggatggagtggttcttgttcattgtaatgcaggcgtttccagggctgctgcaattgtaataggtttcctgatgaattctgaacaaacctcatttaccagtgctttttctttggtgaaaaatgcaagaccttccatatgtccaaattctggcttcatggagcagcttcgtacatatcaagagggcaaagaaagcaataagtgtgacagaatacaggagaacagttcatgagttgcattgtagcagacaatggacaactgtagtttctgaattgacttctatagccatcttttcccttttttggagagtagactagcaaaactcccttttttctcttgccttttttatgcataaatggaggtcaatttgattgtcctgacctactgtataagtaaatttcaaatgtcattactttctctttgttattataatgtgtgattaaatgcttttttaaattgctaagggaaaataa

SEQ ID NO: 1228 - DNA, 2365 bp, Homo sapiens
  source 1..2365: mol_type = genomic DNA
agaccagaaacggaagagagcgcgggggatgtgtttggcgtggggcgcactgttcagttgctctcctggatggctttatgtctccgcggtgtttcctagagtctcggcgtttctacctcttcgcaccctttcctgccaccctttgtcccctggaagcccggagacatcagcggctgcaattttgctactcgctgctcggcgtggaactgtcaggacaaaaaataatatccaaagatattttggcactaacggcgctatctgtagcaagaaagttgagcagtgtgaactgttgagacttccaaggagacttcagacaaccaagacagtgtaaaggaaaacagagaaaaagacttgttagacattattaagggcacgaaagttgaattgagcacagtaaatgtacaaacaacaaagccacccaacagaagttcacttaaaagctacaactggcgggcctcaaagagctttaggacatgctccaaagaagagaaatgagcccctgagtcctgagttggtggcagctgcatctgctgctctgttttgacaagcaaacaagccagaactgctcaggcagctccgtagcatgaggaagagtcaggggcacagagagatggagagagacctagttagtttcaataacaaaatatcagatatgaaaattgccagatgtgctacagctagaattaatataaggccagagcatcagattcagtttgaccaaggctatgacaattatcctggcctggagaagactgctgatcttagaaacaggaaaaatatattcagggggaagagatgtaatagatttcacattatggcagttactaaagaagcacgtgaacagacacatcaccttcactttgggatatggaatttgataagcagttagccacagaatatgaacaaccccttgagaatgagattgaagaactgatccaggggacaaaagaggggaaactgagagttcccaattaataatgaagcagcttcatatctaagatctctggtggactttttctgcccgtggacgccgctgaagaagcatcgttaaagtctctcttcaccttgccgtcatgtctaagtcagcgtctccaaaagagcccgaacagctgaggaagctcttcattggagggttgagctttgaaacaactgatgagagcctgaggagccattttgagcaatggggaacgctcacagactgtgtggtaatgagagatccaaacaccaagcgctccaggggctttgggtttgtcacatatgccactgtggaggaggtggatgcagctatgaatacaacgccacacaaggtggatggaagagttgtggaaccaaagagagctgtctccagagaagattctcaaagaccaggtgcccacttaactgtgaaaaagatatttgttggtggcattaaagaagacactgaagaacatcacctaagagattattttgaacagtatggaaaaattgaagtaattgaaatcatgactgaccgaggcagtggcaagaaaaggggctttgcctttgtaacctttgacgaccatgactccgtggataagattgtcattcagaaataccatactgtgaagggccacaactgtgaagttagaaaagccctgccaaagcaagagatggctagtgcttcatccagccaaagaggtcgaaggggttctggaaactttggtggtggtcgtggagatggtttcggtgggaatgacaactttggtcgtggaggaaacttcagtggtcgtggtggctttggtggcagctgtggtggtggtggatatggtggcagtggggatggctataatggatttggtaatgatggaagcaattttggaggtggtggaagctacaatgattttggcaattacaacaatcagtcttcaaattttggacccatgaagggaggaaattttggaggcagaagctctggcccctatggcggtggaggccaatactttgcaaaaccacaaaaccaaggtggctatggcgtttccagcagcagcagtagctatggcagtggcagaagattttaattaggaaacaaagcttagcaggagaggagagccagagaagtgacagggaagctacaggttacaacagatttgtgaactcagccaagcacagtggtggcagggcctagctgctacaaagaagacatgttttagacaaatactcatgtgtatgggcaaaaaactcgaggactgtatttgtgactaattgtataacaggttattttagtttctgttctgtggaaagtgtaaagcattccaacaaagtgttttaatgtagatttttttttttgcacccatgctgttgattgctaaatgtaatagtctgattgtgacgctgaataaatgtctct

SEQ ID NO: 1229 - DNA, 752 bp, Homo sapiens
  source 1..752: mol_type = genomic DNA
gtaccattcttcaagaaacggtttgaatcagactgcctttccttttgtcttcattgtcataaacatctgcccccgtgtggttctgactggccgcgaacccctacccgaagcttttattccatcattgtgcaccgttggtggggaatgctgtggcaacaggccacgcctccacttactggttggctttgcgcaggcgccaacggaagtgggtcgcaggaagaggaagtcccgcctctctctcctcaggcagcagcaacgcggaggaaacgggagtgaacggagagcgtagtgaccatcatgagcctcctcaacaagcccaagagtgagatgaccccagaggagctgcagaagcgagaggaggaggaatttaacaccggtccactctctgtgctcacacagtcagtcaagaacaatacccaagtgctcatcaactgccgcaacaataagaaactcctgggccgcgtgaaggccttcgataggcactgcaacatggtgctggagaacgtgaaggagatgtggactgaggtacccaagagtggcaagggcaagaagaagtccaagccagtcaacaaagaccgctacatctccaagatgttcctgcgcggggactcagtcatcgtggtcctgcggaacccgctcatcgccggcaagtaggggccgcctgtctgttgacagaactcactcctctgtcctatgaagaccgctgccattggtgttgagaataataaagctctgtgtttttttctagtggt

SEQ ID NO: 1230 - DNA, 3118 bp, Homo sapiens
  source 1..3118: mol_type = genomic DNA
cgcagaagaaccacaaaccccagaagccctcgcgcccactcttctccctcccctccagaagtcggagtgctgtttttgttgttggtgaaaggtgaggggaacagctgatccgtctgttgggaggacagatatctcaaggccaggatggaagaatcaccactaagccgggcaccatcccgtggtggagtcaactttctcaatgtagcccggacctacatccccaacaccaaggtggaatgtcactacacccttcccccaggcaccatgcccagtgccagtgactggattggcatcttcaaggtggaggctgcctgtgttcgggattaccacacatttgtgtggtcttccgtgcctgaaagtacaactgatggttcccccattcacaccagtgtccagttccaagccagctacctgcccaaaccaggagctcagctctaccagttccgatatgtgaaccgccagggccaggtgtgtgggcagagcccccctttccagttccgagagccaaggcccatggatgaactggtgaccctggaggaggctgatgggggctctgacatcctgctggttgtccccaaggcaactgtgttacagaaccagctcgatgagagccagcaagaacggaatgacctgatgcagctgaagctacagctggagggacaggtgacagagctgaggagccgagtgcaggagctcgagagggctctggcaactgccaggcaggagcacacggagctgatggaacagtacaaggggatttcccggtcccatggggagatcacagaagagagggacatcctgagccggcaacagggagaccatgtggcacgcatcctggagctagaggatgacatccagaccatcagtgagaaagtgctgacgaaggaagtggagctggacaggcttagagacacagtgaaggccctgactcgggaacaagagaagctccttgggcaactgaaagaagtacaagcagacaaggagcaaagtgaggctgagctccaagtggcacaacaggagaaccatcacttaaatttggacctgaaggaggcgaagagctggcaagaggagcagagtgctcaggctcagcgactgaaagacaaggtggcccagatgaaggacaccctaggccaggcccagcagcgggtggccgagctggagcccttgaaggagcagcttcgaggggcccaggagcttgcagcctcaagccagcagaaagccacccttcttggggaggagttggccagtgcagcagcagccagggaccgcaccatagccgaactacaccgcagccgcctggaagtggctgaagttaacggcaggctggctgagctcggtttgcacttgaaggaagaaaaatgccaatggagcaaggagcgggcagggctgctgcagagtgtggaggcagagaaggacaagatcctgaagctgagtgcagagatacttcgattggagaaggcagttcaggaggagaggacccaaaaccaagtgttcaagactgagctggcccgggagaaggattctagcctggtacagttgtcagaaagtaagcgggagctgacagagctgcggtcagccctgcgtgtgctccagaaggaaaaggagcagttacaggaggagaaacaggaattgctagagtacatgagaaagctagaggcccgcctggagaaggtggcagatgagaagtggaatgaggatgccaccacagaggatgaggaggccgctgtggggctgagctgcccggcagctctgacagactcagaggacgagtccccagaagacatgaggctcccaccctatggcctttgtgagcgtggagacccaggctcctctcctgctgggcctcgagaggcttctccccttgttgtcatcagccagccggctcccatttctcctcacctctctgggccagctgaggacagtagctctgactcggaggctgaagatgagaagtcagtcctgatggcagctgtgcagagtgggggtgaggaggccaacttactgcttcctgaactgggcagtgccttctatgacatggccagcaccatcttctgcagagcccaaattgccctgcttcccctctctcctgcctctaccccttccccaaccaccagtggctttacagtgggtaccctgtcagaaaccagcactgggggccctgccacccccacatggaaggagtgtcctatctgtaaggagcgctttcctgctgagagtgacaaggatgccctggaggaccacatggatggacacttctttttcagcacccaggaccccttcacctttgagtgatcttactccctcgtacatgcacaaatacacactcatgcacacacacactcacacacatgcatacacttaggtttcatgcccattttctatcacactgggctccatgatattctgttccctaagaactgcttctgtgtgccctgttttcatcccaagatttctcacttcatcctctcctacctggctcttttgtcccagggaggggtcctgttcggaagcagtggctgaatttatcccctgaaagtggttttggaggaaccgggatggaggaggccttcccctgtgggaatagaatcgtccactcctagccctggttgcttctgatacacagccactgcacacacacactcacactcacactcccttgtctgatgccccaaagccaattcctggggcaccctaccctctcttatttggagtttccgttggtttacctgagttttctctggggtctgcacagaggcagcagcatggacatcatggcctctcaggtcccttttggttctcagtttcattggttcctctttctgttcccccattgacttctgtgccccaccctagccttttccataaccttaggtattcagtttggaggggttttttgtatttttgaggattcctgtattctgtatcctctcctcgcatctcctcacatggaaagaaataatgtatttgtgccttctgtgaggaatggggggaacaagtggtcccaggtatccccatttccaaggcccccctccctctccaggtccccccacagcaataaaagcttccccctgatatccatccctttgtagtttgaacaaatatatttatatgatatgta

SEQ ID NO: 1231 - DNA, 4401 bp, Homo sapiens
  source 1..4401: mol_type = genomic DNA
ctgcaggtcattctgctggacagcaaccctctgcagagtccacctgcccaggtctgcctgaaggggaaacttcacatcttcaagtatttgtccacagaggccgggcagcgtgggtcggccctgggggacctggccccttctcggcccccgagtttcagtccctgccctgcagaggatctatttccgggacatcggtacgatggtgggctggactcaggcttccacagcgttgatagtggcagcaagaggtggtctggaaatgagtcaacagatgaattttcagagctgtcattccggatctcagagctggcccgggagccccggggacccagagaacgcaaggaggatggctcagcggacggagaccctgtgcagattgacttcatcgacagccatgtccccggggaggatgaagagcgaggcactgtggaggagcagcgaccacccgaattaagccctggggcaggggacagggagagggcaccaagcagcaggcgggaggagccggcaggggaggagcggcggcgcccggacaccttgcagctgtggcaggagcgggaacggcggcagcagcagcagagcggggcgtggggggccccgaggaaggatagcctcttgaagccagggctcagggctgttgtgggaggggccgccgccgtgtccactcaagccatgcacaacggctcgcctaagtccagtgcctcccaagcaggggctgcagcggggcagggagcccccgcccctgcccctgcctcccaagagccccttcccatagctggaccaggtgggacagggattttgggaggaggatggggcctgtgttggtgagggctggttgggagagagggacacagaggggatgcctgtctcacctgcccctgtcgctgtgtccctggttccggccccagcgacagcacctgctccacggccacttggctccattcagagaccaaacagcttcctcttccgttcctcctctcagagtggctcaggcccttcctcaccagactctgtcctgagacctcggcggtacccccaggttccagatgagaaggacttaatgactcagctgcgccaggtccttgagtcccggctgcagcggcccctgcctgaggacctggccgaggctctggccagtggggtcatcctgtgccagctggccaaccagctacggccgcgctccgtgcccttcatccatgtgccctcccctgctgtgccaaaactcagtgccctcaaggctcggaagaatgtggagagttttctagaagcctgtcgaaaaatgggggtgcctgaggtatgggggctgctttctaaagagtggtggcatgccggactcagccgagcatgtggcatggatggtgggcttccatttgcagcggatgtctgctctcagatgaaggcacaggctgcccctgccctgcccagcatgccccctgccctgcatgccccctgccctgcatgtcacctgtcctacacatcccctgccctgcaggccccatcttgtcctgcatgtcacctgtcctgcacatgccctgccctgcactcctcctgcactgcactccccctgcccagcacgtcagcatgtgggcgtggttctggccccagcacgtgagggcaggggtgggagggactgtcctgctgctgctgctgacgtctgtcccttgtccttgtccacctgctctcctctcccccaggctgacctgtgctcgccctcggatctcctccagggcactgcccgggggctgcggaccgcgctggaggccgtgaagcgggtggggggcaaggccctaccgcccctctggcccccctctggtctgggcggcttcgtcgtcttctacgtggtcctcatgctgctgctctatgtcacctacactcggctcctgggttcctaggccccaaaatcggccctccctcacccctttcccttcctctctatttataaggtccctgctccacccgaccccacctgcggtgccttcagccccaaccaaagacactagtgcacccccttcacagacactgacctcagaggccccactctggtgcccccagaccctgggcccccagcctctggcctccctccagtagccccacgagtccccacctctcagtgctgacggtgccttcatgtccccgccggccctgcccctgccctctgtaccccgtgaggggtggcaggagctggagtctcccccttcctcctgtgccctccccttccccccccaacagctgctatgggggggctaaattatctctattttgtagagaggatctatatttgtaggggttcggggcccaggccgggtccctatctctgtgtataaactgtacagaccgtggccgccctgcctgtgtgtgtgtgtgtgcgcgcgcgcgcgcgtctgctccgcgtgttggtggctgtggccatggctctgtgcccaccagcatctccctcctgagatgccggcctctcatgctcccggagcgtccgccaaccccccgtgtcacctcccttctgttatcgctgacagctttcttgcgtctcatttgtcgccgagccccgagcgcacggtgatgctcgggtctgcccccgaccccctgccacaggccggaagccgcagggggcaccgtggggaagctaacccggccccttcccccaggagtcactgtgccagccccaccacatcctggaagaggagggggccccgggaaggggcctcccctacatcgctgctgtcgtccacgccctgctggaccggccttaggggtgaaggtgggggcacagggcccaccccgcccgggaccccgggagcagaagacgcgcctgggctccgcgctctcagagaagcacgtggtgagggtggcctgggcctgggcacccttggcctgccggcctggctgcctctggggtcgagggtctgggtggaaggaccgcgggtgtcgcaggtgtcgtgtcagccgcaataaacagaagccagaagccctctgggtggccctcaggtgtaactgtgtctgagagcacgtgcgtcgcggggttgttgggggggcctctgtttccggaattcaccgcccagtcgccagggggcgcccgcgggagcccggcgggggcacgcgccacgtggccgggagacgcacagggcgccagcgtcgccgcgaggcctctggggtgggttcgccaggagggcacgttcgcgccgcgccgcggagggaggctgagagggccgggccgggcggcggggacacggcggtaccgtcctgcgctcgggaacgcggaatgttgccctggtcgccgccgcggtggggcgcgggcccggaggaggcgcccgagggaccaggccttccggcgggcaaggaccagggcgagccctggagcgccggagcggacgcccccagggagctggggacacccccatgggacaggtgaggggctcggacggagccgtggggggacagcgactgggggcctccatgccttcaccacgcgctctacggaggcttctccattgtccctgctggagattgggtccctcggtctcccttgcaccaggcacccttgggctccaggggagggtgcgtgggggcggtgtggctgcagcctcagtccctgcccctccagcccacagcccccatcccgtagcccttcctggatctggagagagcagctgctgctgccccaccacctgccaggcccggccactgagcagccccccggagccccagatccccgttccccccaggtggcctgggaggtggccccctcgaggatgactccactagcgccctgggaccccaagtatgaagccaaagcaggacctcggccggtgtggggggccaactgtagctcaggagcctcgttctcaggccggacgctgtgtcacccctcattctggccgctgtatgaagcagcctcgggcaggggtctcaggcccgtggcccctgccacagggcactggaatggacagcaggcgcccccagatgcagggttcccggtggtgtgctgtgaagatgtcttcctctcggaccctctgctgccccgggggcagcgtgttcccctgtacctgtccaaggccccccagcagatgatgggctccctgaaactgctgccgccgccccccatcatgtctgccagggtgctcccccgcccatcaccctcccggggcccctccactgcctggctcagcgggccggagctgatcgctctcactggcctgctgcagatgagccagggggagcctaggcccagctcctccgcggttggccccccagaccatacctctgacccacccagcccctgtggtagccccagcagttctcagggtgctgacctctctctcccacagaccccagacacccattgtccatagccttctcagggcagagtgggctggttgtgttgacaataaaacagtgttggtttgc

SEQ ID NO: 1232 - DNA, 2433 bp, Homo sapiens
  source 1..2433: mol_type = genomic DNA
agtttccaaggtggaagctgggtccggctgccaggaagcggccggtgcgcgggctgcgcgggctgcgcggggctcggcttccacgtgcgagcctgcaccgccgccccgccctctcctggcggccaggcctggggactctctgccgcgggacggcgcctcgcgttccgccgtggcagtggccgtggccagaacgtccacgcgcggtcgtccaccgccggatctcgctccagcgcccgtggtccagcgtgtagggagccgatcgcccatggagggtctgggccgctcgtgcctgtggctgcgtcgggagctgtcgcccccgcggccgcggctcctgctcctggactgccgcagccgcgagctgtacgagtcggcgcgcatcggtggggcgctgagcgtggccctgccggcgctcctgctgcgccgcctgcggaggggcagcctgtcggtgcgcgcgctcctgcctgggccgccgctgcagccgcccccgcctgcccccgtgctcctgtacgaccagggcgggggccggcgccggcgcggggaggccgaggccgaggccgaggagtgggaggccgagtcggtgctgggcaccctgctgcagaagctgcgagaggaaggctacctggcctactacctccagggaggcttcagcagattccaggccgagtgccctcacctgtgtgagaccagccttgctggccgtgccggctccagcatggcgccggtgcccggtccagtgcccgtggtggggttgggcagcctgtgcctgggctccgactgctctgatgcggaatccgaggctgaccgcgactccatgagctgtggcctggattcggagggtgccacacccccaccagtggggctgcgggcatccttccctgtccagatcctgcccaacctctatctgggcagtgcccgggattccgccaatttggagagcctggccaaactgggcatccgctacatcctcaatgtcacccccaacctcccaaacttcttcgagaagaatggtgactttcactacaagcagatccccatctccgaccactggagccagaacctgtcgcggttctttccggaggccattgagttcattgatgaggccttgtcccagaactgcggggtgctcgtccactgcttggcgggggtcagccgttctgtcaccgtcactgtggcctacctcatgcagaagctccacctctctctcaacgatgcctatgacctggtcaagaggaagaagtctaacatctcccccaacttcaacttcatggggcagttgctggactttgagcgcagcttgcggctggaggagcgccactcgcaggagcagggcagtggggggcaggcatctgcggcctccaacccgccctccttcttcaccacccccaccagtgatggcgccttcgagctggcccccacctagggccccgtggccggcaggccggcccctgccccacccccacccacgggtgtccctgcccactcgtgtggcaagggaggggagggcaggagggctcggcctgagcagggtgctggggggagagcgcaatacctcacgcgggctgccgtcctaatcaacgtgcctatggcgggaccacgctcggagcctgcctcttctgcgactgttactttttctttgcgggatgggggtgggggttccctctccaggtggttgtccaggcccatgtcccggccctgggtgctcagccagctcggctaggccctgcgcctccctgcgcttcccccttcaggaagggtgtgtgccacctcgttgcactggatcccagtggctgcttgggggagaggcgtttgccatcactggtgttgtcacctccctgtttctccaccaagggcttgggcctctcggggctggggcctcccaggggatggggacccagagtgcagtggccgcccacatccatggcctaggagctactgggcaggttcccggccacacatctggtgggctgttttgttttttttttttcctcttcccccagatgtcttgacgggatcactggggctctttgtgagtgagggtggccaaactaccgccggaggagatggggtctcagagcgagagctgcggagggggaggggaagaagaaggcctcacttttgctgctgcggggcccacacagccgctgctactttggggggtggggaaggggccaagctgcagacacacacagtcattcatttctgtccacacccctgtgggtggcgggtgtgcgtgtgtgtgcttgtgtgtgcgcacgtgtcggcgctcacacacacatgctagcccactgatgcacccagcccagggctggcagtctttgcagcgtggggccgtctcaccctggagcctggagaggatctatgcttgtttgtttttgtaatccatatcatagttgctttctttaattgttccttctgaataaacagtttatttaa

SEQ ID NO: 1233 - DNA, 3254 bp, Homo sapiens
  source 1..3254: mol_type = genomic DNA
gcactcggctcggcccggcccgggccgcagcatggccgagccgctactcaggaaaaccttctcccgcctgcggggccgggagaaacttccccggaaaaagtcggacgccaaggagcgcggccacccagcccagcgcccagagcccagccctccagagccagagccccaggctcccgaagggtcccaggccggagcagaggggccctccagccccgaggcatcaaggagccctgcacggggagcctacctgcaaagcctggagcccagtagccgccgatgggtgctgggtggggccaagccagctgaggacacctctttagggcctggggtacctggcactggggagcccgccggcgagatctggtacaaccccatccctgaggaagaccccagacctccagcacctgagcccccggggccacagcctggctcagctgagtcagagggcctggccccccaaggtgcagcccccgccagccccccaaccaaagcctcccgcaccaagtccccgggccccgccaggcgcctctccataaagatgaagaagctgccggaactgcggcgccgcctgagcctgcgaggcccccgggctggcagggagcgcgagagggctgcccctgcgggctccgtcatcagccgctaccacctggacagcagcgtggggggccccgggccggcagcagggcctgggggcacccggagcccgagggccggttacctcagcgacggggactcaccggagcgcccagctgggcccccatcacccacctccttccggccctacgaggtgggtcccgcagcccgggcacccccggccgcactctggggccgcctcagcctgcacctgtacggtctcggggggctgcggccagcgccgggggccacccccagggacctctgctgcctactgcaagtggatggggaggccagggcccgaacagggccactgcgaggggggccggacttcctgcggctggaccacaccttccacctggagctggaggccgccaggctcctgcgcgccctggtgcttgcgtgggaccctggcgtgagaaggcaccggccctgtgcccagggcaccgtgctgctgcccacggtcttccgagggtgccaggcccaacagctggccgtgcgcctggagcctcaggggctgctgtatgccaagctgaccctgtcggagcagcaggaagcccctgccacagctgagccccgcgtctttgggctgcccctgccactgctggtggagcgggagcggccccccggccaggtgcccctcatcatccagaagtgcgttgggcagatcgagcgccgagggctgcgggtagtgggactgtaccgtctttgtggctcagcggcagtgaagaaagagcttcgggatgcctttgagcgggacagtgcagcggtctgcctatctgaggacctgtaccccgatatcaatgtcatcactggcatcctcaaggattatcttcgagagttgcccaccccactcatcacccagcccctgtataaggtggtactggaggccatggcccgggaccccccaaacagagttccccccaccactgagggcacccgagggctcctcagctgcctgccagatgtggaaagggccacgctgacgcttctcctggaccacctgcgcctcgtctcctccttccatgcctacaaccgcatgaccccacagaacttggccgtgtgcttcgggcctgtgctgctgccggcacgccaggcgcccacaaggcctcgtgcccgcagctccggcccaggccttgccagtgcagtggacttcaagcaccacatcgaggtgctgcactacctgctgcagtcttggccagatccccgcctgccccgacaatctccagatgtcgcgccttacttgcgacccaaacgacagccacctctgcacctgccgctggcagaccccgaagtggtgactcggccccgcggtcgaggaggccccgaaagccccccgagcaaccgctacgccggcgactggagcgtttgcgggcgggacttcctgccctgtgggcgggatttcctgtccgggccagactacgaccacgtgacgggcagtgacagcgaggacgaggacgaggaggtcggcgagccgagggtcaccggtgacttcgaagacgacttcgatgcgcccttcaacccgcacctgaatctcaaagacttcgacgccctcatcctggatctggagagagagctctccaagcaaatcaacgtgtgcctctgagccagatgacggggtgggaccccggttagtaaggaccgggcgcccagtggctaaggcggtgccctggtgaccaaggagagccagacctgttgctcaggccgagctcctggttgccagcgagttaccacgggaccagtcgcgtgtatggctgagactcattcccagtttccagggcccggtatttggacactagttgccaagtctggggcctggggattttagggaccagcggttgtgaccatctttcctgagcaccaagggcttccccttttgttgccaaaaaggtagttctcgcgcttgctaggctggcctctcttgcctccccttggccggggcaacaccagttactgtgagcatcaccctggtgtggtgagtcacctctagtcggccctcttgctgctgccaaccaaatcagtattagctttgagcactgcactgtttctccctcccttggacgacacaaagactagcatgaggcactgtttgtggggggcagcccctatcctgggttccagcatggacacaggggtagcctggggcttatagagaaacagctggtttcccctacccttttccggggaagtccccacgattggcctctagtcagcaaatggagataacagagtctggcctttccaatccccatctccttgccccccccttgcccccccccccgaaaaaaattgagcacttaaacccctcccttttggagggggccccctgaagcgtcaggctgggggcagtctggtacggaacatatttattgcctccatgcatgtgtgtgtgtgtctgtgaggactggtgtgcgtggacacgtctgaagcaggcgtgtggggctctttcagggaccacagaggagggagcagtttgcagtgcccagccaccctgaaatccccaataatggtgcctcagtgggccccagagttccagtgggagagtacggttccctcctgtctccctcttcttttccgcacctccatctttgtggataataaataaatatgcacaggttctg

SEQ ID NO: 1234 - DNA, 1461 bp, Homo sapiens
  source 1..1461: mol_type = genomic DNA
gcgtggcaggagaggcggggccaattttgctgagctttctcgcgggcttgcagctgcggcaagtgctggcggcggctgctcgcgcaagtcagctggcgtgggaactaccctttgtagctgagaacggcttgtttattgctacaaagactctattgacattggtagcttcagcggcagcagcttcttacggtataaagctgttgcttcctgaagaggctacaagcatccttccctaggactgctgtaagctttgagcctctagcaggagacatgcctcggggacgaaagagtcggcgccgccgtaatgcgagagccgcagaagagaaccgcaacaatcgcaaaatccaggcctcagaggcctccgagacccctatggccgcctctgtggtagcgagcacccccgaagacgacctgagcggccccgaggaagacccgagcactccagaggaggcctctaccacccctgaagaagcctcgagcactgcccaagcacaaaagccttcagtgccccggagcaattttcagggcaccaagaaaagtctcctgatgtctatattagcgctcatcttcatcatgggcaacagcgccaaggaagctctggtctggaaagtgctggggaagttaggaatgcagcctggacgtcagcacagcatctttggagatccgaagaagatcgtcacagaagagtttgtgcgcagagggtacctgatttataaaccggtgccccgtagcagtccggtggagtatgagttcttctgggggccccgagcacacgtggaatcgagcaaactgaaagtcatgcattttgtggcaagggttcgtaaccgatgctctaaagactggccttgtaattatgactgggattcggacgatgatgcagaggttgaggctatcctcaattcaggtgctaggggttattccgccccttaagtagatctgaggcagacccttgggggtgtaaaagagagtcacaggtaccccaaggagtagatgccagggtcctaagttgaaaatgatgtcgattgggggcgggggacactgtatttgatatttgtgatcagtgatcattgttcaactgcgaaatagagtgtttgcttttgataatggaaaattgtattcgttttaaaattccgtttgttgagaataacaatatgtttaaaaatataattgaacaaatttttttctttgtttcctgtcattgacatttagtataacagttttgctaacgttctaaaatgaagtcgttccatcataatctatgatcttgtacagcacttatagaaataagctgttcttttgaagttgaaatacccagtaaaatgttgaagaaggatggaggatttcttcatatctgacgtttctgaaaccctttgtgtctgctgttgtgtgaagattgacatttaccatgattttccttagttactgcagaacatagagaaaaataaaagcctaacgaatagt

SEQ ID NO: 1235 - DNA, 830 bp, Homo sapiens
  source 1..830: mol_type = genomic DNA
tcctccacttcgtcccggcccttgtcctgtggcaggtgctccgctcaagatgaatctcaacttcacctctcctctacacccggcgtcttctcagaggcccacatccttcttcatcgaggacatcctgctgcacaagcccaagccgctgagagaggtggccccagaccatttcgccagctctctggcctctcgggtgcctctgctagactatggctaccccctcatgcccacacccaccctcttggctcctcacgcccatcaccctctgcataagggagaccaccatcatccttatttcctcaccacctcggggatgccagtcccagcgctgttcccgcacccgcagcacgcggagctgccggggaagcactgccgccgccgcaaagcccgcacggttttctctgactcgcagctctcgggcttggagaagaggttcgagatccagcgctacctgtccacgccagaacgagtggagctggccacggccctcagcctgtccgagacgcaggtgaaaacgtggttccagaaccggcggatgaagcataaaaagcaactgcggaaaagccaagacgaacccaaagcaccagacgggccagaaagccccgagggcagcccccgcggttcagaggccgccaccgccgccgaggctcggctgagcctgcccgccggtcccttcgtgctgaccgagccagaggacgaggtggacattggagacgagggggagctgggctcagggccgcacgtgctctgagccgccaggctggggagggtagtaggcaggggaggagactgcggggccgagcgcggttccctcctggaccggaagactc

SEQ ID NO: 1236 - DNA, 873 bp, Homo sapiens
  source 1..873: mol_type = genomic DNA
atggagctgccagctgttggcgagcacgtcttcgcggtggagagcatcgagaagaagcggatccgcaagggcagagtggagtatctggtgaaatggagaggctggtcgcccaaatataacacgtgggaaccggaggagaacatcctggaccccaggctgctgatcgccttccagaacagggaacggcaggagcagctgatgggatatcggaagagagggccgaagcccaaaccgctagtggtgcaggtgcctacctttgcccgtcgttccaatgtcctgaccggcctccaggactcctccactgacaaccgtgccaagctggatttgggcgcgcaggggaagggccaggggcatcagtacgagctcaacagcaagaagcaccaccaccacgccgtcggcctgaatctctcccacgtgcgcaagcgctgcctctccgagacccacggcgagcgcgagccctgcaagaagcggctgactgcgcgcagcatcagcacccccacctgcctggggggcagcccagccgctgagcgcccggccgacctgccaccagccgccgccctcccgcagcccgaggtcatcctgctagactcagacctggatgaacccatagacttgcgctgcgtcaagacgcgcagcgaggccggggagccgcccagctccctccaggtgaagcccgagacaccggcgtcggcggcggtggcggtggcggcggcagcggcacccaccacgacggcggagaagcctccagccgaggcccaggacgaacctgcagagtcgctgagcgagttcaagcccttctttgggaatataattatcaccgacgtcaccgcgaactgcctcaccgttactttcaaggagtacgtgacggtgtag

SEQ ID NO: 1237 - DNA, 826 bp, Homo sapiens
  source 1..826: mol_type = genomic DNA
ggcgctgagttttgtctcccgggccgtctgggcgcgcgcgggtgtcccagaatgaaatatgactgaggactctcagagaaactttcgttcagtatattatgagaaagtggggtttcgtggagttgaagaaaagaaatcattagaaattctcctaaaagatgaccgtctggatactgagaaactttgtacttttagtcagaggttccctctcccgtccatgtaccgtgcattggtatggaaggtgcttctaggaatcttgcctccacaccacgagtcccatgccaaggtgatgatgtatcgtaaggagcagtacttggatgtccttcatgccctgaaagtcgttcgctttgttagtgatgccacacctcaggctgaagtctatctccgcatgtatcagctggagtctgggaagttacctcgaagtccctcttttccactgccaaaagcgtttgaacaatacttgaatctggaagatggcagactgctgactcatctgaggatgtgttccgcggcgcccaaacttccttatgatctctggttcaagaggtgctttgcgggatgtttgcctgaatccagtttacagagggtttgggataaagttgtgagtggatcctgtaagatcctagtttttgtagctgtcgaaattttattaacctttaaaataaaagttatggcactgaacagtgcagagaagataacaaagtttctggaaaatattccccaggacagctcagacgcgatcgtgagcaaggccattgacttgtggcacaaacactgtgggaccccggtccattcaagctgaacgcacccgctggttgtggaccgt

SEQ ID NO: 1238 - DNA, 877 bp, Homo sapiens
  source 1..877: mol_type = genomic DNA
tagaaatccacccagaacctccaccctctgacaccatggtcagctcctgttgtggctctgtcagctctgagcagagctgtggcctggagaactgctgccgccccagctgctgccagaccacctgctgcaggaccacctgctgccgccccagctgctgcaagccccagtgctgccagtctgtgtgctaccagcccacctgctgccaccctagctgctgcatctccagctgctgccgcccctattgctgtgaatccagctgctgccgcccctgctgctgccagaccacctgctgcaggaccacctgctgcaggaccacctgctgctgccccagctgctgtgtgtccagctgctgcagaccccagtgctgccagtctgtgtgctgccagcccacttgctgccgtcccagctgctgcatctccagctgctgccacccctcttgctgtgaatccagctgctgccgcccctgctgctgcgtgcgtccagtctgtggccgagtctcctgccacaccacttgctatcgcccaacctgtgtcatctccacctgcccccgccccttgtgctgtgcctcctcttgctgctaatgtctccttgtgatatttgtcatactatgaatgtcttcattagtcatttaaaatgcactgtagccagccagtcactggaaaaatgaacacttccctgccagtttgtctcatgtggcattcagagtggacattcagctcttctaggaaatgacagacaatcacattcattaaaatatgttatgccaggccccaatgcagttatttttagatgagcagtgtcttcattcgaaggggacactaactgtgatgatctcatataatattgttttcatgtattaataaacagccacttccct

SEQ ID NO: 1239 - DNA, 4572 bp, Homo sapiens
  source 1..4572: mol_type = genomic DNA
agcaacagagtttagactgtctttgcttcatcatctgaaggtaaaattttccagatacggcagacggctttcagagtacaataaacagggaatgagaactatttacatggaagtttctttctcatgatgcggtggagaagcctcggccacttggttctgccagatgttcctggggttactgtaaatgggaaggacaggcagagctaaacaaggtttatcatttaaaagtgcctgtgtgaagtcacttttgctggaaaactgcagcttgggagctttctttgtattcacatcccactcttctgtcaagtacactttaccctgaccttatgagtggatgaagatacctcagttgtctgactttgccaattgcttaatttcagaatttaaaaaggggaaagaaaaacatcctgctaaaatatgaacatctgagtgtcttattttccaacatcgtcaatagctgtgagcgtcagcattaaatattctcccaaggagtgccatgatattgaagtcactttattaataacagctgtatctgcaaaacagtcaagagactcggacgttgaaagccagagatgacactgagcatgcttttattgcggcctaccatctttaagtgggacatattgattgatgagtgattgcctgtccatacactctctcatcatcctgttccttggattggacttcactaagcaatttatcactcaccttcagacttacatgtgggagttttcacaacagtagttttggaatcattagaacttggattgatttcatcatttaacagaaacaaacagcccaaattactttatcaccatggctttgaacgttgccccagtcagagatacaaaatggctgacattagaagtctgcagacagtttcaaagaggaacatgctcacgctctgatgaagaatgcaaatttgctcatccccccaaaagttgtcaggttgaaaatggaagagtaattgcctgctttgattccctaaagggccgttgttcgagagagaactgcaagtatcttcaccctccgacacacttaaaaactcaactagaaattaatggaaggaacaatttgattcagcaaaaaactgcagcagcaatgcttgcccagcagatgcaatttatgtttccaggaacaccacttcatccagtgcccactttccctgtaggtcccgcgatagggacaaatacggctattagctttgctccttacctagcacctgtaacccctggagttgggttggtcccaacggaaattctgcccaccacgcctgttattgttcccggaagtccaccggtcactgtcccgggctcaactgcaactcagaaacttctcaggactgacaaactggaggtatgcagggagttccagcgaggaaactgtgcccggggagagaccgactgccgctttgcacaccccgcagacagcaccatgatcgacacaagtgacaacaccgtaaccgtttgtatggattacataaaggggcgttgcatgagggagaaatgcaaatattttcaccctcctgcacacttgcaggccaaaatcaaagctgcgcagcaccaagccaaccaagctgcggtggccgcccaggcagccgcggccgcggccacagtcatggcctttccccctggtgctcttcatcctttaccaaagagacaagcacttgaaaaaagcaatggtaccagcgcggtctttaaccccagcgtcttgcactaccagcaggctctcaccagcgcacagttgcagcaacacgccgcgttcattccaacagataattctgaaataatcagcagaaacggaatggaatgccaagaatctgcattgagaataactaaacattgttactgtacatactatcctgtttcctcctcaatagaattgccacaaactgcatgctaaataaagatgtagttcttctggacagaccacaactctaagaagctagtgctgctatctcatatatgagtattaaatatggtatgcttagtatattccaacctaagatagttaactacctgagaccagctgtgatgtttaaagacataaaggataaagtttacttttaaagggtttctaaacatagtttctgtcctaggaatattgtcttatctccataactatagctgatgcagaaagtccagccagtttactcatttcgattcagaatatttcaaatttagcaataaacaattagcattagttaaaaaagaaacatattccaagggcaggttcgattctagctctaattactgtcatgtcatttacccactggatcaaagggtatgtttcacttcttgacaatataaatgctgcagcaaagatgagaggtgaagtaaaaccgatacctgtcctgcaggtctaaaatttgaatggaaattcaagcacaagtactggggacacatcaaagtgtggtgtttggtttgcctggagatgccacgttgaatcatgtgattctagattaacattaaatagattgaaaaagaaactttgcacggtatgagcttcataccccaccaaacaaagtcttgaaggtattattttacaagtatatttttaaagttgttttataagagagactttgtagaagtgcctagattttgccagacttcatccagcttgacaagattgagaggcccatgccaacagtctaatctaagagattagtctttcaaactcaccatccagttgcctgttacagaataactcttcttaactaaaaacctagtcaaacaaggaagctgtaggtgaggagatctgtataatattctaatttaagtaagtttgagtttagtcactgcaaatttgactgtgactttaatctaaattactatgtaaacaaaaagtagatagtttcactttttaaaaaatccattactgttttgcatttcaaaagttggattaaagggttgtaactgactacagcatggaaaaaaatagttcttttaattctttcaccttaaagcatattttatgtctcaaaagtataaaaaactttaatacaagtacatacatattatatatacacatacatatatatactatatatggatgaaacatattttaatgttgtttacttttttaaatacttggttgatcttcaaggtaatagcgatacaattaaattttgttcagaaagtttgttttaaagtttattttaagcactatcgtaccaaatatttcatatttcacattttatatgttgcacatagcctatacagtacctacatagtttttaaattattgtttaaaaaacaaaacagctgttataaatgaatattatgtgtaattgtttcaaacatccattttctttgtgaacatattagtgattgaagtattttgacttttgagattgaatgtaaaatattttaaatttgggatcatcgcctgttctgaaaactagatgcaccaaccgtatcattatttgtttgaggaaaaaaagaaatctgcattttaattcatgttggtcaaagtcgaattactatctatttatcttatatcgtagatctgataaccctatctaaaagaaagtcacacgctaaatgtattcttacatagtgcttgtatcgttgcatttgttttaatttgtggaaaagtattgtatctaacttgtattactttggtagtttcatctttatgtattattgatatttgtaattttctcaactataacaatgtagttacgctacaacttgcctaaaacattcaaacttgttttcttttttctgtttttttctttgttaattcatttaaactcattgaaaacatagtatacattactaaaaggtaaattatgggaatcactgaaatatttttgtagattaattgttgtaacattgtctttcttttttttcttttgtttcatgattttgatttttaaaattattagcacacaactattttcagccctttaataatggagcatcaaaaacatcacctgtaaccccaagcaaatatagaagactgtattttttactatgatatccattttccagaattgtgattacaatatgcaaagagtcataaatatgccatttacaataaggaggaggcaaggcaaatgcatagatgtacaaatatatgtacaacagattttgctttttatttatttataatgtaattttatagaataattctgggatttgagaggatctaaaactatttttctgtataaatattatttgccaaaagtttgtttatattcagaagtctgactatgatgaataaatcttaaatgctttgtttaattaaaaaacaaaaatcaccaatatccaagacatgaagatatcagttcaacaaatactgtagttaagagactaactctccacttgtatgggaactacatttcactcttggttttcaggatataacagcacttcaccgaaatattctttcagccataccactggtaacatttctactaaatctttctgtaacacttaaagaattccctcattcattaccttacagtgtaaacaggagtctaatttgtatcaatactatgttttggttgtaatattcagttcactcacccaatgtacaaccaatgaaataaaagaagcatttaaaagg

SEQ ID NO: 1240 - DNA, 1563 bp, Homo sapiens
  source 1..1563: mol_type = genomic DNA
cagaagaatagaaggaaggtgataggatgtgatgatagaatttgtgatagccaagcaacaacttttcctaattcggcatgttaaaaaataagggtcactcatctaagaaagataacttggcagtcaatgcagttgctttacaagatcacattttacatgatcttcaacttcgaaatctttcagttgcagatcattctaagacacaagtacaaaagaaagagaacaaatctctaaaaagagatacaaaggcaataatagatactggacttaaaaaaactacacagtgccccaaactagaagactcagaaaaagaatatgttcttgatcccaaaccgccgccgttgactttggcacagaagttgggcctcattgggcctccaccacctccactgtcatcagatgaatgggagaaggtgaaacagcgctctctcctgcaaggggactccgtgcaaccatgccccatctgtaaagaagaattcgagcttcgtcctcaggtgtttagcatacgaggaaagaaccagtatcaaacccgagtgatacacgatggggcccgcctgttcagaatcaagtgtgtgaccagaatccaagcctactggagaggatgtgttgttagaaagtggtacagaaacctgaggaaaacagtacctcccacagatgccaagttaagaaaaaaattctttgaaaaaaagttcacagaaatcagccaccgcatcctgtgctcatacaacaccaacattgaagagctctttgcagaaatcgatcagtgcttggccataaatcgaagtgttcttcagcagttggaagaaaaatgtggccatgagatcacagaagaggaatgggagaaaatccaagtgcaggctctgcgccgggagacccacgagtgctccatctgcctggcccctctctccgctgctggcggtcagcgcgtgggtgcaggcaggcgttccagagagatggccctcctgtcctgctcacatgtgttccaccatgcgtgtctgctggcactagaggagttctccgtgggagacaggcctcctttccatgcctgtcctctctgccgctcctgctaccagaagaagattcttgaatgttgaattcatagtcaaggaaagttaggtaattctgaggaaaaaagtttaccatcattttggatgaactgcatgagttctgggttaagtactacaatgtaatctgtttcccagggaaataagctattggtagttgtaggaaatcttagtatattttaaaagctgacatcccacctaattttaatctttggtctctaaaaagtaaatttcaaatttatgagtttaatcacttcaaatatgaatagcaaaaaatgagagcttgcttacttctaaaaattgaggttaagatatagctagtgtctgaacgacactccttaaagtaagttccaaatgtaaaacactccttaagttccaaatgttttccgctaatagtctgtcctaaagcctttgccattcctaatactcgttttgtaataattgctgtatttctgtgtaataaaatataaaaataaaatattcagtggtattcaacatc

SEQ ID NO: 1241 - DNA, 1217 bp, Homo sapiens
  source 1..1217: mol_type = genomic DNA
cagaagtttcccccttgggcggtggtggaggtggtaaccgtgatagtagcagctccggcggcagcaacagcgactacgagggatggcggcggctgcagcaggaactgcaacatcccagaggtttttccagagcttctcggatgccctaatcgacgaggacccccaggcggcgttagaggagctgactaaggctttggaacagaaaccagatgatgcacagtattattgtcaaagagcttattgtcacattcttcttgggaattactgtgttgctgttgctgatgcaaagaagtctctagaactcaatccaaataattccactgctatgctgagaaaaggaatatgtgaataccatgaaaaaaactatgctgctgccctagaaacttttacagaaggacaaaaattagatatagagacggggtttcatcgtgttggccaggctggtctccaactcttgacctcaagtgatccacctgccttggactcccaaagtgctgggattacaggtgcagatgctaatttcagtgtctggattaaaaggtgtcaagaagctcagaatggctcagaatctgaggtgtggactcatcagtcaaaaatcaagtatgactggtatcaaacagaatctcaagtagtcattacacttatgatcaagaatgttcagaagaatgatgtaaatgtggaattttcagaaaaagagttgtctgctttggttaaacttccttctggagaggattacaatttgaaactggaacttcttcatcctataataccagaacagagcacgtttaaagtactttcaacaaagattgaaattaaactgaaaaagccagaggctgtgagatgggaaaagctagaggggcaaggagatgtgcctacgccaaaacaattcgtagcagatgtaaagaacctatatccatcatcatctccttatacaagaaattgggataaattggttggtgagatcaaagaagaagaaaagaatgaaaagttggagggagatgcagctttaaacagattatttcagcagatctattcagatggttctgatgaagtgaaacgtgccatgaacaaatcctttatggagtcgggtggtacagttttgagtaccaactggtctgatgtaggtaaaaggaaagttgaaatcaatcctcctgatgatatggaatggaaaaagtactaaataaattaatttgctctcatcgtattgtgtatattca

SEQ ID NO: 1242 - DNA, 1928 bp, Homo sapiens
  source 1..1928: mol_type = genomic DNA
cctggttcgttaaccggaagtagacgtacctcacggaagccggctttggccctgcggctgctaccgtcgccgcggagaaattgttggatctggcagtctaggaatgaatctcctctcagcctttaagctcacctggtcagaatccttggatgagcctgtgggaccgttcctcctagcccggtggtttggaaccagtggctttgggactgtaagaggatggacaaagattctcaggggctgctagattcatccctgatggcatcaggcactgccagccgctcagaggatgaggagtcactggcagggcagaagcgagcctcctcccaggccttgggcaccatccctaaacggagaagctcctccaggttcatcaagaggaagaagttcgatgatgagctggtggagagcagcctggcaaaatcttctacccgggcaaagggggccagtggggtggaaccagggcgctgttcggggagtgaaccctcctccagtgagaagaagaaggtatccaaagcccccagcactcctgtgccacccagcccagccccagcccctggactcaccaagcgtgtgaagaagagtaaacagccacttcaggtgaccaaggatctgggccgctggaagcctgcagatgacctcctgctcataaatgctgtgttgcagaccaacgacctgacctccgtccacctgggcgtgaaattcagctgccgcttcacccttcgggaggtccaggagcgttggtacgccctgctctacgatcctgtcatctccaagttggcctgtcaggccatgaggcagctgcacccagaggctattgcagccatccagagcaaggccctgtttagcaaggctgaggagcagctgctgagcaaagtgggatcgaccagccagcccaccttggagaccttccaggacctgctgcacagacaccctgatgccttctacctggcccgtaccgcgaaggccctgcaggcccactggcagctcatgaagcagtattacctgctggaggaccagacagtgcagccgctgcccaaaggggaccaagtgctgaacttctctgatgcagaggacctgattgatgacagtaagctcaaggacatgcgagatgaggtcctggaacatgagctgatggtggctgaccggcgccagaagcgagagattcggcagctggaacaggaactgcataagtggcaggtgctagtggacagcatcacaggcatgagctctccggacttcgacaaccagacactggcagtgctgcggggccgcatggtgcggtacctgatgcgctcgcgtgagatcaccctgggcagagcaaccaaggataaccagattgatgtggacctgtctctggagggtccggcctggaagatatcccggaaacaaggtgtcatcaagctgaagaacaacggtgatttcttcattgccaatgagggtcgacggcccatctacatcgatggacggccggtgctctgtggctccaaatggcgcctcagcaacaactctgtggtggagatcgccagcctgcgattcgtcttccttatcaaccaggacctcattgccctcatcagggctgaggctgccaagatcacaccacagtgaggagtggtggcaggactcgtgggccctctccggcctgtttcccctgccactccagcccccttgagctgggaactcaggctcctggaaaaacctgggcagtgggaggctcagctgcgggccattgatttgagcctttgagggaggatagggctggcctttgtgaagccagcagaggctgagaacctcaggcttccctagatccagagcccctccccatcttcctctctctaaaaacaaccctaccccccattgccaccttcactcctgtgtctccagctgattagcctcagactcttcttttattgtttttcttttgtaaataa

SEQ ID NO: 1243 - DNA, 1689 bp, Homo sapiens
  source 1..1689: mol_type = genomic DNA
ggttgcaccatcccagaagctgctgttagctcgccggtcctcggcacgccgcccgttcgcccctgcgctgtccgcccttcccctagcgttacttccggtccctcgctgagggggttcgtgcggctcccaggaggcgtgaaccgcggaccatgagcgtgggcttcatcggggccggccagctggcctatgctctggcgcggggcttcacggccgcaggcatcctgtcggctcacaagataatagccagctccccagaaatgaacctgcccacggtgtccgcgctcaggaagatgggtgtgaacctgacacgcagcaacaaggagacggtgaagcacagcgacgtcctgtttctggctgtgaagccacatatcatccccttcatcctggatgagattggggccgacgtgcaagccagacacatcgtggtctcctgtgcggctggtgtcaccatcagctctgtggagaagaagctgatggcattccagccagcccccaaagtgattcgctgcatgaccaacacacctgtggtagtgcaggaaggcgctacagtgtacgccacgggcacccatgccctggtggaggatgggcagctcctggagcagctcatgagcagcgtgggcttctgcactgaggtggaagaggacctcatcgatgccgtcacggggctcagtggcagcgggcctgcctatgcattcatggctctggacgcattggctgatggtggggtgaagatgggtttgccacggcgcctggcaatccaactcggggcccaggctttgctgggagctgccaagatgctgctggactcggagcagcatccatgccagcttaaggacaatgtctgctcccctgggggagccaccatccacgccctgcactttctagagagtgggggcttccgctctctgctcatcaatgcagttgaggcctcctgtatccgaacacgagagctacagtccatggccgaccaagaaaagatctccccagctgcccttaagaagaccctcttagacagagtgaagctggaatcccccacagtctccacactgaccccctccagcccagggaagctcctcacaagaagcctggccctgggaggcaagaaggactaaggcagcatctgtcccctctgtgattcagagcccttagttgagagcccctgccgcccctgccacccccctgccccgctcccaccattgcccctcctcagctgtgcaaggagaaagcatgcttaggaagttttcaggtccttgtgataaaacctccttaaatctgttcagaccaagcaatgcgagcttcctctcctgtcccatgttggaagttgctctgaaggggtggtagatgctggaagccagacacaaccctgcgtacgctgctcagttggtggagactggggctgggactggagtcagcccagctgggaggaggggctggggaggatctgcagctgaagcccgaggcagggttggtgtgatgccaaggcaaagtggtgaggagaaaacaggaaacgggctttctctgaattggtaaatgggaaagaagtgagcaacttaagattgtcacaattaatcacaagtgtacaggattagactgggtttatatttaactcttgcttcataggtgtaccatttaaagagtgttatttaatgctaagtttaactgctttaataaagtttatttttaaatatc

SEQ ID NO: 1244 - DNA, 8189 bp, Homo sapiens
  source 1..8189: mol_type = genomic DNA
gcggcggcggccaaactccgcggcgtccccagggcgccagcttcgccctcgccgccgcggccgcgctgctcttcggctccgacatggaagatggaccttctaataatgcgagctgcttccgaaggctgaccgagtgcttcctgagccccagtttgacagatgaaaaagtgaaggcatatctttctcttcacccccaggtattagatgaatttgtatctgaaagtgttagtgcagagacagtagagaaatggctgaagaggaagaacaacaaatcagaagatgaatcagctcctaaggaagtcagcaggtaccaagatacgaatatgcagggagttgtatatgaactaaacagctatatagaacaacggttggacacaggaggagacaaccagctactcctctatgaactgagcagcatcattaaaatagccacaaaagccgatggatttgcactgtatttccttggagagtgcaataatagcctgtgtatattcacgccacctgggataaaggaaggaaaaccccgcctcatccctgctgggcccatcactcagggcaccaccgtctctgcttatgtggccaagtccaggaaaacactgctagtagaagacatccttggagatgaacgatttccaagaggtactggactggaatcagggactcgtatccagtctgttctttgcttaccaattgtcactgcaattggtgacttgattggtattctcgagctgtatcggcactggggcaaagaagccttctgtcttagtcaccaggaggttgcaacagcaaatcttgcctgggcttcagtagcaatacatcaggtgcaggtatgcagaggccttgccaaacagacagaattgaatgacttcctactcgacgtatcaaaaacatattttgataacatagttgcaatagattctctacttgaacacataatgatatatgcaaaaaacctggtgaatgccgatcgttgtgcgcttttccaggtggaccataagaacaaggagttatattcagacctttttgatattggagaggaaaaggaaggaaaacctgtcttcaagaagaccaaagagataagattttcaattgagaaaggaattgctggccaagtagcaagaacaggggaagtcctgaacattccagatgcctatgcagacccacgctttaacagagaagtagacttgtacacaggctacaccacgcggaacatcctgtgcatgcccatcgtcagccgaggcagcgtgataggtgtggtgcagatggtcaacaaaatcagtggcagtgccttctctaaaacagatgaaaacaacttcaaaatgtttgccgtcttttgtgctttagccttacactgtgctaatatgtatcatagaattcgccactcagagtgcatttaccgggtaacgatggaaaagctgtcctaccatagcatttgtacttcagaagagtggcaaggtctcatgcaattcacccttcccgtgcgtctctgcaaagaaattgaattattccactttgacattggtccttttgaaaacatgtggcctggaatttttgtctacatggttcatcggtcctgtgggacatcctgctttgagcttgaaaagttgtgtcgttttattatgtctgtgaagaagaactatcggcgggttccttatcacaactggaagcatgcggtcactgtagcacactgcatgtatgccatacttcagaacaatcacacgcttttcacagaccttgagcgcaaaggactgctgattgcgtgtctgtgtcatgacctggaccacaggggcttcagtaacagctacctgcagaagttcgaccaccctctggccgctctctactccacttccaccatggagcagcaccacttctcccagactgtgtccatcctccagttggaagggcacaatatcttctccactctgagctccagtgaatatgagcaggtgcttgagatcatccgcaaagccatcattgccacagaccttgctttatactttggaaacaggaagcagttggaagagatgtaccagaccggatcactaaaccttaataatcaatcacatagagaccgtgtaattggtttgatgatgactgcctgtgacctttgttctgtgacaaaactgtggcccgttacaaaattgacggcaaatgatatatatgcagaattctgggctgagggtgatgaaatgaagaaattgggaatacagcctattcctatgatggacagagacaagaaggatgaagtcccccaaggccagcttgggttctacaatgccgtggccattccctgctatacaacccttacccagatcctccctcccacggagcctcttctgaaagcatgcagggataatctcagtcagtgggagaaggtgattcgaggggaggagactgcaacctggatttcatccccatccgtggctcagaaggcagctgcatctgaagattgagcactggtcaccctgacacgctgtcccacctacagatcctcatcttgcttctttgacattcttttcctttttttggggggggtggggggaacctgcacctggtaactggggtgcaaacctcttcaagaaggtaacatcaaataaataagtcaagcagaggacttcctgccaatctcttctgtgaggcatcatagacactgagcaaccaggaccacccccacgttcagaaatcagctggccaagtgactccatttgacttgcaaaccagccttttctaataggctaatattgctgaggccttaaaggaaatggacaaaaattatccagaaggggtacttttccattgtatctttctaataagggtttaaaatggtactattatggtattgtacttgggctttaacatcaatgttgctttgatgttgttggatataaataggaatttttacacattactattgtgaatggtgaatgttcatgtatgacctacttgtaattaacttgagttgtagtccacagcctcaggacaaatgtcgttgaggttacagagtaagaaatgatggcaaaacgtcaaactcttatttcagagcttcatgaatttagttagactaaacataattctttaagttcaacctaaagggctgagatcaataaatttaacactagacgaagtagacttcctgtctttttgagaagagatgaggtatatgttacaataaatctcagaacttcaagtagcagttcaaaagatgtcagtttttaaaattgtttttgttgttgtcttggcagttttactgaaccctttgcataaagaacaaaataaaagctcggcattgtaatttttttaatggacaagtcttatggatacgaagggtacatttttcataatgattcctttatattttcactttgtgtcattgcagaattttagactctcattcacaatgaaaagtttattttaaacattgtttaattaaaataccatacagttctcttttaaacatcaaaccataaaaagtgtattttgtaattttactctgacctgccgcagtcacctctcacttatctcttccacgtactgcacggtcgtatttcatgagctttctgtccatagcacagaaacagagcagaaagtagtacaatcatgttggaccttctttctgttctctttactcttctcacagatcagatcactccatagaagcctgtgggtttcgatggtttcttctatacacctttttggttgaccagtattactatacaatgtaagtgttttaaaaaatacgaaagtaatactctgcaccccttcctacaaagatgataaagcagtcacttctggcgcattttaataatttaaagatttttagtgcaatggcacggtaacctccaaacctgaattagacagagactcactcaggaagtgacaggcccatcatatcaaataacttattcacttttcatgtggcaggaaactggaatatcgcttttaataaaatggaaaaatatgcttctacatatttaccaccataggcgttttgttcatatgagcctggtttgtgcaaaattaaatcagaggcttctacaacatggtttatttatgttgtagcaaagttggctctacataaacattgttcttattttaaaattaacactatgtgttcagttttcttgtgggcttctgaaagttgccatcttccctccgtggagctccatttgctattttcattatacactatgaggtaaaatgtaataacaaaagagagagaagtaccactgtggctagatatatacacacacatatatatatggatggatgtaatatatgtagaacacacacatagatgtatataggatacacactcatgtatgtaaacgtatacatatgtgtatatatgatacatacacatacacacacacgagagacagaaggaaagagaggaagagagaagcaaacatgtaggaaaaaatataaatcagccccattctcccattctttaagaacaatgatttttcttgatggaaaatgcatatcacttgacagttgacaagaaagtgtcatttttgtgttagtgtatcatataattgaatttgaacaagatacatatttttctgcatacaaatttatgaagctggagtctaccaaacacagctttagtcacaaaagttagtttagttatctcatttcgcttggagatggaatttcaggaagggatatattatttaagattattgtttaattacaagaattttaaaagaatgtatgaattctgttttttaatatagaaaataattatggagttaggaatctcatggctacatttacatttttaggttattacagaaaattctcttaatttattatagtcaagtgtattatgtaatctctatttagaacagtttcccaaaggaatgtgattggatttactggttggttaatttcttgtgaaatattgtcataatagaagcacagcttgaacaaaagactgaattctgatataaactgtcaatattgcttttaccatgtgtaagatttacttagtaatcacagatttacctaaaataaaaggacccgggttgcagtgatatttagttaatgatttgttttggaaaacatgcagttaggagtatttttgtattttgtcagatgtttaggagacagactttcgggtcatgtttcttgtcttgttcccagatcttttcttaaaagaacagtgtgacaccagaagccaagagatggtttttactaacaacagctttgatgagttcctattaaggtcgtattgtgtattgtgccaaattttccacccagtataaatttagtaacccgctatgagcatatgtaggatattcaatttgcagatacttttgttggttatgttggtttataatagacaagttttatggtcatatgcaattattccattatctttttggacacagtgaatatgttttttagctaaaaatgtccttggaaacataaatgcctgccaataacatggaatattgaattcgggcaatgtgaattgattaattagaaaagggtcaaaagaaatacaatggatgtggaaactaattctaaaaaatagccctattaatagggcagagactctggtccatttcccagctgtacttctctctaagaggtgtatgaaaaacccatcttgcaaaagagaccaaaatattagacacaatcgttcccattcctgactcttcaatggaaaaggaaggtacagatgtttacagtggtgccccaggtgactcgttctcaccacaacaaaagcaactaattggaaactagatgtgttcaataatagatttcctcttttttggcatgctttttagattttttttcattttgtaaaatctcagttaatttttctttattggtatatttgtgtatgcgagacaaatcctgtattgtacaggatataaatagatgcataaatccttagatacctgggttttttaataggtttaggtttgggtattgtgtttctggtcttttaactcaaaattaaggtttgagctttaataggactaaattattcacctgccttggcctgtgcctttattttaaatactgcaattttacttcttcattcatgtatttattattttgcttttcttgcttaagtataattgaaaatatttgcaggaacgcacaattcattttatcaagttgaatgaataggaccattctctcctcatcagatttctgttctttatttgacttcattgacatataccctggtgactataaccagtgaactgttcagagtcagtcttttcggcaagaacttcagagaactgtgacactggttatgatgtgattttggggggtttcaggtacctaagcatgatttttaaaatcacttctctctttacatatttcgaacatatgtttgctttctacactttgcagattttatttaggatttaattctttaaagactatattcatttagtcactatagtggatctcttctactgcaagtattcatctgatttttaaattatgtaaaatgtaaatcagccaagtatgtcatccgttatagtttccccatgctttcagcgcatggccatgagatttttacatgtgcataagtatttagccaatacacattttgctgacttctttaaccatttatattgtttaaattagtaatatccaatgcagtgcacacttttttgtcttttttccaacggaatattttggttgtctgtagcgttggaagcattttatatgataaaaatagcaagaaaaaattaaaaagtgtcaacggtgtgctggttctaaattaagaagatagaacaaagagaaagacattaatgttacctaagaaacacatttaacatccgaagaagcaatgctgtcctcacttgatgtttctcttctcaacccagcaatggagagcagggcttgcaaagccgtacagagcctacgtgctctttcctgcaagtgggagaaaactaatcaatggcacacagggccaggtgtggccctgtgaggcaaaggataatgtcacctcaggaccaaggtggaaacttacagctgaatccagggcttactaagtagggaagtcagtttacatatttcagttttcctctgatgtttttgaggtactgtgtatttgcagaagtttaagcagaagggttttgtttctattgtaagttaggttctaaaagtgtataatctgatactctagcccaactgaaatattatatcttgggcgttacagcctttgtctttttctttagtcaccttaatacccagtcctatgctgtatctctgatagcctatataaatgacatataggaatattattttccatatgatctgttgtatggtgtatatgctatgtgttcatttcgtgtgcaagttcagagtgtaatagatttacccagagaaggtgtttctatacaatgcccctacctatttgaaattacatgcttgcccaacacactgtgaaatagttaccaaaatttgtacaaatgcagcatcttcattctttctgagaagacaagatggttttctttacatgaacaaatgaacaaaagagatcctagatccataacgtagctaaggcatctaagagtttgctgttgataatcttgctgaccaaaaactactggagagtaacacaggttatatgccatcacaaatacaatgctcatgaagaactgatttgtagagtcaatgaacctgtgtccagaattttaataggctctctattggaaggagaaagaatttcaagttaacagtatctaactttatcatagttgatgttagtaaattttaaaaaatgattttatatgtatgacaaaaatctttgtaaaatgcgcaagtgcaataatttaaagaggtcttaactttgcatttataaattataaatattgtacatgtgtgtaattttttcatgtattcatttgcagtctttgtatttaaaaaacatttactgttatgtttgtataatagaacagtaatcatttattataatctaggcaagttgtaaataaattcataattcaaacagccagtatatatgcatatatgagtgttatattgcaaaatctttgttttacttacatggttaaagcagcaagaattcttttgttgatatgtaattatacacataaaatatatatatgtatgatacatgaaatatatttagaaatgttcataattttaatggatatcctttggtgtgaataattgaatacagagtttttaaaata

SEQ ID NO: 1245 - DNA, 2190 bp, Homo sapiens
  source 1..2190: mol_type = genomic DNA
gagggcggggcgagggcggggcggtgggcggggacggggcccgcacggcggctacggcctaggtgagcggctcggactcggcggccgcacctgcccaacccaacccgcacggtccggaagtcgccgaggggccgggagcgggaggggacgtcgtcctagagggccggagcgggcgggcggccgaggacccggctcccgcgcaggacggagccgtggctcaggtcggcccctccccaacaccaccccgggcctccgccccttcctgggcctctcggtggagcagggacccgaaccggtgcccatccagtccggtgccatctgaagcccccttcccagaaaatgagccacagagcaagctgaccccagcgacacagccccccagccctactgtatttccgttcctatcaaaaaatggatgactcggagacaggtttcaatctgaaagtcgtcctggtcagtttcaagcagtgtctcgatgagaaggaagaggtcttgctggacccctacattgccagctggaagggcctggtcaggtttctgaacagcctgggcaccatcttctcattcatctccaaggacgtggtctccaagctgcggatcatggagcgcctcaggggcggcccgcagagcgagcactaccgcagcctgcaggccatggtggcccacgagctgagcaaccggctggtggacctggagcgccgctcccaccacccggagtctggctgccggacggtgctgcgcctgcaccgcgccctgcactggctgcagctgttcctggagggcctgcgtaccagccccgaggacgcacgcacctccgcgctctgcgccgactcctacaacgcctcgctggccgcctaccacccctgggtcgtgcgccgcgccgtcaccgtggccttctgcacgctgcccacacgcgaggtcttcctggaggccatgaacgtggggcccccggagcaggccgtgcagatgctaggcgaggccctccccttcatccagcgtgtctacaacgtctcccagaagctctacgccgagcactccctgctggacctgccctaggggcgggaagccagggccgcaccggctttcctgctgcagatctgggctgcggtggccagggccgtgagtcccgtggcagagccttctgggcgctgcgggaacaggagatcctctgtcgcccctgtgagctgagctggttaggaaccacagactgtgacagagaaggtggcgaccagcccagaagaggcccaccctctcggtccggaacaagacgcctcggccacggctccccctcggcctattacacgcgtgcgcagccaggcctcgccagggtgcggtgcagagcagagcaggcaggggtgggggccgggcctgcaagagcccgaaaggtcgccaccccctagcctgtggggtgcatctgcgaaccagggtgaagtcacaggtcccggggtgtggaggctccatcctttctcctttctgccagccgatgtgtcctcatctcaggcccgtgcctgggaccccgtgtctgcccaggtgggcagccttgagcccaggggactcagtgccctccatgccctggctggcagaaaccctcaacagcagtctgggcactgtggggctctccccgcctctcctgccttgtttgcccctcagcgtgccaggcagactgggggcaggacagccggaagctgagaccaaggctcctcacagaagggcccaggaagtccccgcccttgggacagcctcctccgtagcccctgcacggcaccagttccccgagggacgcagcaggccgcctcccgcagcggccgtgggtctgcacagcccagcccagcccaaggcccccaggagctgggactctgctacacccagtgaaatgctgtgtcccttctcccccgtgccccttgatgccccctccccacagtgctcaggagacccgtggggcacggaacaggagggtctggaccctgtggcccagccaaaggctaccagacagccacaaccagcccagccaccatccagtgcctggggcctggccactggctcttcacagtggaccccagcacctcggggtggcagagggacggcccccacggcccagcagacatgcgagcttccagagtgcaatctatgtgatgtcttccaacgttaataaatcacacagcctcccaggagggagacgctggggtgcac

SEQ ID NO: 1246 - DNA, 9288 bp, Homo sapiens
  source 1..9288: mol_type = genomic DNA
agtgctcgcccgcccgaccccggcggctcgcgcccgggagcgccgcagggtcgctagagtcggccgcgtcctttgtgtggcgctcaggctgcgccgcggggcggcgggacggaatgtgggcgctgcgggggcttttctctcctacccgaactgtgggaacaatggactgaaaggggaagatggattgaggggccgagcggggaagcgagctgcaccggggaatcatgacttctgcagccgagataaagaagccaccagtggcccccaagcccaagtttgttgtggcaaataataagccagccccacctcctattgcacctaaacccgacattgtgatttctagtgttccacagtcgacaaagaaaatgaaaccagcaatagccccaaaaccaaaagtcctgaagacctcacctgttcgagagattgggcagtcgccatcaaggaaaatcatgttgaacctggaagggcataaacaggaattagctgaaagcactgacaactttaattgtaaatatgaaggcaatcagagcaatgattatatttcaccaatgtgttcctgcagttctgagtgtatccataagctgggccatagagagaatttgtgtgtaaagcagcttgttttagagcccctggaaatgaatgaaaatttagaaaacagtaaaattgatgagactttgactataaaaactaggagtaaatgtgatttgtatggtgaaaaagccaagaaccagggtggggttgttttaaaggcaagcgttttagaagaggagctcaaagatgccttaatacaccaaatgccaccttttatttctgcacagaagcacaggcccacagacagcccagaaatgaatggtggctgtaattcaaatggacaattcagaattgaatttgcggatttgtcaccttccccatccagctttgaaaaagttcctgatcatcacagttgccacttacagcttcctagtgatgaatgtgaacattttgaaacttgccaggatgacagtgaaaaaagcaataattgctttcagtcatctgaactagaggctctggaaaatgggaaaaggagtactttaatatcttcagatggagttagtaagaaatcagaagtcaaagaccttggtcccttagaaattcatttagtaccatataccccaaaatttccaactcccaagcccagaaagacacgaactgctcgtctgttacgccaaaagtgtgtagatactcctagtgaaagcactgaagaaccggggaattcagacagtagctcttcctgtcttactgaaaatagtttgaaaatcaataaaatcagtgttctgcatcagaatgttttgtgtaagcaggaacaggtggataaaatgaagctaggaaataaaagtgaattgaatatggaatccaacagtgatgcacaggacttagtcaattcacagaaagccatgtgtaatgaaacaacttcctttgaaaaaatggcaccttcttttgataaagactctaatttgagttctgacagcacaactgtagatggttctagtatgtcgcttgctgtggacgaagggaccggttttataagatgtactgtatctatgagcctgcctaagcagctcaaattaacttgcaatgaacatttgcaatctgggagaaacctgggagtttctgcccctcaaatgcaaaaggaatctgttataaaagaggaaaattctctacgaattgtccccaaaaaacctcaaagacatagcttgcctgctacaggagtgcttaaaaaggctgcctccgaggagcttttggaaaaaagttcttatccttcaagtgaagaaaaaagttcagagaagagtctagaaagaaatcaccttcagcatttgtgtgcccaaaaccgtggtgtgtcatcctcctttgatatgcctaaacgggcttcagaaaagccagtgtggaagttacctcatcctattttacccttttcagggaacccagaattcttaaagtctgtcaccgtatcgtcaaacagtgagccttcaacagccctaaccaagcccagagcaaaatcgttatctgctatggatgtggaaaagtgcactaagccttgcaaagactctacaaagaaaaactcttttaaaaagttgctcagcatgaaactgtccatctgtttcatgaagagtgactttcaaaaattttggtccaagagtagccaactcggagacaccaccacaggccacctctccagtggggagcagaaggggattgaaagtgattggcaaggcttgttggtaggagaggagaagagaagtaaacccatcaaggcatattccacagaaaactatagcctggaatctcaaaagaagaggaagaagtctcggggccagaccagtgcagctaatggtctgagagctgagtctttggatgaccaaatgctctcccgggagtcatcatctcaggcaccttacaagtctgttacaagcctctgtgcaccggagtatgaaaatatacgccattatgaggaaataccagagtacgagaacttgccatttattatggctatacggaaaactcaagagttggaatggcagaattccagcagcatggaggacgctgatgcaaatgtgtatgaggtagaagagccgtatgaagctccagatggccagctgcagcttggacccagacatcagcattccagttcaggagcatcccaggaggaacagaatgatcttggtcttggtgaccttccctctgatgaggaggaaatcatcaacagttctgatgaagatgatgtcagctctgagtcaagtaaaggagagcctgacccactggaagataaacaggatgaagataatggaatgaaaagtaaagttcatcatattgccaaggagatcatgagctcagagaaagtgtttgtggatgtgttaaaacttttgcatattgatttccgggatgcagtagctcatgcttccaggcaacttgggaaaccagtgattgaggaccggattctaaatcagatcctatactacttgcctcagctgtatgagctcaaccgggatctcttgaaggaactggaggaaagaatgttgcactggactgaacaacaaagaattgctgatatctttgtaaagaagggaccatatctaaaaatgtattccacatacatcaaagaatttgataagaatatagccttgctggatgaacagtgcaagaaaaatccaggttttgctgctgttgttagagaatttgagatgagccctcgctgtgctaatctggccctcaagcactacctgctcaagccggttcagaggatcccccagtacaggctgttgctgacagattatttgaagaatctcatagaagatgctggagattacagagacactcaagatgcccttgctgttgttatagaggtagccaaccacgccaatgacaccatgaagcaaggagacaactttcagaaacttatgcaaattcagtacagcttaaatggacaccatgaaattgtgcagcctggtcgggtttttctcaaagaaggaattctgatgaagctgtctcggaaagtgatgcaacctcgaatgtttttcctgtttaatgatgccctgctgtatacaacaccagtgcagtctgggatgtataaactgaacaacatgctctcactggctggaatgaaggtcagaaaacctacccaagaagcctatcagaatgaattaaagattgaaagtgtagaacgttccttcattctctcagccagttctgccacagaaagggatgaatggctagaagcgatttccagggcaatagaagagtatgccaagaaaagaatcaccttctgtcctagtaggagtcttgatgaggcagactcagaaaataaagaagaagttagtcctcttggatcgaaggctcccatctggattcctgataccagagccacaatgtgtatgatctgcacaagcgaattcactctcacctggagacgacaccactgccgggcctgtggaaagattgtatgccaagcttgttcgtctaataagtatggcttagattacctgaaaaatcaaccagcaagagtatgtgaacattgtttccaagaactgcagaaattagatcaccagcactcccctaggattggatctcctggaaatcacaaatctccttcaagtgccttatcatcagtcttacatagcattccatcagggaggaaacagaaaaaaatcccagctgctctcaaagaagtatcagcaaacacagaggattcttctatgagtggctacttgtacagatcaaagggcaataaaaaaccctggaaacacttttggtttgtcataaaaaataaagtactatatacatatgctgcaagtgaggacgtggccgctttggagagtcagcctttattaggattcactgttattcaagttaaagatgagaattccgagtctaaagtatttcagttactgcacaaaaacatgttattttatgtattcaaagcagaggatgctcattcggctcagaagtggatagaagcatttcaggaaggcacaatattgtagcagtattggtttcatctcttctgtgattccaaagaggtggaatttcatcagaatggagtaaatgcaattcaaaaattgtataaaaatgaacactgccaagataaagccaaccagacccttcatcaaagaaattgttttgttaggtataagcaatttttaaaaggtgtttgttttttcatttatgttatttattaaaattttgatgtttacttaatggtcagaattatttctgagacacactgaattctaaagtaccatttctttagagaccagaaaaactatcttaatactgtatactgtattaactattcgtgacatagttcacactgttttcttaccttacattgtaacaatcttactggtggaaagtctttgtaaggaaaaaacacatagcaaggagcaaatttccacaaagtgcttggtttaggaattgtgattattataaaactgctgatgaaaaaaatgcatgtctttgaatcaataaacttgggtgaatatttgtatcttttagtggaaaaacatggccagcttctacctcagtaactgtgaactgaaatttcagtaaattatctaaagtatttctgttgttaggtacctctttggcaggagttaatattacatcatcaaagaattatagcaaagagatagaatctgaattttttaaaactgtgagtaggaatgaagatgtttttatttgcagaataccacaaataaccaactcttccggcttttaagtccaatcttttaaaaaatctaccacttcgaaacaaacataaatgtatcattttttaaaatagcaaaatatagcaagcattatgtcacataatattccctgctattataagagttctgagcccaagtcaatgatgatatttgtatctataagtaatgttacatttccaaaaatattgtgcattacaaatggaactggaattactatatcagaaaagcataattataagccagtaataactgaaattctatagtattcattttcaaaaggtctttttctgccagtttgtgatatcctccctcctaattaaaaaaaaaaacaacaaatcctttctctataagcagctatcagcacacctccttaggaaagatttagattcataattctggtgcacttactgtttaacatatgaactaccttgcacatacaattgttgattagcagaagaaaatgaaataacactgtgataaaagccatccctgatgttcacaatacacaatttattaactaagtttaaactataaattatcttaactgccatgagcggtggctcacacctacaatctcagcattttgggaggccgaggccgttggaccacctgaggtcaggagatcgagaccagcctggccaatatggtgaaaccccatctctattaaaaatacaagaattagccggtcgtggtggtacatggctgtagtcctagctattcagcaggctgaggcaggagcatcgcttgaacccaggaggcagaggttgcagtgagccgagatggtgccactgcactccagcctgggatgacagagcgagactccatctcaaaaaaaaaaaaaaaaaaaaaattgaacagcaaggttatccatataatatttctttaaagggtacaagaattttcctttctgcctctaaataaaggatttcctaattcagtgtgatccttaacagcaaccatgaggattactgagtgcctttctggggccttttgaatgctgtttggtacagcaccagagtccctactagatctagagttggctgctatagttttttgtggcgattttttgccatggagtcatttgaacctcatacacaatcctaacatgccatcccctttctgtcatagcaggtacactaaaatttctttgtagctcaattttatataatcaagatcacataaataaggcttccatgttagaatcgttgcagtttttagtgtattcctttttggaggctaaagttgtaccttataaactgtttctgcgtctggcatttagcaagacaagttatttgggttttctttccctcctcttgagctctcagccttctgactacaaggtttggcttaagccttataatctaaaaaatatcagccaggctattctatcttctaagacctggctgaatcatgagccagttctaaatctaaagagagtgagagagggaagaaatctggcacaaacttacagtctctttaattacatgtaaaatgcatgtgactgtattacctattggcttagccccatggagggtttagaaaaatgtgtagtctttgtggaagctatccaattatccttctcccaaaaagatgttttaaatgtggaatagtattacattcccctgcccctttatgagtccttcataacttactaaagctgaccaattgttatttatgtaacctggctcattcattgtcaactaagaacctaattatatgcaatttattgtaaaaaaagctataaaaatatattttgctagtattttagaggaaaaatgatattgggcacagtctataaatggggagaaaagttaagtagtatctagattccaaggatactatatttattatacagatatgtgtgcctgtgcttccatcaaaccctttttcaggtatctccttttaattcataaggaggaaagagtagggcatttataaagctaagctaaaaatgatgctaagcataacgtagatgagacgccaggctgaaccaggggaaggctggcattgttagtgtccccaactagcagtccacctttatctgtggcagctataaatgtacaggacccatcagagtcctaagaaaatgagagtaattatctctggcatcatccacatttccgactctttccaatctcttttccctttttctgtaatgtacccagcatccccctattgtattttggttgcccaagattcttgattctttgagtgtgtagtagcatttcttaaaatgagatcatcagaccaacccttgattcacatgaaagctgtaatgacacaacaaagagaaggcgacagttttaaagtataattgtcagccaaatgtgtattttatatttggttcatagaatatatctagatgtggggaaagtctcctatttggtaatttagttaaaatgtaaatgttatatcacagcatatgttggtatgttttggagtgtgcttccattgtgctcagcttttgaaaagtttgaaatccactttagtcaaatgtagtcaatgggatttccagagatacatattgtttttcttagtgtaccacacactccttgaaggcagatactgtacttaatatatcactgtcttccataatactgccctaggtctttttagtttttaagagaccgggtctcgctatgtttcccatgctgaactcaaatgcctgggcttaagcaatcctcccacctcagcctctggagtagctgggactacaggggcatgcaccaccaggcctggcttcctaggagggtctttaaagagaaaatatttgttcaattgaaaacaggattcttgtcatctacaactccaacacagcctgaaaatatccacattataacctggaccttagacctactttctccactatcctgcaaagctacatctgtaactacctattggctatctatatgagtcctcaagcatctcagactttacatgaataaaactcaacttccttcccattcaaatctgtttattttcttctgtaagagaaagataccatttgagactccagaatctgcctctaactctcaacaagactctgcaattactcaagtatcctttccatcctcattgccctgctgttattacataggccctggttcaagtccttgttacttgttcccattattgcaataacttctaattccaatgccgttgtgtgatcccattttaaacacggccagagcagtcttccaacaacatagctctaatctagtttcatccccacttttacatgcctcagtggctttcccagtgacttggcatggaacacgtcctcagttgccatacattccagctaactcttacccaacctttctttgttcacacagtttccttttccttcctcattgacccatccgcatctctgtttatccaagacttctctgtgatagctgacccttagtctttctctcccctattcctccagactagatcctgtctccttcctgcagccccgacacagccttcagttcatatcttttgcatgatgcttagcaccttctatccctaaggacaacttactcatttgagatttctggcagggtaccttgcatgcagtggacactcagtatttgctgaattaaattccttcctatggatcccttctgattttttttaagtgcctctaatacacatatcattctagggctcatgccacttttaatgtcattttctaaaggaaaatcttatctatgatattttcccttataagagatagttgttttgagtagggttttttaaaagataaaggtagtaggaaattttttaaagcctaaatatcaaattcctttccctttggagttgggggaaggaatgaagggggagcaacttgctctttcatatgagttggtcatagcatgtaagaaccaatcttgaaatatcgttttttttttaatggcttataatgtatttctagaaatactttgtacttaaaatgataacagtttgtatctttttgtccatatatactttataaataaaaaaattagcattgtaaataatgttaatatgtatttatacaaaataaatttactataatata

SEQ ID NO: 1247 - DNA, 2311 bp, Homo sapiens
  source 1..2311: mol_type = genomic DNA
ggcgagttgctaaggaaatgactgcccgcagcgcctggccccgccgcgcaggccgggcggggtctggagcggcgccgtttccgcttccgctccctcacagctcccgtcccgttaccgcctcctggccggcctcgcgcctttcaccggcaccttgcgtcggtcgcgccgcggggcctgctcctgccgcgcgcacccccggggcttcggctccggcacgggtcgcgcccagctttcctgcacctgaggccgccggccagccgccgccatgggtgcctacctctcccagcccaacacggtgaagtgctccggggacggggtcggcgccccgcgcctgccgctgccctacggcttctccgccatgcaaggctggcgcgtctccatggaggatgctcacaactgtattcctgagctggacagtgagacagccatgttttctgtctacgatggacatggaggggaggaagttgccttgtactgtgccaaatatcttcctgatatcatcaaagatcagaaggcctacaaggaaggcaagctacagaaggctttagaagatgccttcttggctattgacgccaaattgaccactgaagaagtcattaaagagctggcacagattgcagggcgacccactgaggatgaagatgaaaaagaaaaagtagctgatgaagatgatgtggacaatgaggaggctgcactgctgcatgaagaggctaccatgactattgaagagctgctgacacgctacgggcagaactgtcacaagggccctccccacagcaaatctggaggtgggacaggcgaggaaccagggtcccagggcctcaatggggaggcaggacctgaggactcaactagggaaactccttcacaagaaaatggccccacagccaaggcctacacaggcttttcctccaactcggaacgtgggactgaggcaggccaagttggtgagcctggcattcccactggtgaggctgggccttcctgctcttcagcctctgacaagctgcctcgagttgctaagtccaagttctttgaggacagtgaggatgagtcagatgaggcggaggaagaagaggaagacagtgaggaatgcagcgaggaagaggatggctacagcagtgaggaggcagagaatgaggaagatgaggatgacaccgaggaggctgaagaggacgatgaagaagaagaagaagagatgatggtgccagggatggaaggcaaagaggagcctggctctgacagtggtacaacagcggtggtggccctgatacgagggaagcagttgattgtagccaacgcaggagactctcgctgtgtggtatctgaggctggcaaagctttagacatgtcctatgatcacaaaccagaggatgaagtagaactagcacgcatcaagaatgctggtggcaaggtcaccatggatgggcgagtcaacgggggcctcaacctctccagagccattggggaccacttctataagagaaacaagaacctgccacctgaggaacagatgatttcagcccttcctgacatcaaggtgctgactctcactgacgaccatgaattcatggtcattgcctgtgatggcatctggaatgtgatgagcagccaggaagttgtagatttcattcaatcaaagatcagccagcgtgatgaaaatggggagcttcggttattgtcatccattgtggaagagctgctggatcagtgcctggcaccagacacttctggggatggtacagggtgtgacaacatgacctgcatcatcatttgcttcaagccccgaaacacagcagagctccagccagagagtggcaagcgaaaactagaggaggtgctctctactgagggggctgaagaaaatggcaacagcgacaagaagaagaaggccaagcgagactagcagtcatccagacccctgcccacctagactgttttctgagccctccggacctgagactgagttttgtctttttcctttagccttagcagtgggtatgaggtgtgcagggggagctgggtggcttcactccgcccattccaaagagggctctccctccacactgcagccgggagcctctgctgtccttcccagccgcctctgctcctcgggctcatcaccggttctgtgcctgtgctctgttgtgttggagggaaggactggcggttctggtttttactctgtgaactttatttaaggacattcttttttattggcggctccatggccctcggccgcttgcacccgctctctgttgtacactttcaatcaacactttttcagactaaaggccaaaacctaatcgta

SEQ ID NO: 1248 - DNA, 3666 bp, Homo sapiens
  source 1..3666: mol_type = genomic DNA
gtgctcggcgctcccggggtgcctgctcggcgctccgccggccgccctgcgtacgctcgcaaggcgctcgcagactccggagtcgccaacatgtcgaccgccatgaatttcgggaccaagagcttccagccgcggcccccggacaagggcagcttcccgctggatcacttaggtgaatgtaaaagctttaaagagaaattcatgaagtgtcttcataacaataattttgaaaatgctttgtgcagaaaggaatcaaaagaatatttagaatgcaggatggagagaaaattgatgctacaagaaccattggagaaactgggatttggagacttgactagtggaaaatcagaggcaaaaaaatgaattttgatgagaagacccctgggccgtgttcagtggtctctcaggacggagggcatcatcctgcctcttaggttggctgaggcctgcgtgtggtgtccttagaaatgggcttcgaatagaagctccagccctgtgggggcgtctcctgggtagggagtggcgtcccgttttcccttaggagggtgtttctgcattgaacccctgagtgggacggcgttcccggcaaagctgggagggaggcgagcgtggggcaagacccttgtcttcgaggccggggccctcttgtatggggcggttttatgttgcagtcctctgatactttctgagttcaaagaggtaaatgtataaatttcagtcccttctgaacacagatatcatcagaaaattaccattccctagcaggatgttttcgtgtttgtattcgtatatgccagttcatttcctttgaaaaaaaaaaaaagtggaacacaaagtaggaagtgagaaccttctggctttggatggattgacttcttgattctttctggttttgcctgaacaccaagtagcttcataatcaaagggtcattttctggtttgtatcagaccgtatttataaagttgggtatttaatttcagtaactcctgtattttaacagaaaaagaacctgagtccatttgcagttaggctcgcaccagctgtcttctgtgccagccagctccgcccgagaccccggcacgtgttcgcagcacagcctggcaggggccctgagcggagttctcagcccgtctgtgccaaagttgcctgtgggtcacggaaacccggcccatgtccacccagtgcgtcaggccagccggggcccaaacctgtggatggaacgcaggtgcctgcacatctggggcctcagccagacctgtctccttcccaggcactgtcggaaaggggctggctcctgtctggtcagtggaggatggtggcaggagacggggtggggaggtccaggtcacgtcctctctggcgaccctggcagtggctgtctccaagccctggcaggtggggccaccaatctggccgacctcaggctctgggaaacaggctgccctcgtccctctgcctgtgggtggctgaggcttctcagcccatctccagttctctgcagcaaaggccctctgtttctgtcctgcagtggtggccctttcgtggttaaacatgtccctcccctcctcacagaactgagtacctattgcggctgggcccgcccaaccctgtgtccctgcacccatgggttctaccacctgattcggctgcagctgtcactgtcccgtgtctgctctctgtcaggcctctgagtgctgcagacgtattaacatatcaccgctagttgatggaaagtcttgtttcttattagaatattttgtgtaggcacagggttgccccagcactgtctatagcaaccccagtgtcctcacagtgcacgtgagccgtgacgcagccaccgtggagtcggcgctgacgcggtgtggccacgtgccatgagctcgccaacgcagtgcggctatatggcgtgagcttactgtgaagtggagacaggcagggacacaggaaactacaaacgagaaatccagaaggaggagctggaactgatgggcatagccggccgcgagcccctccgagcacccctgggggtggagttctggctgtcatggcagagggtttcacatgctcaaaaagtaaatgaaccaggatgtgaggggaacacaacagaccatgccgacggagctcccgggcccaggccggggcctcttcccatcgcactctgacccgccgtcgggagtgcccaggcccgggtcgggcctgcctctccgctcgcaccgcactctgacccatcaggagtgtggggaagaccgtcgaccaaaggtgggaaagacaggaaagatactgtactctaagtagtaaatttgttttttgcgtggacgattctgaagctgtattctgagatggaaaaaactagaaatacatcgtggatgatgagagccaggtgtattgagctcctgcttttctaacgtacaaaggtaactggatagagaaacggagtgatcgccctcacctggccagggtgtgctccgagaccccagcaggtgccgaagccgcggatagtcccgaatcctgtccaggcgctgttttttcctgtacgtacctgtgatcaagtctgagatgtgacagcaaaactgacagaacttcgtgcttccctcttcaaaatgtcacagatgggcactgtgttcttaccggagatcttagcaacctcggcatctggctgtttttcttataggtcaggagtttccaccttttcccttaaaggaagcgcttggcagcttctctggtgtgtctgagtcgccagcatcaccactgtcctgttctggggccattcttaagtaaaataaaagcttcttggacccaagcaccacatcaccgcgatggctggtctgatcaccgagatggctgctgagtgcctggcaggcagggtggcgtggatggcccgaaacgctggacggagggagggttgatgtcccagcaggacggctgctcagaacagcacagaatcaaaaactcatgaatggtttatttctggaattttccacttagtatttttggactgtggctgaccatgggtaactgaaaccgtgtgtaagggggactgttgtgaggggctgtgcacaaatgcttcccagctcttgagggcctggacgcagtgacccgtgcactcagggtcttggccctgataccattctgtaaccaaaaggaaccagggccaggccagagaaggtatcagatgagctagagagtgaagaattgctgggatgaggagacttgttgaaataacacggggggatgggaaggagcatacggtggccagcctggggcagtgtgagcgtgaaaataaacaggctgggcgcagcggctcacgcctgcaatcccagcactttaggaggccaaggtgggaggatcacttgaggctaggagttcaagaccagcctgggcaacatgggtgaaaccctgtctctacaaaacaagaaaagtcagccgtgcgtggtgtcacccgcctgtagtcccagatactcaggaagctgaggcaggaggatcacttgagccagaggttaagtctgcagtgagctgtgattgtaccactgctctccagcctgagcaacagagccggaccctgtctcaccaaaggaaaaaaaaaaaaaaaaaagaaagaaaattaattattgtaatgggctgtagccctcagaataaattgatatccagtagtctatacaacataa

SEQ ID NO: 1249 - DNA, 1605 bp, Homo sapiens
  source 1..1605: mol_type = genomic DNA
cttgtgggtggaaacgcgctggctgactggggtcggcgtttagttcagcgcagcgactcggggacctggagctgacgcctagacacttgtattagctttaatagaagagaaatggaggagccatagaatattaaggatgaattcaggaaggcctgagaccatggaaaacttgcctgctctctacactattttccaaggagaggttgctatggtgacagactatggggcctttatcaaaatcccaggctgtcggaagcaaggtctggtccatcgaactcatatgtcatcctgtcgggtggataagccctctgagatagtagatgttggagataaagtgtgggtgaagcttattggccgagagatgaaaaatgatagaataaaagtatccctctccatgaaggttgtcaatcaagggactgggaaagaccttgatcccaacaatgttatcattgagcaagaagagaggcggaggcgatccttccaggattacactgggcagaagatcacccttgaggctgtcttgaacactacctgcaagaagtgtggctgtaaaggccactttgcaaaagattgtttcatgcaaccaggtgggactaaatactctctgatacctgatgaggaagaggaaaaggaagaggcaaagtcagcagagtttgagaagcctgaccctacaaggaatccttctagaaaaagaaagaaggagaagaagaaaaagaaacatagagataggaagtcatctgactctgacagctcagactctgagagtgatacaggcaagagggcaaggcacacatcaaaagacagcaaggcagcaaagaagaagaaaaagaagaagaagcacaagaagaagcacaaggagtgagagtataaagagtgtagggggtggttgagagtaagaaaccaggagccttgtgccttgagactcctggaaagactcaatagtgagaatatagcctcccaccccattaacttcgctcccatgggagatggcttcccctcatgcaacaggcaggtttgggagttagaggtcaaaagcagctgcctgaatgagttgttgtttccttatcactcctggtccctttgcaagtgaaccctgcagctcacccattcattcacccaacttccttcattcagcaggaggtcctattaccctctccagctgccactgccagagctggattcctgtaaaggagtccaggctagagccacagagactgttgtggaggtgagttcggctgtagttagagtgattggacccttcctattggtctgtcctgggccaactggtgggtgatctctgctgcatccaacatgggagcagagactggcagcaggaggggggaacatggtgagaagtggtgctcacttttcccattcctcctaacatagttctactatgctagaagtggcatccagcggccacagctagaaaacagtctgcagtgtgacttaacttgtgtattgcattccagcagaccactgaaccagacagcgaagccaagatcattgttctactttgtatttactactgtgtgaatcagttgattctacttcaggtccttgcttaaattcctgtcactaaatggaaatgtgtttggttttaaa

SEQ ID NO: 1250 - DNA, 2899 bp, Homo sapiens
  source 1..2899: mol_type = genomic DNA
ggcggtagcggcagcggcggcggcggcggcggcggcggcggcggcggcggcggcggcggcggcagcggcggcggcctgggcccgggcgcagcggcggcggcggcggggcctggagccggatctaagatggcagcggcggcggcggcggtggggccgggcgcgggcggcgcggggtcggcggtcccgggcggcgcggggccctgcgctaccgtgtcggtgttccccggcgcccgcctcctcaccatcggcgacgcgaacggcgagatccagcggcacgcggagcagcaggcgctgcgcctcgaggtgcgcgccggcccggactcggcgggcatcgccctctacagccatgaagatgtgtgtgtctttaagtgctcagtgtcccgagagacagagtgcagccgtgtgggcaagcagtccttcatcatcaccctgggctgcaacagcgtcctcatccagttcgccacacccaacgatttctgttccttctacaacatcctgaaaacctgccggggccacaccctggagcggtctgtgttcagcgagcggacggaggagtcttctgccgtgcagtacttccagttttatggctacctgtcccagcagcagaacatgatgcaggactacgtgcggacaggcacctaccagcgcgccatcctgcaaaaccacaccgacttcaaggacaagatcgttcttgatgttggctgtggctctgggatcctgtcgttttttgccgcccaagctggagcacggaaaatctacgcggtggaggccagcaccatggcccagcacgctgaggtcttggtgaagagtaacaacctgacggaccgcatcgtggtcatcccgggcaaggtggaggaggtgtcactccccgagcaggtggacatcatcatctcggagcccatgggctacatgctcttcaacgagcgcatgctggagagctacctccacgccaagaagtacctgaagcccagcggaaacatgtttcctaccattggtgacgtccaccttgcacccttcacggatgaacagctctacatggagcagttcaccaaggccaacttctggtaccagccatctttccatggagtggacctgtcggccctccgaggtgccgcggtggatgagtatttccggcagcctgtggtggacacatttgacatccggatcctgatggccaagtctgtcaagtacacggtgaacttcttagaagccaaagaaggagatttgcacaggatagaaatcccattcaaattccacatgctgcattcagggctggtccacggcctggctttctggtttgacgttgctttcatcggctccataatgaccgtgtggctgtccacagccccgacagagcccctgacccactggtaccaggtgcggtgcctgttccagtcaccactgttcgccaaggcaggggacacgctctcagggacatgtctgcttattgccaacaaaagacagagctacgacatcagtattgtggcccaggtggaccagaccggctccaagtccagtaacctcctggatctgaaaaaccccttctttagatacacgggcacaacgccctcacccccacccggctcccactacacatctccctcggaaaacatgtggaacacgggcagcacctacaacctcagcagcgggatggccgtggcagggatgccgaccgcctatgacttgagcagtgttattgccagtggctccagcgtgggccacaacaacctgattcctttagggtcctccggcgcccagggcagtggtggtggcagcacgagtgcccactatgcagtcaacagccagttcaccatgggcggccccgccatctccatggcgtcgcccatgtccatcccgaccaacaccatgcactacgggagctaggggcccgccccgcggactgacagcaccaggaaaccaaatgatgtccctgcccgccgcccccgccgggcggctttcccccttgtactggagaagctcgaacacccggtcacagctctctttgctatgggaactgggacacttttttacacgatgttgccgccgtccccaccctaacccccacctcccggccctgagcgtgtgtcgctgccatattttacacaaaatcatgttgtgggagccctcgtcccccctcctgcccgctctaccctgacctgggcttgtcatctgctggaacaggcgccatggggcctgccagccctgcctgccaggtcccttagcacctgtccccctgcctgtctccagtgggaaggtagcctggccaggcggggcctccccttcgacgaccaggcctcggtcacaacggacgtgacatgctgctttttttaattttatttttttatgaaaagaaccagtgtcaatccgcagaccctctgtgaagccaggccggccgggccgagccagcagcccctctccctagactcagaggcgccgcggggaggggtggccccgccgaggcttcaggggccccctccccaccaaagggttcacctcacacttgaatgtacaacccaccccactgtcgggaaggcctccgtcctcggcccctgcctcttgctgctgtcctgtccccgagcccctgcaggtccccccccgcccccccactcaagagttagagcaggtggctgcaggccttgggcccggagggaaggccactgccggccacttggggcagacacagacacctcaaggatctgtcacggaaggcgtcctttttccttgtagctaacgttaggcctgagtagctcccctccatccttgtagacgctccagtccctactactgtgacggcatttccatccctcccctgcccgggaagggaccttgcagggacctctccctccaaaaaaagaaaaaaagaaaaagaaagaaaaaataaatgaggaaacgtgttgca

SEQ ID NO: 1251 - DNA, 1760 bp, Homo sapiens
  source 1..1760: mol_type = genomic DNA
ggcatggcctaagccggtcagctaaggccatgttaatacggggctgtcccatctctctgcggggcgcgacagctggaagagccgaacggataagagaagaggagggcgcggatggcgtcggggcgccccgaggagctgtgggaggccgtggtgggggccgctgagcgcttccgggcccggactggcacggagctggtgctgctgaccgcggccccgccgccaccaccccgcccgggcccctgtgcctatgctgcccatggtcgaggagccctggcggaggcagcgcgccgttgcctccacgacatcgcactggcccacagggctgccactgctgctcggcctcctgcgcccccaccagcaccacagccacccagtcccacacccagcccaccccggcctaccctggccagagaggacaacgaggaggacgaggatgagcccacagagacagagacctccggggagcagctgggcattagtgataatggagggctctttgtgatggatgaggacgccaccctccaggaccttccccccttctgtgagtcagaccccgagagtacagatgatggcagcctgagcgaggagacccccgccggcccccccacctgctcagtgcccccagcctcagccctacccacacagcagtacgccaagtccctgcctgtgtctgtgcccgtctggggcttcaaggagaagaggacagaggcgcggtcatcagatgaggagaatgggccgccctcttcgcccgacctggaccgcatcgcggcgagcatgcgcgcgctggtgctgcgagaggccgaggacacccaggtcttcggggacctgccacggccgcggcttaacaccagcgacttccagaagctgaagcggaaatattgaagtccagggagggagcgccccgggccgcgtccgccccgtcccacactacgcccccgccccactcccggggcctgctaatctgaggccgatccgggaccggcctccttgcgtctcccattcccaagattgtcccgcctctgccaatccccgccgtccttccagcccacgacctgccgcgccgaggagcggcatctgtcccgtttcccgattgggtctgtcgtctctctccgcctagcgacagattccttctattaagggattggctcgctgagttctaagctctaaatgggtcaactcctttgttttccgcctagcgacaagggatttgctcgcacggcattggctccatcccctagtcgctggacagctctttttttgattggctcaaatcctgtaaagggcttgaccagtctctacatagtcaccgtccgcttttcctgagttctccctcccaattggctccagcttcctgggggcgtggccaagccctcctcttcccagaattggcccggggccttcaatttacgttctttacactacggggactggggtcgtctttgcccacgtcccgacaacttgttccctgaccccctcagggatggccccaaactgtccctgcctctggcaccccctttcattggttccatccatccccacaacagcctgccaatcgaagcccgtccctgcatccaggatggtaccagctcccgcccctcgccccccacctccacaggtgccttaaagggccctcgtccacccaaggtggggggcaggggccctcactctccggccctggtgtgggggagagagtgaggggttgggggatcggcagttgggaggggcgctctgagattaaagagttttacctctgagataaa

SEQ ID NO: 1252 - DNA, 7325 bp, Homo sapiens
  source 1..7325: mol_type = genomic DNA
ggaagcggaagtgaagggtgcgcttggcggcggcggcgggagctgcggagtcgggaatcaaaacaaagggcctggggggggcggggggaaggcggcggggccggaatgtgagcggaggtggagccggcggcagagggtggaagaatgaaagaaaagaaagatgaaaggatgttgaatcactttgcatggctgtatgatggaaggaaacggaactgagaactcctgcagtagaacacgtggatggcttcaacaagataatgatgctaagccatggctttggaaattctctaattgcttttctcgtcctgagcagacgctgccacatagtccccaaacgaaagagtacatggagaacaagaaagttgctgtggaactaaaggatgtaccatcaccccttcatgctggctctaagctttttccagcagtcccacttcctgatattcgttctcttcagcagcctaaaatacagctttcttctgtccccaaagtaagctgctgtgctcattgccctaatgaaccctccacttcgccaatgcgttttggtggtggtggtggcggtagcggaggtaccagtagcttgattcacccgggcgcactgttagactcgcaaagcaccaggacaatcacgtgtcaggtagggtcagggtttgctttccagtctgcatcttcactccagaatgcctcagctaggaacaatttggcaggcattgcaagtgactttcccagcatgtgtctagagagtaacctgtcttcctgcaaacacctgccctgttgtggaaaactccacttccagtcatgtcatggtaatgtgcacaagctgcatcagtttccgagtctgcagggctgcacctccgctggctatttcccctgttctgatttcacaagcggggctccagggcatttggaagagcacatttcacagtcggagctaacgcctcacttgtgcaccaactctttgcaccttaatgtggtacctccggtttgtttaaagggctcactttactgcgaagactgtctaaacaagccagcaagaaatagcataatcgatgcggctaaagtctggccaaatataccacctccaaatactcaacctgcacctcttgctgtccctctgtgtaatggctgtggaaccaaaggaacagggaaggagaccacgttgttattggcgaccagtctaggcaaagctgcttcaaaatttgggtcaccagaagttgcagtagctggacaggtgctagaaaacttaccccccattggagttttttgggatattgaaaactgctccgttccctctggccggtcagcaactgctgttgtgcaaagaatccgtgagaagttttttaaaggccacagagaagcagaattcatctgtgtatgtgacatcagtaaagaaaacaaggaagttattcaagagctgaataattgccaggtaaccgttgcccacatcaatgctactgcaaagaatgccgctgatgataaactgcggcagagtctccgcagatttgcaaatacacacactgctccagccacagtggttcttgtgtcaactgatgtcaattttgcattggaacttagtgacctgagacacaggcatggtttccacattattttggtccataaaaaccaggcctcagaagcactgctgcatcatgctaacgagctgatcagatttgaagagttcatttccgacttgccccccaggttaccactaaaaatgccacagtgccacactctgctctatgtttataacctaccagcaaataaggatggcaagagcgtcagcaacaggctcagacgcctgtccgataattgtggtgggaaagtgctgagtatcacaggctgcagtgcaattctccgcttcataaaccaagatagtgcagagcgcgctcagaagcgaatggaaaacgaagatgtctttgagaaaaaagataaagaggagactgtattccaagtgagttacccgtctgcttttagcaagttagttgcatccaggcaagtcagtcctctgctcgcatctcagtcttggtcttctagagcatccccgcttgctttcaacattgcaaattcgagcagcgaagccgactgcccagacccatttgcaaatggtgctgatgtccaagtcagcaacatagactacagattatcccggaaggagctgcagcagctcctgcaggaagcatttgccaggcatggcaaggtgaagagtgttgagctcagcccccatacagattatcaactcaaggctgttgtgcaaatggaaaacttacaagatgcgatcggtgcagtgaatagcctccacagatacaaaattggcagcaaaaagatcctggtctcacttgccaccggggctgccagcaaatcactctctttactgaggtttggacacaagttgaatgtgtcagatctatataaattaacagacacggtcgcaatccgtgaacaaggaaacggacggctggtgtgtctcctacccagcagtcaggcccgccagagccccttggggtcttcccagtcacacgacggctcctccacgaattgcagcccaattatatttgaagagttagaatatcacgagcctgtctgcagacagcattgttccaataaggatttcagctttccagattgttacattgcagagtttggcgatctagaagtagtgcaagaaaaccaaggaggtgttcccttagaacacttcattacctgtgttccaggtgtaaacattgccactgctcagaatggcatcaaagtggttaaatggattcacaacaagcccccgcctcccaacactgacccttggcttctgcgttcgaagagtcctgtaggtaacccccagctgatccagttcagtagagaagtgattgacttgctgaaaagccagccatcttgtgtcatacccatcagtcatttcatcccatcctatcaccatcattttgcaaagcagtgccgagtgtcagactacggatactccaagctgattgagttattagaagcagtgcctcatgtattgcagattcttggaatgggctccaaacgtctgctgacccttacccacagggcccaggtgaagcgctttactcaggatttactaaaacttctcaaatcccaggccagcaaacaggtcattgtgagagaattctcacaggcttatcactggtgtttctcaaaggactgggatgtcactgaatatggtgtttgtgagttgattgacatcgtatcagagattccagacacaaccatctgcttgtcccaacaagataatgaaatggtgatttgtatccccaaaagagaacgcactcaggatgaaatagaaaggacaaaacagttctccaaggatgtcgttgatttgctgcgtcaccaaccccatttccggatgccctttaataaatttatcccttcttaccatcaccactttggccggcagtgcaaacttgcgtactatgggtttaccaaactacttgaactttttgaagccatacctgatactttacaagtattggaatgtggagaagaaaagatccttactctgacagaggtggagcggttcaaagctctagctgcccagtttgttaaactccttcggtcccaaaaagataactgccttatgatgacagatctccttacagaatatgctaaaacttttggttatacatttcgtctccaagactatgatgtcagttccatttcggctttaactcagaaactctgccatgtcgtgaaggttgccgatatagaatctggcagacagattcagctgatcaaccgaaagtctctgcgatctctcactgcccagttgctggtattgttgatgtcttgggaaggaaccacccatctttctgttgaggagctcaagagacattacgaaagtacccacaacactccccttaacccctgtgaatatggattcatgaccttgaccgaactgctgaagagcctgccatacttggttgagaccgctgcagccttcgacttgcaaatagaactgaagtttgctggaggctatagccttctcttggaggaaatccttgaatatatccctcctccttttctttctcctcttccttctttccttcctcctcctcctttcttcttctttgtcttttttgtcatcttcatcttcttcatctttgtctttgtccaattcgtcgtcttcgtcttctttatcgtcgtcttcgtcttcttcatcgtcgtcttcgttttcactaatgataagatggaagaatgtgtgaagctcacaagtctgtatttgtttgcaaagaatgtgcggtctttacttcatacttaccactaccagcagattttccttcatgagttttccatggcctataccaagtatgtcggagaaactctgcagcccaagacctacggccacagcagcgtggaggagctcttgggagcaattccacaggtggttgttcagtttctgcaaaaaaatggcaaagagctctcatgtgagaactaccttaatttatatgccaaagctggtcgtttgagttcactcagtctctcccctgccaatcatgaaaaccagccctcggagggcgagcgcatcctggaggtgcccgaatcgcacacagcctcggaactcaagcttggagctgacggcagtgggcccagtcacacagagcaggagcttctccgcctgaccgacgactcccccgtcgacctcctgtgtgcgcctgtcccctcgtgcctgccgtcccctcagctgagaccagaccccgttatcctccaatctgctgatctcattcagtttgaggagcgccctcaagagccttctgaaattatgattttaaaccaagaagaaaaaatggagattccaataccaggaaagagcaaaactctgacctctgactccagctcgtcctgcatctcagcagctgtccccgtgcctccctgcccctcctcggaaacctccgagtcactgctcagcaaggaccccgtggaaagcccggccaaaaagcaacccaaaaatagagtcaaattggcagccaacttttccttagcacctataaccaagctttaactcccatttggaatatagaattaggatgggaaaacactgtctgattctgcacacaaaagtgggtttcaaaaatacatccttttctgtgtcatgaaaaccccccgaagccattgacttcatcttacctgtgttctatcatgtttttcttttccattgaacacagctttgagctgaagtctttcttttcttcttcctttttctttcttttttcaattatttgaagaacttgtggcatttgttaaagaatccttaatatattttaccaaatttttagtaactattatgaaatacaatggtgttccaaaagaagaaagcactaaaaactcaactagcaggaagcggttttgcttccattgagccacgtcggtggtgtcatcctacatgtagcataatagagtctctcagcctttgcttactggtgtttccgacagtattaacccagtgcgtggcatgtctttgaagcaaagcctgtcccgctagcctgtgtgttcacacaccaaaggagaagggtaggcgaggggttcggagtgtattttcaggttggaatgtgaaggttcctggcttccatgtgacttgtaagtgtgccttgttttttatttaaactatgtctgtagttgacaaaagtggcttcatcacaaatttttttaaacgtttctactttggggttccatttaggagctttctagaaagttgaggatgtttgaagcttcccttctgtgttccagtttgatatgggttaggttaaggaaaaggagatggtctcgatgtcatggatttaaagtcagcatttggattacaacacacattattgtgtgtcgagaggcagcattggaaagagcctgattttctaaaatatgcatcaagtgcataaattacaaatcagagctgagtggggaggtgcttcagcagcagcgggatcaatacgatttccactgggaagagacaggaattctacctacacataggaaggccaaggttgatccacttaaccttgttattgtaattttaaagctggtatcggtagctgggaagctttatgtgtgtgtatgtcagctcagcatcttttaatcgtgtctgattttactctcgttacttctcgctgttggaagcatctctgggtttcttgtggcgtctggtgtggaatggccttcctctctaggtgcctgaggtgtccgctgacgggtggcctctcacccccctctagagaaacctgacatttacaatggattgtatttgtccggcaaaaaaggcggattcattcatagagcagaaagaacctgttggcgtaaggtcttccactagttagatggtttcttttggggaaatgtttatatttggtaacttctagaaagccagaaaatggactctgatttcatagcattttgataaaatgccacaaaataagggctatagagagatttttacaagtcagattttttgttccccaaatcttttaaatgaagccagtgactcccagttctcaacacatggccccagtcaagacagaacaccatggaaaaaaccctgtaagtattatggcactctccgaatcctcctgaaggcatttcctctacagacatagtgttacaggaagtgaaatgcaaatgtgcaattttttttaaaggagcttttaaacaaagtaataataattggtgttgagaacatcagttgccttattctaagatttcataaggctgagtttgcacgcttggacttcagttctgctagcatgtaaagagtggtggactttaaaaccgtaagaggtatcattacaagtcacctggaacagactcaaagaacaggttctttgggcaacagacaaagaagaatcaagttctgtgctgtcccgtgagtgtgtctgagtaccattcactggagttgctgcttaggtctgggacgtgtgtgtgactcttaacaattgctgtctgaaaatgagagagaagacttcggaagcacattgtgttcataatgtactccacaatggccagtccaattgctatctatttttttatccagaggcttaattaaatgatgtggtaaaatgatgtttgagcattaagacaatgtaattctttatttctgggtggaaagatataccggattaaatttatctgtttaaaaaaatgacaaaagttatcaccaaaaccccctttcccatcttgcactgtttgttttggattgggtttgggggaaagagatgtttttcttagttgtctactttgtttgaacacttttgttgtggttcaagtgctgttttgtgtgttgggaccaaacagttgtcaataaactttacaagcgagcatct

SEQ ID NO: 1253 - DNA, 7900 bp, Homo sapiens
  source 1..7900: mol_type = genomic DNA
gacggcggctcggcgatggctctcccgcaggcgcagaaacggctgctgggcagctgatgggcaggagcttaccaggctggcttgctctgagctgcggttactgtgtccaggccccgggttctcagaactgtcatacataaagtacacagaaatgaagagaaaagtcgtgaatactcacaagctgagattgagtcctaatgaggaagccttcattttgaaggaagattatgaaagaaggcgaaaactaagattgctacaggttcgagaacaagaaagagatatcgccttacagataagagaagacataaaacagaggagaaatcaacaatttacacgtttggcagaggagctaagggcagaatgggaagaatcacaaactcagaaaatacagaacttggaaaaactgtatttggcaagtttaagaagtatgggagagggacatcgacaggccaaagaaaatgaacctgatttggatgctttggcacagcgggcagcagaaaggaaaagaaaagcagatttgaggcataaagaagccttgaaagtacagaaaaatcaaaaagaaatattactgaaacaaaaaacctggcatataaaagctcgaaaggaagcactgcttgtggaaaaagagagatcagccaaaattacaagtctgccacctcctcctccaactctttttgagaacatcgaagtaaaaagaatttctgcagtcaaaaccaatagttctacctaccatcatcttcacacttttgtgaatagagagacagacacaaaacggccagatgctcgtttggctgctgaagaggaagctaaacgattggaagaactacaaaaacaggcagcacaagagagaatggaacggtttgaaaaggcacatgtacggggattccaagcaatgaagaagatccatttggctcaaaatcaggagaaactaatgaaagaactcaaacagctacagcaagaggacctggcacgtaggagacagactgtagcacaaatgccaccacaactagttgaacttccatacaaacgcagtgaaatgaaagaagactggcagagagaattggaatttgcctttgaagatatgtacaatgcagacaggaaggtgaaagggaatctgattctgcaccttgaaccagagcccttgcccactgtgactaatcagatccaagatgaagagctggacctttcaatggaacaagaaaatttgggtgcagctgaagaccttccagtgacagaagctgaaatatgttctagtgaaacagatgttcccttggtaatgaagacccaacagattccttcaaaagttctttttaaaaaattattaaataagatccgaagccaaaaatctctctggacaattaaatctatgtctgaggatgaaagtgaaatgattacgactgttagtgaaattgagagtaaagcaccaacggttgagtcaggaacaattgccagcaaagagagaacgttatcctctgggcaggaacaagttgttgaaagtgatacactaacaattgagtctggaccacttgctagtgaagataaaccactttcgtgtggtacaaactctggaaaagaacaagaaataaatgagactctgcctatcacaactgtagctcagagttcagttctacttcatcctcaagaagcagcagccaggattagaatgtcagcaaggcagaaacagataatggaaatagaagagcagaagcaaaagcaattggaattacttgaacaaattgaacagcagaaattaagattagaaactgactgcttcagggctcagctggaagaagaaaaaagaaaaaaaactcaaccgactggggttggcattgctccagcatcatgccctgtaatttctgatgaagatagtcataggcagatgattcgtaactatcaacatcagcttttacaacaaaacaggttacacaggcagtctgttgaaacagccaggaaacaattacttgaatatcaaactatgttaaaaggaaggtgcccatcggtgtcagctccatcattgataactgattctgttatatcagtgccatcatggaaatctgagagaccgactgctatatcagagcattgggatcaaggtcagagactcaagttgagtcctaacaaataccaacccatacaacctatacagacctccaaattagaacaagatcattttcaggtagcgagacaaaatcactttccacaaagacaggtggaaacaacagaaacattacgcgcttcagatattttaaccaatcaagctttagaatcacaagaacatctaaggcaattctctcagactgaaacacaacagagagactataaattggtccccaaagattctgagacactttcaagggctttgtcacatgacaggcagctaatatcacaggatgctagaaaaatatctgaaacatttggggcaacaacttttcaaagtttagaatcccaacaattgttctcagagaatagtgaaaatatatcttaccatttaactgaaccttcttcatttgtaccactggtacctcagcattcttttagttctctgcctgttaaagttgagtcaggaaaaattcaagaacccttttcagccatgagcaaaagtacagtttccacaagccattctataatcagccaaatgcatgataggcctttgctgccgtcagagaatatcacagcccagcaaggtaatatgaaggccctccaagaacagttagacctacagaagaaagttcttcaggcaactcaggaagctcaggaacagttgcttttgtgcaaacagaaagaagtggaacagcaaacgggcctctcggtattccttcccttggtaactccagattcatctgctttattgccttctgccaaagcagatttggggagaatccaggaatcttcaccaaccaagaataatattgcagtttcctcagaccatcatgtgatctcacaacttcaggataagcgtttgagtctttcacagcctatcctatcacagcaaaataattttaaatttctccaagagcagttgaatattcagaaggatagccttcaggctaggcgagaagcccaggaagtattgtatgtacataaacagagtgaattggatagaagagtatgttccgaacaggctgagccctctttcccatttcaggtagctcagcatacatttacttcactaccatctgctgatacaaaatctggaaaaatacaggagcaacattcatctaagagcgagaaaggacttgtttcatgccaatctgacatccccatatctcaggatgggtctttgagtttcctacagcagttcctacctctacatgatagtttgaagttgctccaagaacagttgactaaacagagggatactcttcaggctaggcatgaagctcaggtggaattacttttacatagacaaagagatttgggggacagtaagtctgggctggtgagctcttcatcctcaccagtggttgttcagcattcagttgcttcacaagcttctgctaaagctgagcctaggagaattcaggagctttatttatctgagaaggagaatgtaggtccctcctgtcatttgataatcccaacatttcaggataagtctcttagttttccacagcatagcctggcacagcaagaaaatttgacaatactccaagaacagtcacaaatacaaagggtaatacttggtgctaaagaaggaactcaggaatttgtacacacagaaagtgaattggagaaaagaatttcttctgaacagactggcacctcctcatccctttcccaggtggatgaatctgagagattccaggaatgtatatcaatcaagagtgacagtaccattcccttaagccatcctaagatcccaagatgtcaggaaagacttttgagagtttcacaacatatgctacctctacaagataatttggaggaacaccaagcatggctagacactgagaaagaagcctttcatttcagccagaaaacccaagaaaatacatcttctgaacaaactggttcatcttcattcataccccagttggtacagctttcatttacttcgttagcttcagctgagtctggcacaatcctggaacctctttttacagagagtgaaagtaaaattttttcaagccaccttcagatcccacaattgcaggataggcttttgaggatatcgcaacttatccagcctcaacaagataatttgaaggcacttcaagaacagttagctacacagagagaagccatcattctagctagacaagaagctcgggaagaattacttttacatcagagtgaatgggagggaagaatatctcccgagcaggttgacacctcttccttacccctagtaccacagcattcattcgcctcattacctcttaatgaatctgaaagaaaccaagaaccatgttcaattaacagtgataatatagtatcctcaggtcactcagagataccaacattgcctgatgggctgttgggtttatcacatcttgttttacctcaacaagataatttgattgcacttgaagaacacttgcatgcacagacagatttccttccttctattgagaaaacccagaaagaattggttttgtcaaaaccatgtaaatttgaggaaaaggtatcttctgagcattttatccagtctcaccatggtgatttgcaggcacttcaacagcagttagatacacagaagaaagccattcgatctatacaggaagtccaagaagaattgcttttgcaaagattaagtgaattggagaaaagggtatcatctgaacaagtttgctcctcttcatttgtatcccaggtgcctgttgctgactctgaaagaacccagaagtctttcccaaccaaaagtaatgatactcttccctcaagtcatcgtgagattccaagattacaggatagacttttgagtttatcaaagcctattctgcctcagcaagataatatgacagcacaattggatgcacaaagggaagtgatgtattcttatgagaaaccccaggaagaactgtctttaaacaaacaaagaaagttgaacaaaagtgaatctgctgagcatactatcccctctttgtttctacccaaggaaacagagcattcgtttattccactaccttttgcagaagctaaacctaaaagcacttgtgaattgtattcatcccagaatgaacatgcagcccccccaagtaatcctgtgatcccagggtttcaagatagacttttgagtttttcacagtctgtcttaactcagcaagataacttgggacttcagaaacagttggatctacaaagagaagttctgcattatagccagaaagcccaggaaaaattgcttgtacagagacaaacagcattgcagcagcagatacagaaacatgaagagactttgaaggatttctttaaagacagtcagataagtaagcccacagttgaaaatgatttaaaaacccagaagatggggcagctcagagactggtttcctaatacacaagacctagcaggaaatgatcaagaaaatattaggcatgcagataggaacaactctgatgataatcatttggcttcagaagatactagtgccaagcaaagtggtaaaccaggtatttatgaagacagagaccccctgcgagtctcaataagccgagaacaaagtttctttgggagcccactggcccatgatccgtttagttgtcttcaactggttggccaagagaatgtctgtggtgatgactatgatgaagcagttaagctgaaggaatctgttgttgaaaatcatgcagtgttaagttatgctgtggaggaagaacatgcatatttgggtccaactgtgaagccagatgataaggctaaaacactgtcttatgaaccattatcttcagcaactgtttccactgggagccttttaagttatgaaaacacagatttgagccttacagatccagagtcattttcagagcacatggatgatagcaagcaagaatctaccaccagtaaagaagaggaaacaaatattataagttccatagttccttcaacacaagatatttatcagcggcagaactcttcagacgttcataaatctctgttgcctgcagtggatgaaactacatgtggtcacacacactttcagcaaatgatagacaagtacattaatgaagcaaatttgatacctgaaaaaacagatttgcaagaattggaacacatttttcctaatttgcatcatcagctgtttaaacccttagaaccacatccagattttgacttatcatcatcatcctctgggatttctccagacaacagagacttttaccagagatcagattcttcatctgaaagccactgtgctactggattatccaaaagtacagtttatttcacagcactgaggaggaccagcatgcattcttctcttaacacaagtccgaatcaacaacctgacactaacttggctcatgttggagctcacagttttgctacagaaaatattattgggggatctgaacaatgttttgaacagcttcagccagaatattcttcacaggaggagagccagcatgctgatctaccaagtatttttagcattgaagcaagagattcttcccaaggcatgaaaaatcagaactatccctctgaagaacatactgaaatattacaaaacaagaaaaaaattgttcatttccagctttctataggaaacttaagttcagtctacagttcatctgatgaagctaatgtatttgatcagttaaatgtacagcatagcactccatgtggttctaactctagtgagtgctcaacaaaacaccaactagaaagcagaaaggaaagtatgggctttgaagaactatcaaaaagaggggttgttacaatgttacaaagtcaaggactcattgaagataataaaaatgaaacctgtagggttttagacataaatccacaggtagaggaaactgactctcgattatgtgtaagaacagtggagatgggaacttcaattcaggcaccatattccttaactactcaaaatgaaaaatattttgagaattcagctgaaacagacattccaaaaatcaccaaaaaactatctcaactaggagaatcagagctttttgcaagttctggatcattttcattacagagctctataccagtctgggaaacagaaactggccatggtataatggaagaaccagaacttactttaataagcaccactgataccagtattgctgaaatggattttgcaaatttaaccctagaagagaagagcgagaatgaagcaaaatgcttctttcaggtgagtgagtttctgcctcttgtatcagcaacagaagcctcagattatccagctgtatcagaactttccatagaaaaaccaaggacagcatctacagaaacccctcgcaggcttacacctgtaccagggagcttacaagaagcatttataaagaggaaaaaatcatttatggagagatcccaccagaggcagaaagaaataaggaataaaattcatgtctctgaaaattctcaaatcaaaacagttaaagagaaaccatctataagttcatctgtgagtcgtctaaagggcgtgaataaagtcagagcatcttttcctgaagacagaaagactacacaggctctaaggcaccaaaggggtctaaggttatacaatcaactagctgaagtgaaacaacaaaaggaagaaaaaacaaaacaagaagcttatgcccaaaacagagcaagggcaaaagaattccataagaaaacactagagaaacttcgagccaaaaatacatgctgactttctagaaatagtgtaaaggttttttaattgtgtatatgtagcattagacaaaattatttaaagtcaataaattgttattcgagg

SEQ ID NO: 1254 - DNA, 899 bp, Homo sapiens
  source 1..899: mol_type = genomic DNA
accggggagccaggtaccttccgcgagacgtcgaggggcgagtcctagtctcttttctccgcactggaagacttgaacacttccttctctgcagcaaagcacctgctctgagtggccatggggaagcgatacttctgtgactactgcgaccgctccttccaggacaacctccacaaccgcaagaagcacctgaacgggctgcagcacctcaaggccaagaaggtctggtacgacatgttccgagatgcagctgccatcttgctggatgagcagaacaagcggccctgcaggaagtttctactgacaggccagtgcgactttggctccaactgcagattttcccacatgtcagagcgagacctgcaggagctgagcatccaggtggaggaggagaggcgagccagggagtggctactagatgctcctgagctccccgagggccatctggaggactggctggagaagagagccaagcggctgagctcagccccaagtagcagggctgaacccatcagaaccactgtcttccagtaccccgtgggctggccaccagttcaggagctgcctccatccctgcgggcacccccacctggggggtggcctctgcagcccagagtccagtggggctgagccccttgcccccgactgacccccacgtggtcacttttctcatcagtcacaataggaagccaagcccggttcctgctacgccccatggaggctccgagaccatctgcccagcctcactgaggctcaggacacggccacaccaagtgcagccctcgtcctgggtctgcaccgggcagctctcccctcactctcctccacctgcccccctgcttcttaagaagatgggggagaaaacttccaaatgtttataaagaaagtctgtcaccaca

SEQ ID NO: 1255 - DNA, 4808 bp, Homo sapiens
  source 1..4808: mol_type = genomic DNA
aggttcaagtgcgcatgtgcgcgaggagtcgctcgggcacttattgagcgccgactgtctacgggcggccgggggtgatgggcagaggcttcagtgtccccttcgcctccgcaggagaggagaggcagcagcatggcgagtgtcctgtcccgacgccttggaaagcggtccctcctgggagcccgggtgttgggacccagtgcctcggaggggccctcggctgccccaccctcggagccactgctagaaggggccgctccccagcctttcaccacctctgatgacaccccctgccaggagcagcccaaggaagtccttaaggctcccagcacctcgggccttcagcaggtggcctttcagcctgggcagaaggtttatgtgtggtacgggggtcaagagtgcacaggactggtggagcagcacagctggatggagggtcaggtgaccgtctggctgctggagcagaagctgcaggtctgctgcagggtggaggaggtgtggctggcagagctgcagggcccctgtccccaggcaccacccctggagcccggagcccaggccctggcctacaggcccgtctccaggaacatcgatgtcccaaagaggaagtcggacgcagtggaaatggatgagatgatggcggccatggtgctgacgtccctgtcctgcagccctgttgtacagagtcctcccgggaccgaggccaacttctctgcttcccgtgcggcctgcgacccatggaaggagagtggtgacatctcggacagcggcagcagcactaccagcggtcactggagtgggagcagtggtgtctccaccccctcgcccccccacccccaggccagccccaagtatttgggggatgcttttggttctccccaaactgatcatggctttgagaccgatcctgaccctttcctgctggacgaaccagctccacgaaaaagaaagaactctgtgaaggtgatgtacaagtgcctgtggccaaactgtggcaaagttctgcgctccattgtgggcatcaaacgacacgtcaaagccctccatctgggggacacagtggactctgatcagttcaagcgggaggaggatttctactacacagaggtgcagctgaaggaggaatctgctgctgctgctgctgctgctgccgcaggcaccccagtccctgggactcccacctccgagccagctcccacccccagcatgactggcctgcctctgtctgctcttccaccacctctgcacaaagcccagtcctccggcccagaacatcctggcccggagtcctccctgccctcaggggctctcagcaagtcagctcctgggtccttctggcacattcaggcagatcatgcataccaggctctgccatccttccagatcccagtctcaccacacatctacaccagtgtcagctgggctgctgccccctccgccgcctgctctctctctccggtccggagccggtcgctaagcttcagcgagccccagcagccagcacctgcgatgaaatctcatctgatcgtcacttctccaccccgggcccagagtggtgccaggaaagcccgaggggaggctaagaagtgccgcaaggtgtatggcatcgagcaccgggaccagtggtgcacggcctgccggtggaagaaggcctgccagcgctttctggactgagctgtgctgcaggttctactctgttcctggccctgccggcagccactgacaagaggccagtgtgtcaccagccctcagcagaaaccgaaagagaaagaacggaaacacggagtttgggctctgttggctaaggtgtaacacttaaagcaattttctcccattgtgcgaacattttattttttaaaaaaaagaaacaaaaatatttttccccctaaaataggagagagccaaaactgaccaaggctattcagcagtgaaccagtgaccaaagaattaattaccctccgtttcccacatccccactctctaggggattagcttgtgcgtgtcaaaagaaggaacagctcgttctgcttcctgctgagtcggtgaattctttgctttctaaactcttccagaaaggactgtgagcaagatgaatttacttttcttaaaaaaaaaaaaaaaaaaaaaaaaaaagagtttctggctgatgggtgactcagagtgcaggactgcctggccgtggggcagaggggtttgcccttctcggagggtacctcctgttccctgtctgagcatcctgcatggaagtcaaaggaaatccctttcttggtgacgacttaaatctgggttccctcagacattgggttgcaccccaacaaatattaaatggcttcttcttaaagcccagagaaagaggttttttaaaagactgtcgccaaatagctgagccaaaaggctgatcagaattcactttttggaatgtggcagttaaacactaccttgatcattctctcctctttcctcgaggaactcctggagggtttgagcgtctggaaactctctgctctgacccgaggaagcaccctcctgacgccgccttcctccggttattgaaaggacgcctcagaaatgctttgttttcttttacgatgtattcagaagcctttactgattaaagttttcttttatttgggtggccgggagagacccagggaggttctggaggttcctttctgtctcctggccccaccagggatttccccatttctgtttgctgcctgaaagcaggatgaggaaggccaaggagagtccttgcacccgtgagcgtcaggatgaggaaatgacaggaggaagacgtgggtttgggttagtggctgctggcgttttggcccttggtgtttctggagcctccagggatctaggggagcctgggctgcgtgcatgtcgataagcagagctgttcttggggagaaggagggaggtctcgggagtgtagcaccatgccaaccagccctgcgcgaagacagagtgagccacgcccggatggcagggcatgtttctgttttggtgtctcactttcctcccagcgtgacttatttggggattcctcagggcctactggaatgtgactgcccactgcccagctgcctcgggtacaagtcctggccctatgtcccagctgtcaggggctcagggaatcctacccagccacctgtcctgggatggagtgtcagcatccaccccttggttgtcatcgaggccgccctcccagtcctgggtgaagatatttgggccaccagggctcccttggccccttcacgtaggaaatagacacgtgctttttaatgcaggacactttgagtgttacaaaatctgtagacctggcagtagggtcatgatgttgggaagggtgtagtgccctaggttggtgacagaagggacagacacttgtgcacaggtgtctttggtgatggggtttttttttttataacttagtaaaaaaaaaaaaatgtatgtggaattctgtctcttggtaaagctcaaagccaggctagcctgaggtggcgcagggctctccttcctgtcccttcgatctccttgagaattaagagctggcagctgctgatggtgtttcccaacccccctcacttcccaagacaacccccagcttcaggtcctcatggggaggggagggcacgttcttgacacatgggaacttcgctcaggagggcctccccttcccctctccctcagagttttcactgccgtctcgtctttagaaagctgtttgaattccccccgcccccagtttggaccgtgtagatataactggatatacggatttttctctttgtgcaggcttcttatgccgttggtatacagggcaggaaagagaggaataaagggagagagcagtgtggaaaccacggtggttttgctttgttcttactaggttttggtgccaccttccctgcctgcgcttgtgccccctctcctccttggcactggcggcctccttgcctcccttccacccgtgctgccatcccgtgcctgtcgtgttggttcttcacacgtgctctgttctcggggttgttccattcatgccttcttggagggtgagggtggcttgggaaccgacccagtgatcatgcctactttcttctttgtatctccctccttcccagcccacccgggcagcagactctgatggaaggaaggtgccgtaggtgggcttttagaaactaacgggactggttttcaaagcagttatcttgggaaactgtttattccagcgatgtgacttttttcagaatatttcttggaatcatattcagagtctggggctgtgtgttgagcagccttaaggatgctagacactcatttagtgcccagggagtccagcgaatgacgtctgtggccaagcgaggtctcaggtgcaaagcaaaaggaccatttaaagtaaaatagcttggattcaatcatgtgacttttaaattggctcagaaagcaattttgtaatttcagagagtgttttgagccatggccacgttgtcattgtgagtctatagcttgactccttggagaacaatattcatttggttgtggagactgatttgctgggagaaatctgtcctgttactttctggtcatcccaggttctgacttttaccaggggcaaaaaaaaaaaaagcaagagggagataaatcccatctgtgagtttgtcttattggcgcctttttcctcagctgtcttccaagtattatttttactgttaaaaaattttttaaaaatgtgaaatgtaatgtttttacagcaacaatatgaaatatattttataaggaataaaatggtaccttgtctgatttaa

SEQ ID NO: 1256 - DNA, 1485 bp, Homo sapiens
  source 1..1485: mol_type = genomic DNA
gagcccgagcctagtgcctcccacgcccggcggccgcgagccggggtccgcgagggcggagtggggcgcggcagccaggaacccgactacgaatcccagggtgcgggcgggcggagcgaggagggacgctgggcctgcccggtgcgcacgggggcggggaccggcaaggcgggaccatttcccggcataggctccggtgcccctgcccggctcccgccgggaagttctaggccgccgcacagaaagccctgccctccacgccgggtctctggagcgccctgggttgcccggccggtccctgccgctgacttgttgacactgcgagcactcagtccctcccgcgcgcctcctccccgcccgccccgccgctcctcctccctgtaacatgccatagtgcgcctgcgaccacacggccggggcgctagcgttcgccttcagccaccatggggaatgggatgaacaagatcctgcccggcctgtacatcggcaacttcaaagatgccagagacgcggaacaattgagcaagaacaaggtgacacatattctgtctgtccacgatagtgccaggcctatgttggagggagttaaatacctgtgcatcccagcagcggattcaccatctcaaaacctgacaagacatttcaaagaaagtattaaattcattcacgagtgccggctccgcggtgagagctgccttgtacactgcctggccggggtctccaggagcgtgacactggtgatcgcatacatcatgaccgtcactgactttggctgggaggatgccctgcacaccgtgcgtgctgggagatcctgtgccaaccccaacgtgggcttccagagacagctccaggagtttgagaagcatgaggtccatcagtatcggcagtggctgaaggaagaatatggagagagccctttgcaggatgcagaagaagccaaaaacattctggccgctccgggaattctgaagttctgggcctttctcagaagactgtaatgtacctgaagtttctgaaatattgcaaacccacagagtttaggctggtgctgccaaaaagaaaagcaacatagagtttaagtatccagtagtgatttgtaaacttgtttttcatttgaagctgaatatatacgtagtcatgtttatgttgagaactaaggatattctttagcaagagaaaatattttccccttatccccactgctgtggaggtttctgtacctcgcttggatgcctgtaaggatcccgggagccttgccgcactgccttgtgggtggcttggcgctcgtgattgcttcctgtgaacgcctcccaaggacgagcccagtgtagttgtgtggcgtgaactctgcccgtgtgttctcaaattccccagcttgggaaatagcccttggtgtgggttttatctctggtttgtgttctccgtggtggaattgaccgaaagctctatgttttcgttaataaagggcaacttagccaagtttaa

SEQ ID NO: 1257 - DNA, 2189 bp, Homo sapiens
  source 1..2189: mol_type = genomic DNA
cggggtcggtaaggggtgcggcaatgctgcaactgcgggactcggtggactcggccggtacgagccccacggcggtgctggcggccggcgaggaggtgggggcaggcggcggcccgggcggggggcggccgggggcggggacgccgctgcgccagacactctggcctctcagcatccacgaccccacgcgccgcgcccgcgtcaaggagtacttcgtgttccggcccggcagcatcgagcaggcagtggaggagatccgcgtggtggtgcggcccgtggaggacggcgagatccagggagtgtggctgcttaccgagcgagaaggttttgggattcgaattcagtgggacaagcaaagtcgtccttccttcataaacagatggaatccctggtctaccaacgtgccctatgccactttcacagaacacccgatggctggcgcagatgagaagacagcatctctgtgtcagttggaaagcttcaaggctctgttaatccaagctgtcaaaaaagcccaaaaagaaagccctttgccaggacaggcgaatggcgtgctgatcctggagcgccccctgctcatcgagacctacgtgggactcatgtccttcattaacaacgaggcgaaactgggctactccatgaccaggggcaaaataggcttttagccgctgcgttctgggagctcctcccccttctgggagctcctccccctccccagaaggccaagggatgtgggggctgggggactgggaggcctggcagtcttcatgctgccctgctgctgctggaaggatggggatctttcacctttagggatctcagcacaattagaatcgtaaagtgaattctatctatttaattggatattggactctgctcatataagctacagacaaaagccaaaagactctcgctgtccctgtgctgctggtatttcattctctgtaacttcagttctggtgttttccttgagtatctacttggcttctcgtggtttttcccaccccagctgccccagcacgcgggacccatagcacaccccttagcgcttgcctaggttgctgaaaacagggaggcacctggtatctcgagtgcctgcagttgcaagtatgtttacacctggtgtccaattttgtattttaaaatgtaatccatttttacttcagctcatccaaaagcagccagcagaccggttgactgagaccggtctgtggctgtgggccccttggtgacccgctgctcttttggaaatgggtgacctgaagtgacactttttccacaattaacccaagttgtgttaatacttcaggtctgtttcccagacccagaaagctttacagaaaatcattgtaagacaatttattaatttgagaaagtcaccttgacagttctttgcacacaagttttacacctctctggattcgaagtttgtattgtattcatagttaaagggaatcgggtactttgcttgttgaataatgcactttaaaacaaggaaccgtatcaggccagcatggtggctcatgcctgtaatcccagcattttgggaggctcaggcagacaaatcgctctagctcagaagttgcagagcagcctgggcaacatggtgaaacccgtctctaccaaacagacaaaaagcagccaggcgtggtggcacatctgtggtcccagctacttgagaggctgagccaggaggatcgcttgagcccaggaggcggaggttgcagtgagctgagatggcaccacttattgcactccagcccgggcgacagagcgagactccatctaccagatccttatgacgcagctgatgcctgccttggttcctaccactctggtgtagacagaggactttgtccaagtctcacactaaacatgcccgggcttcgatgtgcctggaggatttccccacagggacccacgcacctccctgtatctgcgcagcttgctcgtgtggctggaagcgctgtcgataagcttcacgcactggcttgccagttcttcagctctaggacttgtagctttaagcaaacggtgtggcatgggttgagtgtggccacctgcaggatgtgcagggctgcctcagaagctggctggggactctagcctctgtgttcataaagacattaagaagtggatggatgttgttccttttttgaagttgtcattaaagtaggtgcaacaaccaa

SEQ ID NO: 1258 - DNA, 1592 bp, Homo sapiens
  source 1..1592: mol_type = genomic DNA
gtccctttgatgacgcggagcctgagccagaccagggggatccaggggcctgctgctccctgtgcgcccagaccatccaggatgaagaggggcccttgtgttgcccccaccctggctgcctgctaagggcccatgtgatctgcctggcagaggagtttcttcaggaagaaccagggcagcttctgcccctagagggccaatgcccttgctgtgagaagtcactgctttggggagacctgatctggctgtgccagatggacactgagaaagaagtagaagactcagaattagaagaggaacatggagctgatccaggacacctcccgcccgccactggagtacgtgaagggggtcccgctcatcaagtactttgcagaggcactggggcccctgcagagcttccaagcccgacctgatgacctgctcatcaacacctaccccaagtctggcaccacctgggtgagccagatactggacatgatctaccagggcggcgacctagagaagtgtaaccgggctcccatctacgtacgggtgcccttccttgaggtcaatgatccaggggaaccctcagggctggagactctgaaagacacaccgcccccacggctcatcaagtcacacctgcccctggctctgctccctcagactctgttggatcagaaggtcaaggtggtctatgttgcccgaaacccaaaggacgtggcggtctcctactaccatttccaccgtatggaaaaggcgcaccctgagcctgggacctgggacagcttcctggaaaagttcatggctggagaagtgtcctacgggtcctggtaccagcacgtgcaggagtggtgggagctgagccgcacccaccctgttctctacctcttctatgaagacatgaaggagaaccccaaaagggagattcaaaagatcctggagtttgtggggcgctccctgccagaggagaccatggacttcatggttcagcacacgtcgttcaaggagatgaagaagaaccctatgaccaactacaccaccgtcccccaggagctcatggaccacagcatctcccccttcatgaggaaaggcatggctggggactggaagaccaccttcaccgtggcgcagaatgagcgcttcgatgcggactatgcggagaagatggcaggctgcagcctcagcttccgctctgagctgtgagaggggctcctggagtcactgcagagggagtgtgcgaatctaccctgaccaatgggctcaagaataaagtatgatttttgagtcaggcacagtggctcatgtctgcaatcccagcgatttgggaggttgagctggtaggatcacaataggccacgaatttgagaccagcctggtaaaatagtgagacctcatctctacaaagatgtaaaaaaattagccacatgtgctggcacttacctgtagtcccagctacttgggaagcagaggctggaggatcatttcagcccaggaggttgtggatacagtgagttatgacatgcccattcactacagcctggatgacaagcaagaccctccctccaaagaaaataaagctcaaaataaaatatgatttgtgttcatgt

SEQ ID NO: 1259 - DNA, 5356 bp, Homo sapiens
  source 1..5356: mol_type = genomic DNA
ccttaattagaaatgcgttagcgaatattatacgcttatactatgggcggacgggtggagagccttaaaaacaacaacaacaaactaagcagttgctcaatcgttgattgatcctcaggcacgtctagattttcccacttacataggtcttgttaagaaaccagtcctgccttcttgccactcgtgtctttcgatggctcccttcccgaagtcccgctgcctctaagcggagtgttaagcggggctctcggaagccggtggaccgagatttccccgggtggggcgggcgcggtgtagcggcccgcgggctgacttgctcccggctgtcccccggccccagcgaccatgccccgtaaaggcacccagccctccactgcccggcgcagagaggaagggccgccgccgccgtcccctgacggcgccagcagcgacgcggagcctgagccgccgtccggccgcacggagagcccagccaccgccgcagagactgcaagtgaggaacttgataatagaagtttagaagagattttgaacagcattcctcctcccccgcctccagcaatgaccaatgaagctggagctcctcggcttatgataactcatattgtaaaccagaacttcaaatcctatgctggggagaaaattctgggacctttccataagcgcttttcctgtattatcgggccaaatggcagtggcaaatccaatgttattgattctatgctttttgtgtttggctatcgagcacaaaaaataagatctaaaaaactctcagtattaatacataattctgatgaacacaaggacattcagagttgtacagtagaagttcattttcaaaagataattgataaggaaggggatgattatgaagtcattcctaacagtaatttctatgtatccagaacggcctgcagagataatacttctgtctatcacataagtggaaagaaaaagacatttaaggatgttggaaatcttcttcgaagccatggaattgacttggaccataatagatttttaattttacagggtgaagttgaacaaattgctatgatgaaaccaaaaggccagactgaacacgatgagggtatgcttgaatatttagaagatataattggttgtggacggctaaatgaacctattaaagtcttgtgtcggagagttgaaatattaaatgaacacagaggagagaagttaaacagggtaaagatggtggaaaaggaaaaggatgccttagaaggagagaaaaacatagctatcgaatttcttaccttggaaaatgaaatatttagaaaaaagaatcatgtttgtcaatattatatttatgagttgcagaaacgaattgctgaaatggaaactcaaaaggaaaaaattcatgaagataccaaagaaattaatgagaagagcaatatactatcaaatgaaatgaaagctaagaataaagatgtaaaagatacagaaaagaaactgaataaaattacaaaatttattgaggagaataaagaaaaatttacacagctagatttggaagatgttcaagttagagaaaagttaaaacatgccacgagtaaagccaaaaaactggagaaacaacttcaaaaagataaagaaaaggttgaagaatttaaaagtatacctgccaagagtaacaatatcattaatgaaacaacaaccagaaacaatgccctcgagaaggaaaaagagaaagaagaaaaaaaattaaaggaagttatggatagccttaaacaggaaacacaagggcttcagaaagaaaaagaaagtcgagagaaagaacttatgggtttcagcaaatcggtaaatgaagcacgttcaaagatggatgtagcccagtcagaacttgatatctatctcagtcgtcataatactgcagtgtctcaattaactaaggctaaggaagctctaattgcagcttctgagactctcaaagaaaggaaagctgcaatcagagatatagaaggaaaactccctcaaactgaacaagaattaaaggagaaagaaaaagaacttcaaaaacttacacaagaagaaacaaactttaaaagtttggttcatgatctctttcaaaaagttgaagaagcaaagagctcattagcaatgaatcgaagtagggggaaagtccttgatgcaataattcaagaaaaaaaatctggcaggattccaggaatatatggaagattgggggacttaggagccattgatgaaaaatacgacgtggctatatcatcctgttgtcatgcactggactacattgttgttgattctattgatatagcccaagaatgtgtaaacttccttaaaagacaaaatattggagttgcaacctttataggtttagataagatggctgtatgggcgaaaaagatgaccgaaattcaaactcctgaaaatactcctcgtttatttgatttagtaaaagtaaaagatgagaaaattcgccaagctttttattttgctttacgagataccttagtagctgacaacttggatcaagccacaagagtagcatatcaaaaagatagaagatggagagtggtaactttacagggacaaatcatagaacagtcaggtacaatgactggtggtggaagcaaagtaatgaaaggaagaatgggttcctcacttgttattgaaatctctgaagaagaggtaaacaaaatggaatcacagttgcaaaacgactctaaaaaagcaatgcaaatccaagaacagaaagtacaacttgaagaaagagtagttaagttacggcatagtgaacgagaaatgaggaacacactagaaaaatttactgcaagcatccagcgtttaatagagcaagaagaatatttgaatgtccaagttaaggaacttgaagctaatgtacttgctacagcccctgacaaaaaaaagcagaaattgctagaagaaaacgttagtgctttcaaaacagaatatgatgctgtggctgagaaagctggtaaagtagaagctgaggttaaacgcttacacaataccatcgtagaaatcaataatcataaactcaaggcccaacaagacaaacttgataaaataaataagcaattagatgaatgtgcttctgctattactaaagcccaagtagcaatcaagactgctgacagaaaccttcaaaaggcacaagactctgtcttgcgtacagagaaagaaataaaagatactgagaaagaggtggatgacctaacagcagagctgaaaagtcttgaggacaaagcagcagaggtcgtaaagaatacaaatgctgcagaggaatccttaccagagatccagaaagaacatcgcaatctgcttcaagaattaaaagttattcaagaaaatgaacatgctcttcaaaaagatgcacttagtattaagttgaaacttgaacaaatagatggtcacattgctgaacataattctaaaataaaatattggcacaaagagatttcaaaaatatcactgcatcctatagaagataatcctattgaagagatttcggttctaagcccagaggatcttgaagcgatcaagaatccagattctataacaaatcaaattgcacttttggaagcccggtgtcatgaaatgaaaccaaacctcggtgccatcgcagagtataaaaagaaggaagaattgtatttgcaacgggtagcagaattggacaaaattacttatgaaagagacagttttagacaggcatatgaagatcttcggaaacaaaggcttaatgaatttatggcaggtttttatataataacaaataaattaaaggaaaattaccaaatgcttactttgggaggggacgccgaactcgagcttgtagacagcttggatcctttctctgaaggaatcatgttcagtgttcgaccacctaagaaaagttggaaaaagatcttcaacctttcgggaggagagaaaacacttagttcattggctttagtatttgctcttcaccactacaagcccactcccctttacttcatggatgagattgatgcagcccttgattttaaaaatgtgtccattgttgcattttatatatatgaacaaacaaaaaatgcacagttcataataatttctcttcgaaataatatgtttgagatttcggatagacttattggaatttacaagacatacaacataacaaaaagtgttgctgtaaatccaaaagaaattgcatctaagggactttgttgaactttatgctgaagattcttcaagttgattcagtgtattactgatttttttctatttgtaaaggattatgagttgtataaaatacatactccctaaactagatcatgaaactggtttctgttttatgcagttgtcatttgtaaagtctaataaaatattctctataattgcttctagattacaaaaatatgacaatcttgtaagtagcagactatggagaaaaatgagttacctggagggtcaggtaacttgccaaactaaaaagtatgttagttgaggcaaagtcctaagcaaggttgtgctatcaaggctcagcataccttcgtgggcctttgatttaccaacactggaaatgcctgccaactaatcttggatagattctttaaggcattccacttagcttgccagttgagacaatcaccacagttattacccaaatactatgaacatatttttgtaaaccagtcattctgaattatagtgatgagaatttaaatatatgcttttctagaatttgatgtttgaccatttatgacttaattaccagagagccagtaaattaggacagtgtttcaacaagcctaggctatctcgtaagttgaaaaatatcccactatagttgcttcatgagtatgaagtaagatggcctctgatttacactggttcaatttacaaattttcaactttatgataggtttatccgggtactaaatgcatttcaacttgatagtttcaacttatgataggtttaccaggatgtagtcccactgttgaggagcatctatttaggggttaattactttagtaataagtggaaagtaagataccttgagtaatgtttgcctataaaattgtcagcgtatttttacactattggctcaagaatgttataatgctaagggacataagttggcaaccacttggtttttggaaggactttcggtattgtattagaagtctgccctagctgttaaatttctgggtatttatcctaaggaattaattaaagagttaattgttcctttcttcagtgggccattgttttagatatttaaaaaatccaacagtttctatcataatgtaactgtaaaaatgtaaacacattattagcatggacttttaaataaagatttaaagaaagcaa

SEQ ID NO: 1260 - DNA, 3893 bp, Homo sapiens
  source 1..3893: mol_type = genomic DNA
ataaggctacggatgggcgggacggagcagcccaccgcaaagtggcggtctacttgaggcggttaccttagtactccgagtagactgagtctgtggcgagctgcgggccgattcctggccagtgccatctcagccggagcaggcctcggggcctcagaagcaggcttttatctggcccgaggctcccagccgttcagcgcgtcttcccataacctataccgattattgggactctcggctgcagacacaggagtcacagatgctgggaagtatggcccgaaagaaacctcgaaatacctcaaggttgcccctggctttaaaccccctgaagagcaaggacgtgttggcagtgctggctgagaggaacgaggctatagtaccagttggggcatgggtggaacctgcctcaccaggtagttcggaaatcccagcatatacatcagcatatttaattgaagaagaactaaaggaacagctaagaaaaaaacaagaagctttgaaacattttcagaaacaagttaaataccgagtaaatcaacaaattaggttgagaaaaaagcaacagcttcagaagtcttatgaaagagcacaaaaagaaggctccatagccatgcagtcttcagcaacacacttaacttccaaaaggacaagtgtttttccaaacaatttgaatgttgctattggaagttctaggttacctccttccctgatgcctggggatggaatagaggatgaagagaatcagaacgaattattccaacaacaagcccaggctcttagtgaaactatgaaacaggcacgtcaccggctagcatcctttaaaaccgtgattaaaaaaaagggatcagtgtttccagatgatggaaggaaaagctttcttaccagagaggaagtgctttccaggaaaccagcatccactgggataaatacaggaataagaggagagttgcccattaaggtccatcaaggtcttttagctgctgtaccttaccagaattatatggaaaatcaggaacttgactatgaggaacctgactatgaggaatcttcatctcttgtaactgatgagaaagggaaagaagatttgtttgggagaggccagcaggaccagcaggctatccattctgaagataagaacaaacctttcagcagagttcagaaagtaaaattcaaaaatccattatttgttctgatggaagaggaagaacaaaagcagttacattttgagggccttcaggatattctgccagaagcccaggattattttctagaagcccaaggtgatttgctggaaacccagggtgatttgacaggaatccagagtgttaagccagatacccaggctgttgaaatgaaggttcaggttactgagccagaaggccaggccattgagccagaaggccagcctattaagacagaaactcagggtattatgctgaaagcccagagtattgagctagaagaagggagtattgtgttgaaaacccaggattttctacccacaaatcaggctcttctaacgaaaaaccaggatgttttactcaaagaccactgtgttctccctaaagaccagagtattctactcaaatatcaggaccaggacttcctacccagagaccagcatgttctccacaaagaccaagatattctgccaaaatatcaggaccagaattttctacctaaggaccagaattttttatctagagaccagcatgttctccccaaagaccaagatattctgccaaaatatcaggaccagaattttctacctaaggaccagaattttttgtctagagaccagcatgttctccccaaagaccagaatattctacctaaatatcaaggccaggattttctacctaaagaccaggactttttatctagagaccagcatgttctccccaaagactggaatattctacccaaatgtcaggaccaggattttctacccagagaccaaggtgttcttcccaaagaccaaaatattctacccatatgtcaggaccaggattttctacccagagaccaaggttatcttcctaaagaccaaaatattctacccatatgtcaggaccgggattttctacccagagacctgcatgttctctccaacgaccagaatattctacccaaatgtcaggaccaagattttctaccaaaatatcagaaagtacactttaaggagccatactctgatatgacagatgagaaagggagagaagacttttctctggcagactatcagtgtttgcctcccaaatcccaggaccaggatgacatcaaaaatcagcaacctgcatcttttatgagagaagaaagagtgagagaagaattgcctctggactatcatcaatatgttgtacctaaaatccaggaccaagactcccctagagaacagaacaagcatatcaaactaccctcatcttttgagaaatgggagattgcaagaggaaatactcctggagtgcccttggcttatgataggtatcaatcaggattgagcactgaattccaagctccactggcatttcagtctgacgtggataaagaagaagataagaaagagcgtcaaaagcagtacctgagacatagacgacttttcatggatattgagagagaacaagttaaagaacaacaaaggcaaaaagaacaaaagaagaaaattgaaaaaattaagaaaaagagagagcaagaatgttatgctgcagagcagaggatcctaagaatgaactttcatgaagatccatattcaggagagaagttgagtgagatattagcccagttacaacttcaagaaataaaaggaaccagagaaaaacaacagagagaaaaagaatacctgagatatgtagaagctttacgagcccaaatccaggagaaaatgcagctgtataatattactttacctccactatgctgttgtggtcctgatttttgggatgctcatcctgatacctgtgccaacaactgtattttctataaaaaccacagagcatatactcgggcactacattcattcatcaattcctgtgatgtccctgggggtaattcaactcttcgagtcgcaattcataattttgcttctgcacacaggcggactttgaaaaatctataataagaatctgaaattaactggtagtattttggcttttacttaaaatcatccctgagagagtatttaagaaaagctgttcaagttataaaatatataatctgggaagaaatactgtctcatataataattagattgtaatcattgttttaatctctgtctgggaaccaagattgaaagctgacttacttctctcttctgtcttgtgaaccatacggagcctattattttaaaatatgatcagacaagtaaggcttctcttactttgctctgctctgatcagaagagctcatgtgaagtctttgagattctcttatttatcatctttctaaaactgtgtttttgagcttgacagtactgaaaatgtctggatgaagcagaaaagaaagtgatgaaatgtgtttctgagcatcagagaccatctatattgccattaccttttctagttgtatataagaattcaagattagaagaatttagatttgttgcacatttttttcctcagcattttttcctcttgttttttaaaatgtattgcctctttccccattcagtgacactggacataggaatttttaattgtgtaattttctgttgcaaaaagggtaaataaatcctttgtcttttgaatatcttctatgtgaaataattgtgagtgacatttgaaaaagtgaatctgaagtcaaagtgagtaaattccttatttccctattttttaaaaacctggtatatgacatggctacagggcaaatgaaataaaaattgccatagttggtatgaa

SEQ ID NO: 1261 - DNA, 1852 bp, Homo sapiens
  source 1..1852: mol_type = genomic DNA
gagtgcgcacgcatcctgcccgcggcgcgcgcgcaggtcggtgcgtctgtcgggggcgcgctcgggtacctgtaccccacgtagtcgccggttaccgatcggactaagttccagtggtgatttacaagtcaagttaaaatgtccccagaagtggccttgaaccgaatatctccaatgctctcccctttcatatctagcgtggtccggaatggaaaagtgggactggatgctacaaactgtttgaggataactgacttaaaatctggctgcacatcattgactcctgggcccaactgtgaccgatttaaactgcacataccatatgctggagagacattaaagtgggatatcattttcaatgcccaatacccagaactgcctcccgattttatctttggagaagatgctgaattcctgccagacccctcagctttgcagaatcttgcctcctggaatccttcaaatcctgaatgtctcttacttgtggtgaaggaacttgtgcaacaatatcaccaattccaatgtagccgcctccgggagagctcccgcctcatgtttgaataccagacattactggaggagccacagtatggagagaacatggaaatttatgctgggaaaaaaaacaactggactggtgaattttcagctcgtttccttttgaagctgcccgtagatttcagcaatatccccacataccttctcaaggatgtaaatgaagaccctggagaagatgtggccctcctctctgttagttttgaggacactgaagccacccaggtgtaccccaagctgtacttgtcacctcgaattgagcatgcacttggaggctcctcagctcttcatatcccagcttttccaggaggaggatgtctcattgattacgttcctcaagtatgccacctgctcaccaacaaggtgcagtacgtgattcaagggtatcacaaaagaagagagtatattgctgcttttctcagtcactttggcacaggtgtcgtggaatatgatgcagaaggctttacaaaactcactctgctgctgatgtggaaagatttttgttttcttgtacacattgacctgcctctgtttttccctcgagaccagccaactctcacatttcagtccgtttatcactttaccaacagtggacagctttactcccaggcccaaaaaaattatccgtacagccccagatgggatggaaatgaaatggccaaaagagcaaagggatgccaagggagcagagatgcctgcagcccgtgggagcaagtcctggcctttgcagttgcaaaaactggctgcaagctgctccagccccagaggaactggccaagctccagagggcctccttggagggcctcagagggagagagaactgctcagtaattttgatcactttgggcttatttcaaaacctttgtccctcagttccaggaggcagcatttgccaatggaaagctctaggaaacaccagtcttgagaggtggccagccagactgcctgtccacatgcgtgtcagcacatacagccgcttcctggaagccgcctggaatgtcttcacggcagcgttttgctcacacagcagcttttgcacgccccaggcagccccgactgctgaaatccaacttgagctggctggtggtccctggatcctagagcccttcacttcgggttactccctctttcttgcctctatttcttagttggaagaaataaactcacaaattatggtgcagtaattttccggggaaagtaaagcctcaggaatgcccacgcctttcttccaaagcctttgtctctgagacctcttaagttctaagattaaatgcccctcgctgttcttcctctgaaa

SEQ ID NO: 1262 - DNA, 1678 bp, Homo sapiens
  source 1..1678: mol_type = genomic DNA
ctctggttcccttccacgctgtggaagctttgttcttttggtcttcatgataaatcttgctgctgctcactcgttgggtccgtgccacctttaagagctgtaacactcaccgcgaaggtctgcaacttcactcctggggccagcaagaccacgaatgcaccgagaggaatgaacaactctggacacaccatctttaagaaccgtaatactcaccgcaagggtctgcaacttcattcttgaagtcagtgaggccaagaacccatcaattccgtacacattttggtgactttgaagagactgtcacctatcaccaagtggtgagactattgccaagcagtgagactattgccaagtggtgagaccatcaccaagcggtgagactatcacctatcgccaagtggcctgattcagcaggaagcatctcagacaccaaccactatgctgtcagcagttgcccggggctaccagggctggtttcatccctgtgctaggctttctgtgaggatgagcagcaccgggatagacaggaagggcgtcctggctaaccgggtagccgtggtcacggggtccaccagtgggatcggctttgccatcgcccgacgtctggcccgggacggggcccacgtggtcatcagcagccggaagcagcagaacgtggaccgggccatggccaagctgcagggggaggggctgagtgtggcgggcattgtgtgccacgtggggaaggctgaggaccgggagcagctggtggccaaggccctggagcactgtgggggcgtcgacttcctggtgtgcagcgcaggggtcaaccctctggtagggagcactctggggaccagtgagcagatctgggacaagatcctaagtgtgaacgtgaagtccccagccctgctgctgagccagttgctgccctacatggagaacaggaggggtgctgtcatcctggtctcttccattgcagcttataatccagtagtggcgctgggtgtctacaatgtcagcaagacagcgctgctgggtctcactagaacactggcattggagctggcccccaaggacatccgggtaaactgcgtggttccaggaattatcaaaactgacttcagcaaagtggtgaggattggtttcatgggaatgagtctctctggaagaacttcaaggaacatcatcagctgcagaggattggggagtcagaggactgtgcaggaatcgtgtccttcctgtgctctccagatgccagctacgtcaacggggagaacattgcggtggcaggctactccactcggctctgagaggagtgggggcggctgcgtagctgtggtcccaggcccaggagcctgagggggtgtctaggtgatcatttggatctggaggcagagtctgccattctgccagactagcaatttgggggcttactcatgctaggcttgaggaagaagaaaaacgcttcggcattctccttaggacttatctgcttgtagatttggctgatccaattaacatgtggggttcttggtgtgggtctggggagctgaaggattttatggagctggtgctttggaggaatcttaagggaaaggagtagaagctcaggcctttgaaggatttcagctcctcctctctgtaatttgtgctttaagcattttttttcctaaaataaactcaaatttatcctcaa

SEQ ID NO: 1263 - DNA, 1187 bp, Homo sapiens
  source 1..1187: mol_type = genomic DNA
atgaggtttgatactttatgggaaaacaaactaatgcagtccagggcagtagatggatttcattcagaagagcagcagcttctactgcaagttcaacagcagcatcaaccccagcagcagcagcatcaccaccatcaccatcatcagcaagctcagcctcagcagacagtacctcagcaagcgcagacccagcaggttcttattcctgcatcacagcaagccacagcaccacaagttattgttccagattctaagttgatacagcatatgaatgcatcaaacatgagtgctgctgctacagctgctaccttagcactccctgcaggtgtgactcctgttcagcagatattaacaaattcaggccagcttcttcaggtggtcagagcagccaatggtgcccaatatatctttcagcctcagcagtcagtggttctacaacaacaggttataccacaaatgcagcctggtggagtacaagctcctgttatacagcaggtgctggctcctcttcctggagggatttcaccacagacaggtgtcatcatccagcctcagcaaatcttatttacaggaaataagactcaagttatacctacgacagtggcagcacctacaccagcccaagcacagataactgcaactggccagcagcaaccgcaggcccagcctgctcaaacacaagctccattggtcttacaagttgatggaactggggatacatcatctgaagaagatgaagatgaagaagaagactatgatgatgatgaggaggaagacaaagagaaagatggagctgaagatgggcaggtggaagaagagcccctcaatagtgaagatgatgtgagtgatgaggaaggacaggaactctttgacacagaaaatgttgttgtatgccaatatgataagatacacagaagtaaaaacaaatggaaatttcatctcaaggatggcattatgaatcttaatggaagagattatatattttccaaagccattggagatgcagaatggtgaagagttgctttttttcttttataaataaaagaaacttaaaaaaaatgtaaagcggacagtttgaaacttggggcatatgccaaccaaaacttcgtttctgcatgtcagaaaagtgcagtagaagcaaagctactggaacaaagatagaccttgacaacatagacactacttac

SEQ ID NO: 1264 - DNA, 561 bp, Homo sapiens
  source 1..561: mol_type = genomic DNA
gcagtcgctgccgaccggctggctgggccttgcggcgtgaggaccccggcggcgccgcagtcccgcgagccatggcccagtccggcggggaggctcggcccgggcccaagacggcggtgcagatccgcgtcgccatccaggaggccgaggacgtggacgagttggaggacgaggaggagggggcggagactcggggcgccggggacccggcccggtacctcagccccggctggggcagcgcgagcgaggaggagccgagccgcgggcacaggaataggagctcggtgaattcaaggaccatgcttgcttcgttcattgtatcttcagcacctagcacagcacccagcacataggacatgtttgttgactgaatgcgtatctctatcatcacactcactcaatggtgttgagatatttgtgtttccccttccctagacagtgagatccttgaaggcagctgccttatcttattcctttttgtatttccatacctagcctaatacctagcttatataagggaacagaataaatgaacaataaagaaaagtctttacagcctct

SEQ ID NO: 1265 - DNA, 892 bp, Homo sapiens
  source 1..892: mol_type = genomic DNA
gtgcgcactggcgtgcgagactcggcgggcgctgttgagggagtcgggccgcgactgtggtcgtttttataccttcccgcgcggacgccggcgctgccaacggaagggcgggtagggcggtgcgtgattaggttggcgaagagacggagtttcgtcatgttggccaggcccatttgagatctttgaagatatcctcaacgtgaggctctgctgccatgaaggtgaagattaagtgctggaacggcgtggccacttggctctgggtggccaacgatgagaactgtggcatctgcaggatggcatttaacggatgctgccctgactgcaaggtgcccggcgacgactgcccgctggtgtggggccagtgctcccactgcttccacatgcattgcatcctcaagtggctgcacgcacagcaggtgcagcagcactgccccatgtgccgccaggaatggaagttcaaggagtgaggcccgacctggctctcgctggaggggcatcctgagactccttcctcatgctggcgccgatggctgctggggacagcgcccctgagctgcaacaaggtggaaacaagggctggagctgcgtttgttttgccatcactatgttgacacttttatccaataagtgaaaactcattaaactactcaaatcttgctggaggcctctgggtgcctgtgttctcggcatatagatgtggtctcggtgtgttttgatatgaaaactctcatgaataaacatctccgtgaaacgccaaggccctcgtcaaaccctgagtcatgactgggaggagaaggagcaggatcagacggtagagcctggggcatgctcttcaggcatgctcttgcctgctggattgccggcggcggccctgggaccctccctcagg

SEQ ID NO: 1266 - DNA, 1038 bp, Homo sapiens; identical to SEQ ID NO: 788
  source 1..1038: mol_type = genomic DNA

SEQ ID NO: 1267 - DNA, 2470 bp, Homo sapiens
  source 1..2470: mol_type = genomic DNA
aaggcggagcggtccctgcaacccggccggcgggaactgccttctagtttttagtctcagaccagaccaccgggcgcaccccgatgccgagcccgcagcttctggtgctcttcggcagccagacaggcacggctcaggatgtgtcggagagactgggtcgcgaggcccggcgccggcggcttggctgccgggtgcaggccctggactcctacccggtggtgaatctgattaacgagcccctggtgatatttgtttgtgcaactacaggccaaggagacccccctgacaacatgaagaacttctggaggtttatattccggaagaacctgccctccactgccctctgtcagatggactttgccgtcctgggcctcggggactcctcatacgccaagttcaacttcgtggccaagaagctgcaccgacggctactgcagcttgggggcagcgccctcctgcccgtgtgcctgggcgatgaccagcatgagctggggcccgacgctgctgtggacccctggctgcgagacttgtgggacagggttctggggctgtacccgccgcctccgggcctcactgagatccctcccggagtccccctgccctccaagttcaccctgctgttcctccaagaggcacccagcacgggctctgaggggcagcgggtagctcaccccggctctcaggagcccccgtcagagtcgaagcccttcctagcacccatgatctccaaccagagagtcaccggcccctcccacttccaggacgttcggctgattgagtttgacatcttgggctctggcatcagctttgctgctggtgatgtggtgctgattcagccctccaactcggctgcccatgtccagcggttctgccaggtgctgggcctggaccctgaccagctcttcatgctgcagccgcgggagccagatgtctcctcccccacgaggctgccccagccctgctccatgcggcacctcgtgtcccactacctggacatcgccagcgtgcctcgccgctccttcttcgaactcctggcctgtctatccctccatgagctggagcgggagaagctgctggagttcagttctgcccaaggccaggaggagctctttgaatactgcaaccggccccgcaggaccatcctggaggtgctctgtgacttcccgcacacagctgccgccatccctcccgactacctgttggacctcatccccgttatccggccgagggccttctccatcgcctcctcgctgctgactcacccctcacggctgcagatcctcgtggctgtagtgcagttccagactcgcctcaaggagccccgccggggcctctgctcctcctggctggcatccctggaccctgggcaaggacctgtccgggtgcccctctgggtgcggcctgggagtctggccttcccagagacaccagacacacctgtgatcatggtggggcctggcactggggtagcccccttccgagcagccatccaggagcgtgtggcccagggccagactggaaacttcttgttttttggctgccgctggcgggaccaagacttctactgggaggctgagtggcaggagctggagaagcgggactgtctgaccctcatccctgccttctcccgggaacaggagcagaaagtatatgtgcagcaccggctccgggagctggggtcgcttgtgtgggaactgctggaccgccagggtgcatacttctacctggcaggcaacgccaagtccatgccagcggacgtctcggaagccctgatgtccatcttccaggaggagggtggactctgcagcccggacgcagccgcgtatctagccaggctccagcagacacggcgcttccagacagagacgtgggcctgaggcccgcggctgcccgtgccccctctgacagccatcctcctgggagcccaggaaggcatccacgagggagctcctggccagcagccgtcatcctctcggaccagccagctggtcctctgggaacagccagctcccgagcacagccgcactcctgttgaccctggatcccaccctttgagcctgaccccactgcagcctctgcccagccagccctgcgctcccccaccctgacagtgagctgtgtcctcgtccccccacccccttcccagtcaaggtggtggcctgggccgctccacctcaccggtgcagtgacccaggacggcatcagcagcccagtgagcaccaggggtggcatagggcacccatgaggctgcgctgcactcctctgccctggggccacctcggctgctgcagcctgcccagcagcacattccagtcactgcccccgcactcccacagggctcaggctgggctcagaggccactgagatgccagctccttgagagcagtgggggtgtcccaggccagagcagcctcttcctctcctggtcccagaaaaacccttgcagtaaatggtggcctctgggtggtta

SEQ ID NO: 1268 - DNA, 2135 bp, Homo sapiens
  source 1..2135: mol_type = genomic DNA
ttttattaatatgctgatctgttttatcttctcaggccataaagaatgctgatgggagaaccattttcctaattttcaaattgttgagctgtttgccataatggatgatcagcaagctttgaactcaatcatgcaagatttggctgtccttcataaggccagtcgaccagcattatccttgcaggaaaccagaaaagcaaaatcttcatcaccaaaaaaacagaatgatgtccgagtcaaatttgaacatagaggagaaaaaagaatccttcagttccccagaccagttaaactggaagatctgagatctaaagctaaaattgcctttggacagtctatggatctacattataccaataacgagttggtaattccattaactactcaagatgacttggacaaagctgtggaactgctggatcgtagtattcatatgaagagcctcaagatattacttgtaataaatggaagtacacaggctactaatttagaaccattgccatcactagaagatttggataatacagtatttggagcagagaggaaaaaacggctatctataataggtcctactagtagagatagaagttctcctcccccaggttacattccagatgaattacaccaggttgcccggaatgggtcattcactagtatcaacagtgaaggagagttcattccagagagcatggaccaaatgctggatccattatctttaagcagccctgaaaattctggctcaggaagttgtccatcacttgatagtcctttggatggagagagctatccaaaatcacgaatgcctagggctcagagctacccagataatcatcaggaattttcagactatgataaccctatctttgagaaatttggaaaaggaggaacatatccaagaaggtatcatgtttcatatcatcatcaagagtataatgatggtcgtaaaacttttccaagagctagaaggacccaggggaccagcttacggtctcctgtgagtttcagtcctactgatcattccttaagcactagtagtggaagcagtatctttaccccagagtatgatgatagtcgaataagaagaaggggaagtgacatagacaatcctactttgaccgtaatggacatcagcccacccagccgttcacctcgagctccgaccaactggagattgggcaaactgcttggccaaggagcctttggaagggtctacctctgttatgatgttgatacaggaagagaattggctgttaagcaagttcaatttgaccccgatagtcctgagaccagcaaggaagtaaatgcacttgagtgtgaaattcagttgctgaaaaacttgctacatgagcgaattgttcagtattatggctgtttgagggatccccaggaaaaaacactttccatatttatggaatatatgccagggggttcaattaaggaccaattaaaagcatatggcgctcttactgagaatgtgactaggaaatacacccgtcagattctggagggtgtccattatttgcacagtaatatgattgtccatagagatatcaaaggcgcaaatatcctgcgagattcaacaggcaacgtcaaactaggagattttggggccagcaaacggcttcagaccatctgtctctcagggacaggaatgaagtctgtcacgggcacaccatactggatgagccctgaagtcatcagtggagaaggctatggaagaaaagcagacatctggagtgttgcatgtactgtggtagaaatgctaactgaaaagccgccttgggctgaatttgaagcaatggctgccatctttaaaatcgccactcagccaacaaacccaaagctgccacctcatgtctcagactatactcgagatttcctcaaacggatttttgtagaggccaaactgagaccttcagctgatgaactcttaaggcacatgtttgtgcattatcactagcagccagtaacctctcctgtgcctctacctagctcccatctattcattcaccttctctctgactgcacttttcttttttataaaaaaagagagatgggggagaaaaaagacaagagggaaagtatttctcttgattcttggttaaatttgtttaataataataatatcctaaatt

SEQ ID NO: 1269 - DNA, 5479 bp, Homo sapiens
  source 1..5479: mol_type = genomic DNA
cttggtgaagtgagattcagactgagtggggtcacagcacagggcactgtcttgcctggctttatctgagccaatcacacctctcctggccactatctgtggtctagccccctttgtgcagaaagagaaagaagagccttgaggaccagcctagtcaggctgaagaaatgtcaacaattgggagttttgaaggattccaggctgtgtctctgaagcaagagggagatgaccaaccctctgagactgaccacctatcgatggaggaagaggacccgatgccaagacagatttcaaggcagtcaagtgtgaccgaatcaactctttaccccaatccttatcatcagccttatatctcacggaagtactttgctacacggccgggggccattgagactgccatggaagacttgaaaggtcacgtagctgagacttctggagagaccattcaaggcttctggctcttgacaaagatagaccactggaacaatgagaaggagagaattctactggtcacagacaagactctcttgatctgcaaatacgacttcatcatgctgagttgtgtgcagctgcagcggattcctctgagcgctgtctatcgcatctgcctgggcaagttcaccttccctgggatgtccctggacaagagacaaggagaaggccttaggatctactgggggagtccggaggagcagtctcttctgtcccgctggaacccatggtccactgaagttccttatgctactttcactgagcatcctatgaaatacaccagtgagaaattccttgaaatttgcaagttgtctgggttcatgtctaagcttgttccagctatccagaatgcccacaagaattcaactggatctggaagaggaaagaaactgatggtgttaactgaacccattttgattgagacctacacagggctgatgtcattcattggaaaccgcaacaaacttggctattcccttgcccgtgggagtattggtttttgagagtctttttggtaccataagcatatcatccacagatatgtcactttgaaaattccagtttgacccacgctatttttggactgaaacaattaattatttttaaatgacgctttatgatttagaaatttagtatttccgaaaatttaaaagcttgattggactgatagatacacactttagacctcatacaagaataatcaaattttcttaaaactagaaaataaatgctgctgagcctatcaaatactgttatcaaatgagtgcctgatcatcaactcaggaaagaagactctaagtcctgttgcttcagctctctaaatgtaggcttttttttttttttttttttaggtcttggtcttcagccctcttatcctgatttattctctcattggggtctcactgtctctagtattttagctaccacttgataaggatgacttccaaatttatattcccattcccaatatttattccaagactcagttttgcatttctgactgctaatcatctatatatcagtgtcccagtggcctcttaattgagcattatcaaaatcctgtggtatttatatggtcccagttatccatccctgaagtctgtcaattttgatttctctaaattccttgccatgacatcctatatatgatcacatctctatacggcttagcattgtattccgatgcccagatgtcaaacttgaagctcattctcttatcaaaattgttcatgtattcctcctttccattcttatagctgtattattagatcaggtttttaattctgctcaaccaattattaccacagcctgttaaatggaatccctactccaaggctgactgtttcaatctatcctacacttggtttctagctcatttacttataccatcttttgttcaaatatatattttttaataacagacctttttcttctaaagaaatcttttgtagaagcagcatatacgaagcagataaaagtaggttcaatgcggttggagtgaagatgagaatgccacaggcatctttctttctaggcctcagaggtgctgcatatggaatgtccatggatcgcagagggttttgaagaccatgttttcaaaaacactgtcttaacactctattgtcattgctcttttccctcttatttcctctttgtctcttcccgacttagatctaattttcaacaacccaggaaattatctcatatgtttgcatctctcaagtttcttttcttttttctttcagagtcttattttatctaaatttatgtagaaaaaaaagctttgaatgttgactacatagacattactacaataagctttttgcctttcccaagactcaaaattgacacatctttgttgatgtttaagttgaaattccagccaacttttttttgacttttatgtgaagtttaaagtcttttctttgaaaagcttgcttcctcaatttcaaagatttgtcctctgatatatttataaacatcaatttaatgcagacattcaaaccctaaaccttgaataactcttattttattttgtctttgtttacttccattaatttttttttctttccctctcttccgcctttacagcacccactttttcttccccccatgatggcaaatattgttatagtccccaaggcagggaacttctattcagactgtaaaaggaaatgttgaaatccatagctgtcctgtcaacagtagtggaatgaaaagtcgttggattgttttggcactggttctgaagcaggcataattggcaaattattataatactgctgcccgaaaatccccatttgcctcaagatagtggcatttattggcagaagcctctgaaatgtccagcacattcttttgagttaccatttaaggatcagcctgacaatcgacttctctctgcacatttgccccctttgtaacctaagccagactgttcccaaatgaccttctaaaggacacagtgcaccatcatcaatggaaacagttcagaaaggatgacaggagggagatgtttcttagttctgagagccagtctgtaacaatgggataagcatttaatggaatcaaagctgttttgcataaagagtgaactcagagacgacaagagggtctttatgaattcccttcacattttgtaaaaactgtcatatataggctatccccttaattgataaatgggatctagaaagcggtattatgaccagagggtgagaagatttaggaatttggatagcagttcaagataagaaagaacttcttatagttataaattttcaatgatggaatgggttgcttctttaaacagtgagcccaccatcacttggtatgttcaaggaaagactagataaagtcgatattgtgagaggaattgctgtatgataccgtttggagaaatgattgacataatcttttaaggccggtgaccctatcattttccaaataattgttgctagtacttagttaattagacccatttttttcttaggaaagagttggatcaatcatgggagaccctgaaaaatttccttacctttcctaaggtttaatttcctcttctgcgaaatggagacaattatattacttttgcttatttcataaagatcttgtgaggattcaatgaaatgaggttaaattcttttattaaacagaaagttttgagtatttgcctagagagtgatgtgacttttgcagcagaaggtgggaaaacatccaagggaactacatttcctccagaaattgtttcttcattaccatcgacctactgattatggttttctcattttacacttggtgttcttacttgggatctttgtccttaagctcaacagggagccacaacccaggggacctatgtgtacacttggagtttttatcagactatcatttgaacttaccactacagtttagcaaatggcatgatgagtttgattgataataggagtagacgcaagatacattaagtagagtacaaagcatttcataaccaaaatgtcatggttggaggtcttcattattcggtctttatctcattcaggaatttccacttgaaaaatctctgataagctttatttcagaaactgcttgaacagctccactgacaaatgcctcactatcttctgatacatcgtaggcagttctgagggtgagaaagttcaaagcagatagatgttttaacacaacaggaggacttttaaacaatcaccaggactcactcctcggtggtcaattgggcctgtttggaggcctgacctttggtcatcttaaggtcatctaaggcagaaaagagaagctcacttataagttggcacttctgaatcatttgccttgaggtccattttttattcagcctttgtttaaaccttcttaggaagccagtttgtagagttctggggataagaaggcagaaaaaccatgtcaattcagtgcttttatttcacagaaaatgaagcaaaggcctagaaactagaaagacatttctcaaaaagaagatggtgaacttttggaaatactgagattagactacattttccaatttctatccctagcccactgctctttccaatataatatctgtattccatgggaaagacatgccatctgaattgatgtatcgtagttgttgagataattttgaaatgagaaaacaatagggcacagtcgtttgggaagaatttccagaaattgccatcattttcttaaaggctaaggacacttatagagctctccgatttcctatctgataaaaaaagcccaaacaaagctgcggaagctggcagagccagcagatattttgtaaggcagcttcacctctgctggcattttgtggggcaggagagggggagggcaaaggtattaaatttaggcttaaaagctcctcagaaattctttacacacaagagaccaagttggagaaaagaagatgacttgtgccaaggggaagaaagagagagactaatgcctgtggttttcaaaggttaacaacaacataaaaaagccaaggtatttgcacagggatgaatgctcattggctcttggccaacaattatacaagggcttgtgcccacatcctgtagctgtggtttagggacgctgctcatgagtgacttcttatgcttagtggcaggaaactttagtcactgatgtgtaaactcacctttggtctgcacctcccacaacgtgctccgaaagcagttaggggactaggcctcttgatttccttgtagataccagttccccagaagctaaggaaaaactctgaggccttggagttactgagagtggaccaatacttgtcttattctacctgattttggcaactgcttagggttcttctgtatccacaaaaaggaattatgatatcctctgctaaaccctctctttagcctcaaagcccaagaccaaaaaaaatgagccatatttcattgcaggcctgctgccaatgtgaaatataaggaataaagtcatgagactgcttctcaaccta

SEQ ID NO: 1270 - DNA, 2606 bp, Homo sapiens
  source 1..2606: mol_type = genomic DNA
gatggcagcggcagctggggctgcagcggcgccgggctctagagagccgcaggatcggccagagtgcggagctggacacccgggtcccagatactacagacacccggagaggtggctccttcgccctgaagccttcctcggccccctacgcactcgggccccttccgcagaggattcgcagcgtgagcgccccgcagcccgctcaggaccagctatgagcagacgtgtggttcggcaaagcaagttccgccatgtgtttgggcaggcagcaaaggccgaccaggcctacgaggacatccgtgtgtccaaggtcacatgggacagctccttctgtgccgtcaaccccaaattcctggccattattgtggaggctggaggcgggggtgccttcatcgtcctgcctctggccaagacagggcgagtggataagaactacccactggtcactgggcacactgcccctgtgctggatattgactggtgtccacacaatgacaacgttatcgccagtgcctcagacgacaccaccatcatggtgtggcagattccagactatacccccatgcgcaacattacggaacctatcatcacacttgagggccactccaagcgtgtgggcatcctctcctggcaccctactgccaggaatgtcctgctcagtgcaggtggtgacaatgtgatcatcatctggaatgtgggcaccggggaggtgctgctgagcctggatgatatgcacccagacgtcatccacagtgtgtgctggaacagcaacggtagcctgctagccaccacctgcaaggacaagaccttgcgcatcattgaccccagaaaaggccaagtggtggcggagaggtttgcggcccacgaggggatgaggcccatgcgggccgtcttcacgcgccagggccatatcttcaccacgggcttcacccgcatgagccagcgagagctgggcctgtgggacccgaacaacttcgaggagccagtggcactgcaggagatggacacaagcaacggggtcctattgcccttttacgatcccgactccagcatcgtctacctgtgtggcaagggcgacagcagcattcggtactttgagattaccgacgagccgcctttcgtgcactacctgaacacgttcagcagcaaagagccgcagcggggcatgggtttcatgcccaaaaggggactggatgtcagcaagtgtgagatcgcccggttctacaagctacacgaaagaaagtgtgaacctatcatcatgactgtgccccgcaagtcagacctcttccaggacgatctgtacccggatacgccaggcccggagccggccctagaagcggacgaatggctatccggccaggacgccgaacccgtgctcatttcgctgagggacggctatgtgccccccaagcaccgcgagctccgggtcacgaagcgcaacatcctggacgtgcgcccgccctccggcccccgccgcagccagtcggccagcgacgcccccttgtcgcagcacaccctggagacgctgctggaagagatcaaggccctccgcgagcgggtgcaggcccaggagcagcgcatcacggctctggagaacatgctgtgcgagctggtggacggcacggactagccccgcgcgccaggcaggcggagcggggcggggcgcacaagctcggccccgccccggcttttagtcccgaactccggaccccgccttcttgggctgggcccgggggcgggactggggagggaactccgcccctcgcgggagaccagaactcttggagcttaggggagacccacgtcgctccagcggaggctggactgcgagcctcgtctgggactcggctggagctggcctagggaggcctggggtaacctggggggctcagcaatggtgctgcacggcgaggtggtgtccccctttgtcctccgcccagggcagggaaagtgcttagtattagcgtgatgcttggggttattggagcctgagcttgacctcaaacgggtggcgatttgatgggtacccccaggctggggaaaatgacagcgcttctcctaatcagctcactggattccatcaccctgagcggtaaaccagatgggcgtcaccccagttctgcagacacatacacaacccgtttgctgcagagccggacccagtggctacacccacagcggtctgtggtagagaactctcttccttctttccaccgacaggggcgagggctgcttcctcgcggcagcccccgcgaagaaatctcgagagaactggcatgaggagttaggttcatcacaaatacacacacactgcccccaaccctctgccgttgcctctctcagaaaaacaagacgtactgaatgaaatattttactaagcgttcagtctgtgcctcctgcatgggtgggagtgaggggaacgagacccccagcctctgcaaatgctacccccaggctcctgggagacctggcgatgcactcctgggctcagggtccatcaggcagcctcttaccctagagctctctccactctgaggttcagaaggaccccaacccacaccgtaggcgttccccccaagtaaagttaggtagcaaaagcctccggt

SEQ ID NO: 1271 - DNA, 4384 bp, Homo sapiens
  source 1..4384: mol_type = genomic DNA
ggcggatctgtagtagttaccgcggcggcgggagagcaagcgagccctggggggcaaagagacgggagagtgggtgtatgcgcgggtgaagtgagaggtaacggggctccgggcggagaggcctcagtggctcttgtcaccccttctcgcggctgaacctttggagccatggtgaattcgggcctctccgaagccgccgccgccgccaccgccactactgcctttaccgtctcctaagagtgaggagcgcggacgaggtaagcgaggaggcggcggctagagcggtggagacagcagccaccatgtcggatacgcggcggcgagtgaaggtctataccctgaacgaagaccggcaatgggacgaccgaggcaccgggcacgtctcctccacttacgtggaggagctcaaggggatgtcgctgctggttcgggcagagtccgacggatcactactcttggaatcaaagataaatccaaatactgcatatcagaaacaacaggatacattaattgtttggtcagaagcagagaactatgatttggctctgagttttcaggagaaagctggctgtgatgagatctgggaaaaaatttgtcaggttcaaggtaaagacccatcagtggaagtcacacaggacctcattgatgaatctgaagaagaacgatttgaagaaatgcctgaaactagtcatctgattgacctgcccacatgtgaactcaataaacttgaagagattgctgacttagttacctcagtgctctcctcacctatccgtagggaaaagctggctctcgccttggaaaatgaaggctatattaaaaaactattgcagctgttccaagcttgcgagaacctagaaaacactgaaggcttacaccatttgtatgaaattattagaggaatcttattcctaaataaggcaactctttttgaggtaatgttttctgatgagtgtatcatggatgtcgtgggatgccttgaatatgaccctgctttggctcagccaaaaagacatagagaattcttgaccaaaactgcaaagttcaaggaagttataccaataacagactctgaactaaggcaaaaaatacatcagacttacagggtacagtacattcaggacatcattttgcccacaccatctgtttttgaagagaattttctttctactcttacgtcttttattttcttcaacaaagttgagatagtcagcatgttgcaggaagatgagaagtttttgtctgaagtttttgcacaattaacagatgaggctacagatgatgataaacggcgtgaattggttaattttttcaaggagttttgtgcattttctcagacattacaacctcaaaacagggatgcatttttcaaaacattggcaaaattgggaattcttcctgctcttgaaattgtaatgggcatggatgatttgcaagtcagatcagctgctacagatatattttcttatctagtagaatttagtccatctatggtccgagagtttgtaatgcaagaagctcagcagagtgatgacgatattcttcttattaatgtggtaattgaacaaatgatctgtgatactgatcctgagctaggaggcgctgttcagttaatgggacttcttcgtactctaattgatccagagaacatgctggctacaactaataaaaccgaaaaaagtgaatttctaaattttttctacaaccattgtatgcatgttctcacagcaccacttttgaccaatacttcagaagacaaatgtgaaaaggatttttttttaaaacattacagatatagttggagtttcatatgtaccccttcacattcccattcccattctaccccctcttcctccatctctcaagataatatagttggatcaaacaaaaacaacacaatttgtcccgataattatcaaacagcacagctacttgccttaattttagagttactcacattttgtgtggaacatcacacatatcacataaaaaactatattatgaacaaggacttgctaagaagagtcttggtcttgatgaattcaaagcacacttttctggccttgtgtgcccttcgctttatgaggcggataattggacttaaagatgaattttataatcgttacatcaccaagggaaatctttttgagccagttataaatgcacttctggataatggaactcggtataatctgttgaattcagctgttattgagttgtttgaatttataagagtggaagatatcaagtctcttactgcccatatagttgaaaacttttataaagcacttgaatcgattgaatatgttcagacattcaaaggattgaagactaaatatgagcaagaaaaagacagacaaaatcagaaactgaacagtgtaccatctatattgcgtagtaacagatttcgcagagatgcaaaagccttggaagaggatgaagaaatgtggtttaatgaagatgaagaagaggaaggaaaagcagttgtggcaccagtggaaaaacctaagccagaagatgattttccagataattatgaaaagtttatggagactaaaaaagcaaaagaaagtgaagacaaggaaaaccttcccaaaaggacatctcctggtggcttcaaatttactttctcccactctgccagtgctgctaatggaacaaacagtaaatctgtagtggctcagataccaccagcaacttctaatggatcctcttccaaaaccacaaacttgcctacgtcagtaacagccaccaagggaagtttggttggcttagtggattatccagatgatgaagaggaagatgaagaagaagaatcgtcccccaggaaaagacctcgtcttggctcataaaatatttattaggggaccctcaacatgtggtcttacaatgctgcaactgttcagtgagctgaaaatctgaatcagaaagctttctcaattgaacttataaaatatacaaggagtagcaaaagacagtatatcagctaagagagtttagttctaataaaaatcaggcttcccaggaacttgattgcttgctagtaattaaggggtttgccttttaggctgtcaaaacaaacattagtaaccagaacctgggagacagcttctcagcaaggaaaagtcacaggtttggggacggtttaggggaggggaaaaggttgatataataatgcagggttgctcctcggggtgtcgatctagaaacaattttacagaacttcagttgtaaactcaataacattacttgtataatggtgctggccatgttgttgttttaatcagttgcctctttttaaaagaaatttttatggaaaacacattcaactatcattaaaaaaatgaagttaagctgttgggaccatttctttaagatttaacaaaagttcagccttttaggtagttgaagggaagtacaccccgtattcagcacatgttgagttttctacaccaggaattttcaatatgtatattgatgaaaacaagctcaattcaaactggacagttttaagataatgttaaaatcagcacttttagagacaacgaaggccaagaatcagtacagtagtattccaaaatgattttctctagaaatttgaaagtagatcgaacagaatgttgtcaaccgcctaccagtacaatcttttgtggaagatactttgaaatcactttctactttgttagtaaagttctgtctttccagagctgcaagttttaaagtgttacttatacagaccaaccaagaatagtgctgaattaagtggcatttagtatctagaagccattttgatccaagaagctacttaagtgtcaaagtcagcatgcagcacatgtagcttttctgtaaacaagggtgtgatatgaaagctgcttttttaagaagagtaaaagcacattccatatacgtaagtgaattttaaaaataaattgaggcaaacagttaagttttatttttagagcaacaagttaactgtaaatattttaatgttagtttgctcatctatgatctgagatcatgccgaagtgagaaaaatctccccaaaatacaatttaatgcattgggaaaaaaaaactttaacagtaattccagccacaatctttagatcacccttgtaatgtgttacgggtccatttttcctggaatcgtttaatctaaagcagtttcccctgttttggagattttgtagttaattttaattttggctattgtttggaaaagatgagctgtctgtgtagatatgaagtatagttttttccataaaacagatgtttattttgtattaaaaaataccactgtacttgttttacaccatttgtatacatgtggtgatattaatgctaaactgtaaaattcaggaattaaaatgtgaccctgtaattcc

SEQ ID NO: 1272 - DNA, 913 bp, Homo sapiens
  source 1..913: mol_type = genomic DNA
gcggggcggcggggcggccggcggcggccatgggagatatcccagccgtgggcctcagctcctggaaggcttctccagggaaagtgaccgaggcagtgaaagaggccattgacgcagggtaccggcacttcgactgtgcttacttttaccacaatgagagggaggttggagcagggatccgttgcaagatcaaggaaggcgctgtaagacgggaggatctgttcattgccactaagctgtggtgcacctgccataagaagtccttggtggaaacagcatgcagaaagagtctcaaggccttgaagctgaactatttggacctctacctcatacactggcccatgggtttcaagcctcctcatccagaatggatcatgagctgcagtgaactttccttctgcctctcacatcctcgagtgcaggacttgcctctggacgagagcaacatggttattcccagtgacacggacttcctggacacgtgggagattttgatccgatttcaaatccagaggaatgtgatagtgatccccggatctatcaccccaagtcacattaaagagaatatccaggtgtttgattttgaattaacacagcacgatatggataacatcctcagcctaaacaggaatctccgactggccatgttccccataactaaaaatcacaaagactatcctttccacatagaatactgaggacgcttccccttccttgtttctgctcagcccagatgcacagacactattggcaatgttgaccctcctctgtcatcacagcgccagggcagctgtgcctgggacaggagccacacagtcagagggggatgtaagagccaccttctctgacaaatctggagaattgagtgtgttctaagtgaaggcaatggggtttctccaagacagcctgtgtg

SEQ ID NO: 1273 - DNA, 3998 bp, Homo sapiens
  source 1..3998: mol_type = genomic DNA
aggctctttcttctggggccgggaaaaccgaggaatacacatgcgcagttggacccctcaggcccttcgtgtcccttcccacccatctccccgccccggccctctgggcggggctgggccgacagtccagctgcagctcgctggagattcagtgacttccttgttgtgagccccggcccggcagtgtcccgactcgtagccccgctgttcttaatccgggccgctagcctgagtctaggtcgcagccgcagccccaccccgtcggtcaccttttcagcgcaggtcctttccccgcacgccctgcgctccctaacatgcccaaccccagcagcacctcctctccctaccccctccctgaggaaattaggaacctgttggcagatgttgaaacatttgtagcagatatactgaaaggagaaaatttatccaagaaagcaaaggaaaagagagaatcccttattaagaagataaaagatgtaaagtctatctatcttcaggaatttcaagacaaaggtgatgcagaagatggggaagaatatgatgacccttttgctgggcctccagacactatttcattagcctcagaacgatatgataaagacgatgaagccccctctgatggagcccagtttcctccaattgcagcacaagaccttccttttgttctaaaggctggctaccttgaaaaacgcagaaaagatcacagctttctgggatttgaatggcagaaacggtggtgtgctctcagtaaaacggtattctattattatggaagtgataaagacaaacaacagaaaggtgaatttgcaatagatggctacagtgtcagaatgaataacactctaagaaaggatggaaagaaagattgctgttttgaaatctctgctcctgataaacgtatatatcagtttacagcagcttctcccaaagatgctgaagaatgggtacagcagctgaaatttgtattgcaagatatggaatctgatattattcctgaggattatgatgagagaggagaattatatgatgatgttgatcatcctctaccaataagcaatccactaacaagcagtcaaccaatagatgatgaaatttatgaagaacttccagaagaagaagaggacagtgctccagtgaaagtggaagaacaaaggaagatgagtcaggatagtgtccatcacacctcaggggataagagcactgattatgctaatttttaccagggattgtgggattgtactggagctttttctgatgagttgtcatttaagcgtggtgatgtgatttacattcttagcaaggaatacaatagatatggctggtgggtaggagaaatgaagggagccattggcttggtgcctaaagcctacataatggagatgtatgatatttgagagtcctggaaaaggaaaattcttctgcttgtctgcaaatgctttggatttagaagcgtcatgaaagcacgagtgacagctcctaacctctccttgttttattaaacattacttatctttgactgttattttatgcagtcgctcattaaaatattcctctgatgtgaaattaaatgaaggatattaatgtaaattagatgcaaccagttaagttatacctgttgctattttgcaaagaaataattatagtttttatttacccatttgatttgtgtgaagaattcatcactattttatacgtaacatatagtctactatagcatagtatgctactattgctacttctggtgtgatttgtaatgtttcttaatcattggacatcaattatttttagagagtaatgtataatttcatagcattttaaatttagtgtatcatgcgagttttttttggtagatgctgaagaatgtggttgctaaacaaagaatgctaaagaatgttcaaactttatagataactttattgttattatttattttcacacatttaattcctattaagtacagccgcaagaaagaaaaaatgatgaagttgcaaatggcagtgtgctgtcacctgcaacagaagtgcgtaccagaagtatgactcatgcaaagcattttaccgtacaaatatcctggtgcgatgatgggcctggcaacattttctactgtacttttgtttaaatttaatgaaacaaaaaattcctaagaaataccaccctaccactaacaaaatggtataaagaatctcccagccaggccaacatggtgaaaccctgtctctactaaaaattagccaagtgtggtaatgttcacctgcagtcccagctacttgggaggccaaggcacgagaattgcttgaacaaggtaggcagaggttgcagtgagccaagatcgcgccactgcactccagcctgggcgacagagtgagactccatctcagaaaaaaaaaaaaaaaaaaacagaatctcagtgtattctcaaagtaaaaaggcataaccaagcactctcttatcttgccttattgctatactatttacatcccactgcagaacagcagatttgaggcttttctatatacttctcagagcactgaaaagaaaggaagggtttgcagaggagagtgtagaaatcccagtggtagcatgtaccaacaggtgagtagaaaggtagtgttagcctgacatttgagttatactctgtgctgcctgagcaagatttgtagaatcatataattaccttttcatgtatatttgaaatcagaggtgtttaaaatacctatgagataccaatgtagccttaacatatgtcaaaatgcattgctggttagataattatttggactacacataaactcctaatattgaatcattacctatcaggtattatctttatggaacttttcaatatctttgctttataaagattctaaacatgtatctgagctggtaatattttaaaatctccattatttgtgtaaaactgtttataagcagtgtttgagagggtctgctttaccattaccccctcaatatcatgatcatccaatctcaaatgtgaaaaaaaaaaagaaatttgattttagggattgtgagtaaacaagtttatatagagagacattgtgaagttaaagttttcagaagttacatttgtgcagttcttaccttttcctcatatagtgccattgaaatagactgaaattatcttggcaaaagttagacaaccaaagacgactttagtggactggttttcaaaacttgagcagctgaaaagcaaaagccgttgtttcccatgacaatgtagcctttgtggatttgggtttgtgctttgggttgaaaagaagtttttagtcctaggccagtagatggcagcagcttttcattgcagacaaaacctcttgaaacccttcccccatggcacaaactcgcccatgatggaaagcatctagatttctgcctccttttacagttaatccaggagagggagtcctttgccaactgatgaccaacagttccaagccagatagtctcgtgaacagtgacaatacagaaataaggtgttatttctgttcagatctccaccggcctttgttcttttaaaacttgaatataggtgggagacataagaaaggaaagaaaagacttaaaactggagtgacaggacaaataatcattactttcaattcatgactgctttatattcatttgatgaaatcatttgtatacaaaccagggagagttttctttacacccttgacaatatatcacatactcttcaagatcataataatatcattaatataaatttaaacaacatggcttgttagaaaatatgctaattgctatggtctcattatgtttgcttagcttttatttgtttttctgtgaacagttagagagctaatttttttcaaaggtgattgtaagtcatattttatatagcattttgcttgattatttgctctgtactgaatttgtactctattgccattagatcttacaataatgttccactctgcaaatttttaaggttcaaataaagtttaattgtttgcaaactgtta

SEQ ID NO: 1274 - DNA, 1475 bp, Homo sapiens
  source 1..1475: mol_type = genomic DNA
attggccgagcgcggccgttgggggtgaggccgcgtcgggggaggacaacaaagggccgcgggcggcgggcagtggtgtcccagtctcccggtgcttccctgaggctgaggcgcccggcctcccgcccgccgcgctccagatgaagtgtgagcactgcacgcgcaaggaatgtagtaagaaaacaaaaactgatgaccaagagaatgtgtcagccgatgcaccgagtccagcccaggaaaatggagagaaatgtgatacctcaaagcacaaagtgctggtagtgtctgtgtgtcctcaatctttgccttattttgctgctaaattcaacctcagtgtaactgatgcatccagaagactctgtggtttcctcaaaagtcttggggtgcactatgtatttgatacgacgatagctgcggattttagtatcctggagagtcaaaaagaattcgtgcgtcgctatcgccagcacagtgaggaggaacgcaccctgcccatgctgacctctgcctgtcctggctgggtccgatacgccgagcgggtgctgggtcgccccatcactgcccacctctgcaccgccaagtccccccagcaggtcatgggctctttggtgaaggattatttcgccagacagcagaacctgtctccagagaagattttccacgtcattgtggccccttgttatgacaagaagctggaggctcttcaggaaagccttccccctgctttgcatggctcccggggcgctgactgcgtgttaacatcaggtgaaattgctcaaataatggagcaaggtgacctctcagtgagagatgctgccgtcgacactctgtttggagacttgaaggaggacaaagtgacgcgtcatgatggagccagctcagacgggcacctggcacacatcttcagacatgcggccaaggagctgttcaacgaggatgtggaggaggtcacttaccgagccctgagaaacaaagacttccaagaggtcacccttgagaagaacggagaggtggtgttacgctttgctgcagcctatggctttcgaaacatccagaacatgatcctgaagcttaagaagggcaagttcccattccactttgtggaggtcctcgcctgtgctggaggatgcttaaatggcagaggccaagcccagactccagacggacatgcggataaggccctgctgcggcagatggaaggcatttacgctgacatccctgtgcggcgtccggagtccagtgcacacgtgcaggagctgtaccaggagtggctggaggggatcaactcccccaaggcccgagaggtgctgcataccacgtaccagagccaggagcgtggcacacacagcctggacatcaagtggtgaagtcaggccagggccttccagctgctcttggggccagagccaagagcctctcagtagagggaggggctgccctgagtggagtattaaagacacttaagaaaaccgctc

SEQ ID NO: 1275 - DNA, 4669 bp, Homo sapiens
  source 1..4669: mol_type = genomic DNA
tgaaggtaaaattttccagatacggcagacggctttcagagtacaataaacagggaatgagaactatttacatggaagtttctttctcatgatgcggtggagaagcctcggccacttggttctgccagatgttcctggggttactgtaaatgggaaggacaggcagagctaaacaaggtttatcatttaaaagtgcctgtgtgaagtcacttttgctggaaaactgcagcttgggagctttctttgtattcacatcccactcttctgtcaagtacactttaccctgaccttatgagtggatgaagatacctcagttgtctgactttgccaattgcttaatttcagaatttaaaaaggggaaagaaaaacatcctgctaaaatatgaacatctgagtgtcttattttccaacatcgtcaatagctgtgagcgtcagcattaaatattctcccaaggagtgccatgatattgaagtcactttattaataacagctgtatctgcaaaacagtcaagagactcggacgttgaaagccagagatgacactgagcatgcttttattgcggcctaccatctttaagtgggacatattgattgatgagtgattgcctgtccatacactctctcatcatcctgttccttggattggacttcactaagcaatttatcactcaccttcagacttacatgtgggagttttcacaacagtagttttggaatcattagaacttggattgatttcatcatttaacagaaacaaacagcccaaattactttatcaccatggctttgaacgttgccccagtcagagatacaaaatggctgacattagaagtctgcagacagtttcaaagaggaacatgctcacgctctgatgaagaatgcaaatttgctcatccccccaaaagttgtcaggttgaaaatggaagagtaattgcctgctttgattccctaaagggccgttgttcgagagagaactgcaagtatcttcaccctccgacacacttaaaaactcaactagaaattaatggaaggaacaatttgattcagcaaaaaactgcagcagcaatgcttgcccagcagatgcaatttatgtttccaggaacaccacttcatccagtgcccactttccctgtaggtcccgcgatagggacaaatacggctattagctttgctccttacctagcacctgtaacccctggagttgggttggtcccaacggaaattctgcccaccacgcctgttattgttcccggaagtccaccggtcactgtcccgggctcaactgcaactcagaaacttctcaggactgacaaactggaggtatgcagggagttccagcgaggaaactgtgcccggggagagaccgactgccgctttgcacaccccgcagacagcaccatgatcgacacaagtgacaacaccgtaaccgtttgtatggattacataaaggggcgttgcatgagggagaaatgcaaatattttcaccctcctgcacacttgcaggccaaaatcaaagctgcgcagcaccaagccaaccaagctgcggtggccgcccaggcagccgcggccgcggccacagtcatggcctttccccctggtgctcttcatcctttaccaaagagacaagcacttgaaaaaagcaatggtaccagcgcggtctttaaccccagcgtcttgcactaccagcaggctctcaccagcgcacagttgcagcaacacgccgcgttcattccaacagggtcagttttgtgcatgacacccgctaccagtattgtacccatgatgcacagcgctacgtccgccactgtctctgcagcaacaactcctgcaacaagtgtccccttcgcagcaacagccacagccaatcagataattctgaaataatcagcagaaacggaatggaatgccaagaatctgcattgagaataactaaacattgttactgtacatactatcctgtttcctcctcaatagaattgccacaaactgcatgctaaataaagatgtagttcttctggacagaccacaactctaagaagctagtgctgctatctcatatatgagtattaaatatggtatgcttagtatattccaacctaagatagttaactacctgagaccagctgtgatgtttaaagacataaaggataaagtttacttttaaagggtttctaaacatagtttctgtcctaggaatattgtcttatctccataactatagctgatgcagaaagtccagccagtttactcatttcgattcagaatatttcaaatttagcaataaacaattagcattagttaaaaaagaaacatattccaagggcaggttcgattctagctctaattactgtcatgtcatttacccactggatcaaagggtatgtttcacttcttgacaatataaatgctgcagcaaagatgagaggtgaagtaaaaccgatacctgtcctgcaggtctaaaatttgaatggaaattcaagcacaagtactggggacacatcaaagtgtggtgtttggtttgcctggagatgccacgttgaatcatgtgattctagattaacattaaatagattgaaaaagaaactttgcacggtatgagcttcataccccaccaaacaaagtcttgaaggtattattttacaagtatatttttaaagttgttttataagagagactttgtagaagtgcctagattttgccagacttcatccagcttgacaagattgagaggcccatgccaacagtctaatctaagagattagtctttcaaactcaccatccagttgcctgttacagaataactcttcttaactaaaaacctagtcaaacaaggaagctgtaggtgaggagatctgtataatattctaatttaagtaagtttgagtttagtcactgcaaatttgactgtgactttaatctaaattactatgtaaacaaaaagtagatagtttcactttttaaaaaatccattactgttttgcatttcaaaagttggattaaagggttgtaactgactacagcatggaaaaaaatagttcttttaattctttcaccttaaagcatattttatgtctcaaaagtataaaaaactttaatacaagtacatacatattatatatacacatacatatatatactatatatggatgaaacatattttaatgttgtttacttttttaaatacttggttgatcttcaaggtaatagcgatacaattaaattttgttcagaaagtttgttttaaagtttattttaagcactatcgtaccaaatatttcatatttcacattttatatgttgcacatagcctatacagtacctacatagtttttaaattattgtttaaaaaacaaaacagctgttataaatgaatattatgtgtaattgtttcaaacatccattttctttgtgaacatattagtgattgaagtattttgacttttgagattgaatgtaaaatattttaaatttgggatcatcgcctgttctgaaaactagatgcaccaaccgtatcattatttgtttgaggaaaaaaagaaatctgcattttaattcatgttggtcaaagtcgaattactatctatttatcttatatcgtagatctgataaccctatctaaaagaaagtcacacgctaaatgtattcttacatagtgcttgtatcgttgcatttgttttaatttgtggaaaagtattgtatctaacttgtattactttggtagtttcatctttatgtattattgatatttgtaattttctcaactataacaatgtagttacgctacaacttgcctaaaacattcaaacttgttttcttttttctgtttttttctttgttaattcatttaaactcattgaaaacatagtatacattactaaaaggtaaattatgggaatcactgaaatatttttgtagattaattgttgtaacattgtctttcttttttttcttttgtttcatgattttgatttttaaaattattagcacacaactattttcagccctttaataatggagcatcaaaaacatcacctgtaaccccaagcaaatatagaagactgtattttttactatgatatccattttccagaattgtgattacaatatgcaaagagtcataaatatgccatttacaataaggaggaggcaaggcaaatgcatagatgtacaaatatatgtacaacagattttgctttttatttatttataatgtaattttatagaataattctgggatttgagaggatctaaaactatttttctgtataaatattatttgccaaaagtttgtttatattcagaagtctgactatgatgaataaatcttaaatgctttgtttaattaaaaaacaaaaatcaccaatatccaagacatgaagatatcagttcaacaaatactgtagttaagagactaactctccacttgtatgggaactacatttcactcttggttttcaggatataacagcacttcaccgaaatattctttcagccataccactggtaacatttctactaaatctttctgtaacacttaaagaattccctcattcattaccttacagtgtaaacaggagtctaatttgtatcaatactatgttttggttgtaatattcagttcactcacccaatgtacaaccaatgaaataaaagaagcatttaaaagga

SEQ ID NO: 1276 - DNA, 5062 bp, Homo sapiens
  source 1..5062: mol_type = genomic DNA
gataaggtggcggcggcgaaggcagcggcaggtcgggagcaagatggcgctgcggccaggagctggttctggtggcggcggggccgcgggagctggcgcggggtccgccgggggaggcggcttcatgtttcctgttgcaggtgggataagaccccctcaagcaggcctgatgccgatgcagcaacaaggatttcctatggtctctgtcatgcagcctaatatgcaaggcattatgggaatgaattacagctctcagatgtcccaaggacctattgctatgcaggcaggaataccaatgggaccaatgccagcagcgggaatgccttacctaggacaagcacccttcctgggcatgcgtcctccaggcccacagtacactccagacatgcagaagcagtttgccgaagagcagcagaaacgatttgaacagcagcaaaaactcttagaagaagaaagaaaaagacgccagtttgaagagcagaagcaaaagctcagacttttgagcagtgtgaaacccaagacaggagagaagagtagagatgatgctttggaagccataaaaggaaatttagatgggttttccagagatgcaaaaatgcaccctactccagcatcgcaccccaagaaaccaggcccttccttggaggagaagttcctagtatcttgtgatataagtacatctgggcaggaacaaattaaattaaatacttctgaagttggccacaaagccctaggcccaggttccagtaagaagtatcccagtttaatggccagtaacggggttgctgtagatggatgtgtaagtggtaccaccactgcagaggcagaaaatacttcagatcaaaacctgtcaattgaagagagtggtgtgggagtatttccctcacaggatcctgctcagcccagaatgcctccttggatttacaatgagagtttggttccagatgcctataagaaaatcttagaaaccacaatgactccaactggaatagatactgccaaactgtatcccattctgatgtcatctgggcttcccagggaaactcttggacagatatgggccttagctaatcgaactacacctggcaaacttacaaaagaagaactttataccgttctagccatgatagcggtaacacagaggggcgttcctgcaatgagtcctgatgctttaaaccagttcccagcagctcctattccaactttaagtggcttttctatgactctgcctacaccggtgagtcagccaactgtgataccttcaggtcctgcgggctccatgcccctcagccttggacagccagtcatgggcattaaccttgttggaccagtgggtggagctgcagcccaggcttctagtggtttcataccaacctaccctgcaaatcaggtagtaaagccagaagaagatgacttccaggattttcaagatgcttctaagtcaggatcccttgatgactcattcagtgatttccaagagttgcctgcttcttcaaaaacaagtaactcccagcatggaaacagtgccccttctttgttgatgccacttcctggaactaaagcattgccttcaatggacaaatatgctgtgtttaaaggaattgcagctgacaagtcctctgaaaatactgttccacctggagatcctggtgataaatatagtgctttcagagaacttgaacagacagcagagaataaacctttaggagaaagctttgcagaattcagatctgcaggaactgatgatggtttcaccgattttaaaacagccgatagtgtatcaccactagagccaccaacaaaagacaaaacttttccaccatccttcccctcaggaactatacaacagaaacaacaaacacaagtgaaaaaccctctgaacttagcagacctagatatgttttcctcagttaattgcagcagcgagaaaccattgtctttttcagctgtgtttagcacatcaaaatcagtttctacaccacagtcaacaggttctgctgctactatgacagcattggcagcaacaaaaacttctagtttggctgatgattttggagaattcagcctttttggggaatattctggtctagcacctgttggggagcaggatgactttgcagattttatggctttcagtaatagctctatttcatctgagcaaaagccggatgacaaatatgatgcccttaaagaggaagccagtcctgttcctctaaccagcaacgtgggcagcacagtgaagggtggacaaaactcgactgctgcgtctaccaagtacgatgtcttcagacaactttctctggaagggtctggactaggtgttgaagacctgaaagataacactccttcaggaaaaagtgatgatgattttgctgacttccactccagtaaattttcttccataaactcggacaaatccctgggagagaaagcagtggctttcagacacaccaaagaagactctgcatcagtgaagtccttagatctcccttccattggtggcagcagtgttggcaaggaggactctgaagatgcactctctgttcagtttgacatgaaattggctgatgtgggaggagatcttaagcatgtcatgtctgatagctctttggatttaccaacagttagtggccagcatcctcctgctgcagatatagaggacttaaaatatgctgcttttggaagctacagtagcaattttgcagtgagcacacttacaagctatgactggtcagacagggatgatgcaactcagggcagaaaactctctccatttgtcctctcagcaggaagtggatccccctcagccacctcaattcttcaaaagaaagagacttcatttggcagttctgaaaacatcaccatgacatctctctccaaagtaacgacctttgtaagtgaagatgctcttccagagaccaccttcccagctcttgccagttttaaagacacgattcctcagaccagtgagcaaaaggaatatgaaaacagagactataaagatttcacaaaacaggacctgcctacggctgaacggagccaggaggccacgtgtcccagcccagcgtccagtggtgcctctcaagaaaccccgaacgaatgttcggatgactttggagagtttcaaagtgaaaagcccaaaatcagcaaatttgacttcttagtagccacttcacaaagcaaaatgaaatccagtgaagaaatgatcaaaagtgagctggcaacctttgacctttctgttcaaggatcacacaagaggagtttgagccttggtgataaagaaataagccgttcttctccttctccagctttggagcagcctttcagagaccgttccaatactctgaatgagaagcccgccctgcccgtcatccgagacaagtacaaagacctgacgggagaggtggaggaaaatgagagatatgcatatgaatggcagagatgcctggggagtgccctgaatgtcattaagaaggcaaatgataccttaaatggaatcagtagtagttctgtttgcacagaagtaattcagtcagctcaaggcatggaatatttattaggtgttgttgaagtgtacagggtaaccaagcgtgtggagctggggataaaagccactgcagtgtgcagtgagaaactccagcagttgctgaaggacatcgataaagtatggaataacctaatcggcttcatgtcactcgccacactcacaccagatgaaaactcgctggatttttcctcctgtatgttacggcctgggattaaaaatgctcaggagcttgcctgtggagtgtgcctcttgaatgtggactcgaggagccgggcattcaactcagaaacagacagtttcaagctggcctatggagggcaccagtatcacgccagctgtgccaacttctggatcaactgtgtcgaaccaaagcctcctggcctcgtcctgcctgacctgctctgaacaactcctctgtgaagcattgacttttttttttctgtgacaccccacggggtgacagggaccaataaatagaatgcgagcactgcacagttcgcttccctgaatcgatatgaagaacaccgcaagggacggggcccccgtcatccccacggccagtctgcaggacttcaggtaaaattgtcccacccaaactgcacgtggcaccagaagcttgctcacttatctctacttaagattttctgaaatacggaccacggctttcttgatctaaggaagaacttgctgctgcagtattgaaactgtgaagaactgacatttgaagaaaaatagattaccgttgcgggactagaatgggcgactgcttggagccagtgcttgtttttatctaggacacttactgtcctgtgaagtagaatacatttatctgcatttagtttgttaatgtctgaaatgaataaaaagaggaaattgcgattaaactgatgttctgctttttatggagaagattctgcccatctcccctggacagtagcaggcaggtgagggcagattttacccacttggttgtcacaactgaaccagttctctactccttcccttcacttctgtccactctcaagactttttcccaaaacatgcctgggcactctgcagccgtgaagaatgctcattttgacagaggcccaaatcctgtgtattaggataatatccttccccccgggagccttcgctgcaaacctgttctgccgcatgcaaagactgtgaccatggagttttctcagacaagatttggaaaggcagtggaatgaaatctctttgcagtggcctctctccaaatttccaaagatgactgcatagggaccaacactgcctgactttgcagtatctgtgagaaaaacctgaaaattaattcagggtgaaaatgtggagctctcggcctagtgtaaagtatcaagatgtatatttatgggatagatacatgacttagaagaagtagaagaaaattgtccagaaacagtactgaattttagatagaaaaggctcatgcttcctggagtagggaattgtctttgccatttaatgtgaatgcataaaattaggggaaaaacc

SEQ ID NO: 1277 - DNA, 2129 bp, Homo sapiens
  source 1..2129: mol_type = genomic DNA
ggagttgcagtttgagagcagttccgggcagggaggcgcctttgctgccctcacagacttggcccctagcagtgcagaactacaagtcccagggatcctagcgaccgtccgtccgtagtcaagttgccggtggaattggcccaggatgacagctggagaatggagtcagttttatccaagtatgaagatcagattactattttcactgactacctagaagaatatccagatacagatgagctggtatggatcttagggaagcagcatctccttaaaacagaaaaatctaagctgttgtctgatataagtgctcgtctatggtttacatacagaaggaaattttcaccaattggtggaacgggcccttcatcagatgctggttggggatgtatgctacgctgtggacagatgatgctggctcaagcccttatctgtagacacttgggaagggactggagctgggagaaacaaaaagaacaacccaaagaataccaacgcatcctacagtgcttcttagatagaaaagattgttgctactctatccatcaaatggcacaaatgggtgtaggagaagggaaatcaattggagaatggtttggaccaaatacagttgcacaggtgttaaaaaaacttgctttatttgacgaatggaattccttggctgtttatgtttcaatggataacacagtggtcattgaagatatcaaaaaaatgtgccgtgtccttcccttgagtgctgacacagctggtgacaggcctcccgattctttaactgcttcaaaccagagtgacgagctcatcttcttggaccctcatacaacccagacctttgttgacactgaagagaatggaacggttaatgaccagactttccattgcctgcagtccccacagcgaatgaacatcctaaacctggatccttcagttgcattgggatttttctgcaaagaagaaaaagactttgataactggtgtagccttgttcagaaggaaattctaaaggagaatttaaggatgtttgaattagttcagaaacatccatcacactggcctccctttgtacctccagccaagccagaagtgacaaccactggggcagaattcattgactctactgagcaactggaggagtttgatctggaggaagattttgagattctgagtgtgtagaatcctgggaactcaacttgaaggtctgtcttccatctggcaccataaaaacatgaacttattgcataaaacttttctagtcagcaagtgcctgatatgccaatagcatacaaactcaatagcaatcatgactgagccaatcactgtttctcagaaaaacaaaacaaaacaaaacaaatgacagtaacccttccccggaaagaaatagaacaatcatggagcctaggagcagagagatgaggaggagttcattgcttcccagcttgtgttatatggctacagcaagtcttcagctgctgcaatgaggaaatgggcatctggaagacaaacagcaactctcagcttgcttcaagaaccagcagataagagatggttaagctgttcttcaccctttcagatgtgacctcttttggactaagcagcaatctgttctcttgctcaaataataaagtgactgaatcagggaggaaaaggttcttgttaaattatttgattgtgtagttgaagtaattataatttatatcaaaacgtttgtcaaagaaacgatgtcaaatatacacttcttgatctcccttctgtttgcggggatcttactatttgatgggtcactgtccccattcttactgatacttttgtcagatatcaccctgtccttaaatcatgatcacttaaatcaggggtcagcaaactttttctgtaaagggccagacgggaaatattttgggctttgcaggccatgcggcctctgtcacatctactcaactctgctgttgacatgcaaaagcagcaatagacaatatgcgtgtaaatgagtgtggctgtaatccaagaaaactttatttacaaaagcaggtggagggctgggtttggcctgcaggctgtagcttgccaatcagtgacttaaattgttgatttttgtttgataaattaaaaataaattgtgtttgaagtatacccta

SEQ ID NO: 1278 - DNA, 3544 bp, Homo sapiens
  source 1..3544: mol_type = genomic DNA
attggtgagtggggcagggcaggagggaactgaagagtgagaaagcattatttcagcaaaaggtctttcctcccttgctctctcctccaaccactggctcagcctctccgcccgctgcctgtgaatgatgcaatggaaggtgtgctggggtcgccctgtgtcccgtgcataggagcatctcagcctccaggtcctctcctttggggctcacggcacccccatgctacgaaccgcaggcagggacggcctctgtcgcctgtccacctacttggaagaactcgaggctgtggaactgaagaagttcaagttatacctggggaccgcgacagagctgggagaaggcaagatcccctggggaagcatggagaaggccggtcccctggaaatggcccagctgctcatcacccacttcgggccagaggaggcctggaggttggctctcagcacctttgagcggataaacaggaaggacctgtgggagagaggacagagagaggacctggtgagggataccccacctggtggcccgtcctcacttgggaaccagtcaacatgccttctggaagtctctcttgtcactccaagaaaagatccccaggaaacctacagggactatgtccgcaggaaattccggctcatggaagaccgcaatgcgcgcctaggggaatgtgtcaacctcagccaccggtacacccggctcctgctggtgaaggagcactcaaaccccatgcaggtccagcagcagcttctggacacaggccggggacacgcgaggaccgtgggacaccaggctagccccatcaagatagagaccctctttgagccagacgaggagcgccccgagccaccgcgcaccgtggtcatgcaaggcgcggcagggataggcaagtccatgctggcacacaaggtgatgctggactgggcggacgggaagctcttccaaggcagatttgattatctcttctacatcaactgcagggagatgaaccagagtgccacggaatgcagcatgcaagacctcatcttcagctgctggcctgagcccagcgcgcctctccaggagctcatccgagttcccgagcgcctccttttcatcatcgacggcttcgatgagctcaagccttctttccacgatcctcagggaccctggtgcctctgctgggaggagaaacggcccacggagctgcttcttaacagcttaattcggaagaagctgctccctgagctatctttgctcatcaccacacggcccacggctttggagaagctccaccgtctgctggagcaccccaggcatgtggagatcctgggcttctctgaggcagaaaggaaggaatacttctacaagtatttccacaatgcagagcaggcgggccaagtcttcaattacgtgagggacaacgagcctctcttcaccatgtgcttcgtccccctggtgtgctgggtggtgtgtacctgcctccagcagcagctggagggtggggggctgttgagacagacgtccaggaccaccactgcagtgtacatgctctacctgctgagtctgatgcaacccaagccgggggccccgcgcctccagcccccacccaaccagagagggttgtgctccttggcggcagatgggctctggaatcagaaaatcctatttgaggagcaggacctccggaagcacggcctagacggggaagacgtctctgccttcctcaacatgaacatcttccagaaggacatcaactgtgagaggtactacagcttcatccacttgagtttccaggaattctttgcagctatgtactatatcctggacgagggggagggcggggcaggcccagaccaggacgtgaccaggctgttgaccgagtacgcgttttctgaaaggagcttcctggcactcaccagccgcttcctgtttggactcctgaacgaggagaccaggagccacctggagaagagtctctgctggaaggtctcgccgcacatcaagatggacctgttgcagtggatccaaagcaaagctcagagcgacggctccaccctgcagcagggctccttggagttcttcagctgcttgtacgagatccaggaggaggagtttatccagcaggccctgagccacttccaggtgatcgtggtcagcaacattgcctccaagatggagcacatggtctcctcgttctgtctgaagcgctgcaggagcgcccaggtgctgcacttgtatggcgccacctacagcgcggacggggaagaccgcgcgaggtgctccgcaggagcgcacacgctgttggtgcagctcagaccagagaggaccgttctgctggacgcctacagtgaacatctggcagcggccctgtgcaccaatccaaacctgatagagctgtctctgtaccgaaatgccctgggcagccggggggtgaagctgctctgtcaaggactcagacaccccaactgcaaacttcagaacctgaggctgaagaggtgccgcatctccagctcagcctgcgaggacctctctgcagctctcatagccaataagaatttgacaaggatggatctcagtggcaacggcgttggattcccaggcatgatgctgctttgcgagggcctgcggcatccccagtgcaggctgcagatgattcagttgaggaagtgtcagctggagtccggggcttgtcaggagatggcttctgtgctcggcaccaacccacatctggttgagttggacctgacaggaaatgcactggaggatttgggcctgaggttactatgccagggactgaggcacccagtctgcagactacggactttgtggctgaagatctgccgcctcactgctgctgcctgtgacgagctggcctcaactctcagtgtgaaccagagcctgagagagctggacctgagcctgaatgagctgggggacctcggggtgctgctgctgtgtgagggcctcaggcatcccacgtgcaagctccagaccctgcggttgggcatctgccggctgggctctgccgcctgtgagggtctttctgtggtgctccaggccaaccacaacctccgggagctggacttgagtttcaacgacctgggagactggggcctgtggttgctggctgaggggctgcaacatcccgcctgcagactccagaaactgtggttatttgggatggacctgaataaaatgacccacagtaggttggcagcgcttcgagtaacaaaaccttatttggacattggctgctgaatggtcctatctgctggctctcccctgagatctggacagaggaagatgggagggtgctcatcacccccccagcataatgatcagcctccttcctagagacagactcatgcagattgagatcaaaagtccctctgcttgggatcaaattaatgtttgacagagctggccaggcgtggtggctcatgtatgtaatcctagcacttcgagaggccgaggcaggtggatcacgaggtcaggagtttgagattagcctggccaagatggtgaaaccctgtctctactaaaaataaaaaaaaattagccagg

SEQ ID NO: 1279 - DNA, 1055 bp, Homo sapiens
  source 1..1055: mol_type = genomic DNA
atggtcagctcctgttgtggttccgtctgctctgaccagggctgtggcctggagacctgctgccgccccagctgctgtcagaccacctgctgcaggaccacctgctgccgccccagctgctgtgtgtccagctgctgcagaccccagtgctgccagtctgtgtgctgccagcccacctgctgccgtcccagctgctgtcccagctgctgtcagaccacctgctgcaggaccacctgctgccgccctagctgctgtgtatccagctgctgcagaccccagtgctgccagtctgtgtgctgccagcccacttgctgccgtcccagctgcagcatctccagctgctgtcgccccagctgctgtgtgtccaggtgctgcaggtcccagtgctgccagtctgtgtgctgccagccaacctgctgccgtcccagctgctgcatctccagctgctgccgcccctcttgctgtgaatccagctgctgccgcccgtgctgctgccgcccctgctgctgcctgcgtccagtctgtggccgagtctcctgccacaccacttgctatcgcccaacctgtgtcatttccacctgcccccgtcccttgtgctgtgcctcctcttgctgctgagctccttgcctgaaactatctcctccccttcagctcactcctcacagaagcagaccttgtgcatctcataaacaactcagaagaggccattcccaccaactgtgtttccatatcctggacatatatctaggatatatgtcctggctatacatctagaatatatgttccccatgttgacccaagtgtgaaattagatattatttacagaaagaaattaatagaatttaccaaattttataccttatatttgtatttatggataccaagttcttctgtcccaaacatggaaattcttgcagggtaactcggggcaaggttgtctcactctcagatttgaaagtctgattgtttcaccctgtatttccttttacagcaatgtttctgtatcttatttttgctgcttctgaataaaactccacttttgtcgcatagaaata

SEQ ID NO: 1280 - DNA, 982 bp, Homo sapiens
  source 1..982: mol_type = genomic DNA
cgccgctcgccgcagacttacttccccggctcagcagggaaaggttcctagaaggtgagcgcggacggtatgcaaagttgtgaatccagtggtgacagtgcggatgaccctctcagtcgcggcctacggagaaggggacagcctcgtgtggtggtgatcggcgccggcttggctggcctggctgcagccaaagcacttcttgagcagggtttcacggatgtcactgtgcttgaggcttccagccacatcggaggccgtgtgcagagtgtgaaacttggacacgccacctttgagctgggagccacctggatccatggctcccatgggaaccctatctatcatctagcagaagccaacggcctcctggaagagacaaccgatggggaacgcagcgtgggccgcatcagcctctattccaagaatggcgtggcctgctaccttaccaaccacggccgcaggatccccaaggacgtggttgaggaattcagcgatttatacaacgagcccatgcaggtgctgttttccggtgaggccacccaccgcaagtactattccaccacccacggtgctctgctgtccggccagcgtgaggctgcccgcctcattgagatgtaccgagacctcttccagcaggggacctgagggctgtcctcgctgctgagaagagccactaactcgtgacctccagcctgccccttgctgccgtgtgctcctgccttcctgatcctctgtagaaaggatttttatcttctgtagagctagccgccctgactgccttcagacctggccctgtagcttttctttttctccaggctgggccgtgagcaggtgggccgttgagttacctctgtgctggatcccgtgcccccacttgcctaccctctgtcctgccttgttattgtaagtgccttcaatactttgcattttgggataataaaaaaggctccctcccctgcccctcagcttctctctggttttctca

SEQ ID NO: 1281 - DNA, 8131 bp, Homo sapiens
  source 1..8131: mol_type = genomic DNA
gataaggtggcggcggcgaaggcagcggcaggtcgggagcaagatggcgctgcggccaggagctggttctggtggcggcggggccgcgggagctggcgcggggtccgccgggggaggcggcttcatgtttcctgttgcaggtgggataagaccccctcaagcaggcctgatgccgatgcagcaacaaggatttcctatggtctctgtcatgcagcctaatatgcaaggcattatgggaatgaattacagctctcagatgtcccaaggacctattgctatgcaggcaggaataccaatgggaccaatgccagcagcgggaatgccttacctaggacaagcacccttcctgggcatgcgtcctccaggcccacagtacactccagacatgcagaagcagtttgccgaagagcagcagaaacgatttgaacagcagcaaaaactcttagaagaagaaagaaaaagacgccagtttgaagagcagaagcaaaagctcagacttttgagcagtgtgaaacccaagacaggagagaagagtagagatgatgctttggaagccataaaaggaaatttagatgggttttccagagatgcaaaaatgcaccctactccagcatcgcaccccaagaaaccaggcccttccttggaggagaagttcctagtatcttgtgatataagtacatctgggcaggaacaaattaaattaaatacttctgaagttggccacaaagccctaggcccaggttccagtaagaagtatcccagtttaatggccagtaacggggttgctgtagatggatgtgtaagtggtaccaccactgcagaggcagaaaatacttcagatcaaaacctgtcaattgaagagagtggtgtgggagtatttccctcacaggatcctgctcagcccagaatgcctccttggatttacaatgagagtttggttccagatgcctataagaaaatcttagaaaccacaatgactccaactggaatagatactgccaaactgtatcccattctgatgtcatctgggcttcccagggaaactcttggacagatatgggccttagctaatcgaactacacctggcaaacttacaaaagaagaactttataccgttctagccatgatagcggtaacacagaggggcgttcctgcaatgagtcctgatgctttaaaccagttcccagcagctcctattccaactttaagtggcttttctatgactctgcctacaccggtgagtcagccaactgtgataccttcaggtcctgcgggctccatgcccctcagccttggacagccagtcatgggcattaaccttgttggaccagtgggtggagctgcagcccaggcttctagtggtttcataccaacctaccctgcaaatcaggtagtaaagccagaagaagatgacttccaggattttcaagatgcttctaagtcaggatcccttgatgactcattcagtgatttccaagagttgcctgcttcttcaaaaacaagtaactcccagcatggaaacagtgccccttctttgttgatgccacttcctggaactaaagcattgccttcaatggacaaatatgctgtgtttaaaggaattgcagctgacaagtcctctgaaaatactgttccacctggagatcctggtgataaatatagtgctttcagagaacttgaacagacagcagagaataaacctttaggagaaagctttgcagaattcagatctgcaggaactgatgatggtttcaccgattttaaaacagccgatagtgtatcaccactagagccaccaacaaaagacaaaacttttccaccatccttcccctcaggaactatacaacagaaacaacaaacacaagtgaaaaaccctctgaacttagcagacctagatatgttttcctcagttaattgcagcagcgagaaaccattgtctttttcagctgtgtttagcacatcaaaatcagtttctacaccacagtcaacaggttctgctgctactatgacagcattggcagcaacaaaaacttctagtttggctgatgattttggagaattcagcctttttggggaatattctggtctagcacctgttggggagcaggatgactttgcagattttatggctttcagtaatagctctatttcatctgagcaaaagccggatgacaaatatgatgcccttaaagaggaagccagtcctgttcctctaaccagcaacgtgggcagcacagtgaagggtggacaaaactcgactgctgcgtctaccaagtacgatgtcttcagacaactttctctggaagggtctggactaggtgttgaagacctgaaagataacactccttcaggaaaaagtgatgatgattttgctgacttccactccagtaaattttcttccataaactcggacaaatccctgggagagaaagcagtggctttcagacacaccaaagaagactctgcatcagtgaagtccttagatctcccttccattggtggcagcagtgttggcaaggaggactctgaagatgcactctctgttcagtttgacatgaaattggctgatgtgggaggagatcttaagcatgtcatgtctgatagctctttggatttaccaacagttagtggccagcatcctcctgctgcagatatagaggacttaaaatatgctgcttttggaagctacagtagcaattttgcagtgagcacacttacaagctatgactggtcagacagggatgatgcaactcagggcagaaaactctctccatttgtcctctcagcaggaagtggatccccctcagccacctcaattcttcaaaagaaagagacttcatttggcagttctgaaaacatcaccatgacatctctctccaaagtaacgacctttgtaagtgaagatgctcttccagagaccaccttcccagctcttgccagttttaaagacacgattcctcagaccagtgagcaaaaggaatatgaaaacagagactataaagatttcacaaaacaggacctgcctacggctgaacggagccaggaggccacgtgtcccagcccagcgtccagtggtgcctctcaagaaaccccgaacgaatgttcggatgactttggagagtttcaaagtgaaaagcccaaaatcagcaaatttgacttcttagtagccacttcacaaagcaaaatgaaatccagtgaagaaatgatcaaaagtgagctggcaacctttgacctttctgttcaaggatcacacaagaggagtttgagccttggtgataaagaaataagccgttcttctccttctccagctttggagcagcctttcagagaccgttccaatactctgaatgagaagcccgccctgcccgtcatccgagacaagtacaaagacctgacgggagaggtggaggaaaatgagagatatgcatatgaatggcagagatgcctggggagtgccctgaatgtcattaagaaggcaaatgataccttaaatggaatcagtagtagttctgtttgcacagaagtaattcagtcagctcaaggcatggaatatttattaggtgttgttgaagtgtacagggtaaccaagcgtgtggagctggggataaaagccactgcagtgtgcagtgagaaactccagcagttgctgaaggacatcgataaagtatggaataacctaatcggcttcatgtcactcgccacactcacaccagatgaaaactcgctggatttttcctcctgtatgttacggcctgggattaaaaatgctcaggagcttgcctgtggagtgtgcctcttgaatgtggactcgaggagccggaaagaagagaagcctgcagaagaacatcctaaaaaagcattcaactcagaaacagacagtttcaagctggcctatggagggcaccagtatcacgccagctgtgccaacttctggatcaactgtgtcgaaccaaagcctcctggcctcgtcctgcctgacctgctctgaacaactcctctgtgaagcattgacttttttttttctgtgacaccccacggggtgacagggaccaataaatagaatgcgagcactgcacagttcgcttccctgaatcgatatgaagaacaccgcaagggacggggcccccgtcatccccacggccagtctgcaggacttcaggtaaaattgtcccacccaaactgcacgtggcaccagaagcttgctcacttatctctacttaagattttctgaaatacggaccacggctttcttgatctaaggaagaacttgctgctgcagtattgaaactgtgaagaactgacatttgaagaaaaatagattaccgttgcgggactagaatgggcgactgcttggagccagtgcttgtttttatctaggacacttactgtcctgtgaagtagaatacatttatctgcatttagtttgttaatgtctgaaatgaataaaaagaggaaattgcgattaaactgatgttctgctttttatggagaagattctgcccatctcccctggacagtagcaggcaggtgagggcagattttacccacttggttgtcacaactgaaccagttctctactccttcccttcacttctgtccactctcaagactttttcccaaaacatgcctgggcactctgcagccgtgaagaatgctcattttgacagaggcccaaatcctgtgtattaggataatatccttccccccgggagccttcgctgcaaacctgttctgccgcatgcaaagactgtgaccatggagttttctcagacaagatttggaaaggcagtggaatgaaatctctttgcagtggcctctctccaaatttccaaagatgactgcatagggaccaacactgcctgactttgcagtatctgtgagaaaaacctgaaaattaattcagggtgaaaatgtggagctctcggcctagtgtaaagtatcaagatgtatatttatgggatagatacatgacttagaagaagtagaagaaaattgtccagaaacagtactgaattttagatagaaaaggctcatgcttcctggagtagggaattgtctttgccatttaatgtgaatgcataaaattaggggaaaaacccaagtggctaagagctgtgttattcctgggaagaactaccaatctagggcacacgtctctctgaattgttgattatgcgctttatgaagagatttttcaatctcgtgtgctttactttgtgtggtttagaccctctgacctagacttttatttttaaactgaaaaagttggtcttgtctatataattgctgcttttacataatttattttcccctctcaggacaaattctgtcttgctccatcttacagcttttccatgttctccaagaaaggtgtggaacattttcattaaacagctgttgctgaggcttctgcttgaccttctgcgtgcccgaatgcacagagaggcaccgaggagagaaaggcttttctcactcgctcccgatgataccgtctctggccattcctgactgaggcagctcactctgaatgggcacctttggagcttttgcccaccacaaggctagtggggtgtttctaacaacacaagtgggacagcttttggcaggcttttcctgaggcctcggcgcttccatcctggacagcaccacttccacatggagctggaatgcaagcaggctgctaattggccttaaaaattctttgtttttttttgagatggagtttcactcttgttgcccaggcttgagtgcaatggcacaatctcagctcagtgcaacctccgcctcccgggttcaagcgattctcctgcctcagcctcgtgagtagctgggattacaggcgtgcaccaccacgcccagctaattttgtatttttagtagaggcaaggtttctccatgttggccaggcttgaactccggacctcaggcgatccgcccgcctcagcctcccaaagtaccgggattacaggcgtgagccactgcgcctggcctaaatttcataacagaaccatgacagcagaatctacctttgcaataagaatgtttcccaggagttagagaccagccctgggcatgatggtaaagaccccagctaattatacaaaaaataattagccgggtaggtggagtgcatctgtggacattcgtggtcccagctactaggtaagctgaggcgggagatcacaagtccaggagtttgaggctgcacgtgacagcgtaggtgatgacagagcgagacactgtctcttaaaaaaaaaaaaaaaaaagtttcccagtttgaatttgtattgctgaagcatttttttgaaatgctatatagatgcctgtcatgtcacagtggcccagtatcaacattttaaaaagctcacttggtagctgggctggtttctattcctgagaaattccagaatgcctcagataaaattccttagtataatccccattttccttaccaaggatggtaggcttagtcactccttgggaggtgccacaggaaaattcagcagatgtcaacagaaaaaaagcctttgctatgaaaagtattcactacctttcatatctcttgaatacttgaaatgtttaattagatgccaccaatagggatccaaggagtgtgggacacggttgcgctgcttttctttataaacgtttattaaaatggctcaacgctgcattcagcttcacctcagctcttcttgtcagccaggagccccgtgtccttggaaactgtagccaaggttacttatttccatactgtgcattgtgtcagcccgcttcaccccactgcttgaatggccattaataagcacttttctttttttggtgggatgttttgcctttaaaatttttatggcttagtgtgtaatttaatttttgtctggacatgcttgagatagaagaggtactggatatatgaggatattttccatgctttatttttcctgtggctactagttagcattccataggggttgtgaatttttaattatttgaatattttgtgtacatatacatatttgaagggttttgggggggtcttatttgtttaaaggtgtcttctgtttgcctatttcaagtgtacttcagctttgcaaagattatagggctgtatgttacagaaataggaaatgctggccctgtactggggaccactacaaaaattccctttagccgggcgtggtggctcacgcctgtaatccccagcactttgggaggccgagccgggtggatcacccgaggtcaggagttcaagaccagcctggccaacatggcgagaccctgtctctactaaaaatacaaaaattagctgggcatggtggcaggtgcctgtaatccgagctactcgggaggctgaggcaggagaattgcttgaaccagagaggcggaggttgcagtgagccgagatcgcgccactgcactccagcctgggcaacaagagcgaaactctgtctcaaaaataaaaaattccctttaacaccttcaaggtcaaatgcctgcctttgtgaacagttaataaactgacattttcagacatttgccattcagaagggagcattgtagcctgctgtagaccattccagcaaatgtcagaatgcagggcaagatgtgtgtcgactatgttttttatgtttaagttacttacttatttcttcaggtaagtgtgtaccaaataacaatactgaaaagccctccccttgccaggccgaggaaataaagcttaagtgaaacagctcttgggggaaaaatgccactttacaaatacttttctaacaaaatagcattataatgaagtttttacttaattccattatttatatgttgacgtgaatgtaagtggttaaaaagtattcatgtgggacatctcattactttgtagctgtggctttattaaccagtgaatgctgtggcccttagcgaaatgcgttgtcttctgcgtgatgtggaattcgcgcctgtattttaaaagatggtgtggtttctcccttgtttgtattttaataaacaactgctctaattgatgtgtttagacattataaagcttcacctttaaaatattttcagggtctgttctgaaatcaccccttgttaaacttctctaaccaaaatacaagtgtagaagaatgtcaggcta

SEQ ID NO: 1282 - DNA, 1398 bp, Homo sapiens
  source 1..1398: mol_type = genomic DNA
taatagttgctgttgctgcacttccgcttctctcccagcgagagagagacacgagtggccaggcccagccgcagccgcagcagcagccgccgcggcggcacggaggagccagacacaaagagaggggctgtttgcggggtggggtggggggttcgctatgtcggatgacgattcgagggccagcaccagctcctcctcatcttcgtcttccaaccagcaaaccgagaaagaaacaaacacccccaagaagaaggagagtaaagtcagcatgagcaaaaactccaaactcctctccaccagcgccaagagtgctggtcccaaaggcgataacatctatgaatggagatcaaccattctagggcctccaggatccgtgtatgagggtggtgtattctttctcgatatcacttttacaccagaatatcccttcaagcctccaaaggttacatttcggacaagaatctatcattgtaatattaacagtcaaggtgttatttgcttggacatattgaaagataattggagtccagcactaaccatttctaaagtcctcctttctatctgctcacttcttacagactgtaatcctgccgaccccttggtgggaagtattgccactcagtatatgaccaacagagcagaacatgacagaatggccagacagtggaccaagagatacgctacataaattggggtttcacaattcttacattatttgtctgtcacagaagagagctgcttatgattttgaaggggtcagggagggtgggagttggtaaagagtagggtatttctataacagatattattcagtcttatttcctaagattttgttgtaacttaaggtatcttgctacagtagacagaattggtaatagcaacttttaaaattgtcattagttctgcaatattagctgaaatgtagtacagaaaagaatgtacatttagacatttgggttcagttgcttgtagtctgtaaatttaaaacagcttaatttggtacaggttacacatatggccatttatgtaaagtccctctaagactacatactttttgtttaaaacaaaattggaatttgttttcccttcttggaagggaacattgatatttaacagagtttttagagattgtcatctcatatatataaaatggacacgtggctataaaacaccatataagagatgagtagtgcgttttattttatatgccaatctactttgtttaaaaaaggtctgaatcaggacttgtgaaaacctgtagtgaaataccttaagctgttaactaactgtaaggcgtggaataggagttgctcagtggattggttctatgttgtggactacttaagtctgcatttgttactgtgctaataaacaatattaaaaaccacctaataaaca

SEQ ID NO: 1283 - DNA, 9573 bp, Homo sapiens
  source 1..9573: mol_type = genomic DNA
aagcaatcgaaagaagatggccgctcccacgattgtgggggaggtctccactggggaggggcagaggaaattcggtcgaaaaagagataaagctgaaggaaataaaattggcacggagtctgggaaagtagtttccctaaaggagtcttagaaatagggttggtctggaacctaaggggcggagccgacgcgtagagccgctttgcgcgtgcgcatcacctaggcggttagatttgaatacttcactgaggcgagccgggcgttgtgagcggactgctagaggcggctgtctgtttccgctctaaggaaactcagagcgtgtggaccccaaacaagtctgcgcaaaatttgtcgaggaggtttgccgcggcagaaaagttttcttcaaaaatggatggggtgtcttcagaggctaatgaagaaaatgacaatatagagagacctgttagaagacggcattcttcaatattgaaacccccaaggagtcctcttcaggacctcagaggtgggaatgaaagagttcaggaatccaatgctttgagaaataagaaaaactctcgtcgagtcagctttgcagatactataaaggtattccagacggagtctcatatgaaaatagtgagaaagtcagaaatggaaggctgcagtgcaatggtgccatctcagctgcaacttctgcctcctgggtttaagcgattctcctgcctcagcctcccagaaacagaaacaggagaaaatcttcttttgatacagaataagaaattagaagataattactgtgaaattactgggatgaacacattgctttctgctcccattcatacccagatgcaacagaaggagttttcaattatagaacatacccgtgaaaggaaacatgcaaatgaccagacagtcattttttcagatgaaaaccagatggacctgacatcaagtcacactgtaatgattaccaaaggccttttagataatcccataagtgaaaagtccaccaagatagataccacatcatttctagctaatttaaagcttcacaccgaggactcaagaatgaaaaaagaagtaaatttttccgtggatcaaaacacttcttcagaaaataaaatagatttcaatgacttcataaaaagattgaaaacaggaaaatgtagtgcttttcctgatgtgcctgataaagaaaattttgagatacctatttattccaaggaaccgaacagtgcctcttctacacatcaaatgcatgtatctcttaaggaagatgaaaataacagtaatattactaggctctttagagaaaaagatgatgggatgaatttcacccagtgtcatacagccaatattcagacattgattcccacatccagtgagaccaactcacgggaatctaaaggtaatgatattacaatttatggcaatgactttatggacttgacatttaaccacactttgcagatcttacctgcaacaggtaatttttctgaaatagaaaatcaaactcagaatgccatggatgtaacaacaggttatggaactaaagcttcaggaaataaaacagtttttaagagtaaacaaaatactgcttttcaagacctttccataaactctgcagacaaaatacatattaccagaagtcatattatgggggcagaaactcacatagtctcacagacttgtaatcaggatgccagaatattagccatgaccccagaatctatatattctaatccatctattcaaggttgtaagactgttttctattctagttgtaatgatgccatggaaatgaccaaatgtctctcaaatatgagagaggagaaaaatttgctaaagcatgacagtaattatgctaaaatgtattgcaatccagatgctatgtcttctctcacagagaaaactatttattccggagaggagaacatggacattaccaagagtcatacagttgcaatagataatcaaatttttaaacaagatcaatcaaatgtgcaaatagcagctgcaccaacacccgaaaaagaaatgatgctccaaaatcttatgaccacatcagaagatgggaaaatgaatgtaaattgtaactcagttcctcatgtatctaaggaaagaatacagcagagcctgtcaaatcctttgtctatttcattgactgatagaaagactgaactcttatcaggtgaaaatatggatttgactgaaagtcacacaagtaacttaggaagtcaggttcctcttgcagcttataatctagcaccggagagtaccagtgaatctcactctcagagcaaaagctcttcagatgaatgtgaagaaattaccaaaagtcgtaatgaaccatttcagcgatcagacataatagccaaaaacagcttaaccgacacctggaacaaagacaaagattgggttttgaagattttgccctaccttgataaagattctcctcagtcagctgattgtaatcaggagatagcaacaagccataatatagtctactgtggtggagttcttgataaacaaataactaatagaaatacagtatcatgggaacaatctttgttttctaccacaaagccattattttcatcaggacagttctctatgaaaaatcatgatactgctataagtagtcatacagtgaaatctgtactaggccagaattctaaactggctgagccactgaggaaaagtttaagcaatcccacacctgactattgccatgacaagatgattatatgttcagaggaagagcaaaatatggatctaacaaagagccacactgtcgtcattggatttggtccttctgaactacaagaacttggtaaaactaatttagaacacactactggccagctaacaacaatgaacagacagatagctgtaaaagttgaaaaatgtggtaaaagtcccatagaaaaaagtggagtgcttaaatctaactgtattatggatgtgttagaggacgaaagtgtacagaaacctaaatttccaaaggaaaagcaaaatgtcaaaatttggggaaggaaaagtgttggtggaccaaaaattgataagactattgtattttcagaagacgataagaatgatatggatatcactaagagttatacaatagaaataaaccatagacctttattagagaaacgtgattgtcatttggtgccattggcaggaacttctgaaactattttatatacatgtaggcaggatgacatggagatcactagaagtcacacaactgccttagaatgtaaaactgtctcaccagatgaaataactactaggcctatggacaaaactgtagtgtttgtagataatcatgttgaactagaaatgacagagtcccatactgttttcattgactaccaagaaaaggaaagaacagacagacctaactttgaactatcccaaaggaaaagcctaggaacaccaacagtgatatgtactcctactgaggagagtgttttctttccaggaaatggtgaaagtgaccgtctagtagcaaatgacagccagctaacccctctggaggaatggtctaataataggggccctgtagaggtagctgataacatggaattgtctaaatcagccacttgcaaaaacatcaaagatgtacaaagtcctggatttctgaatgaacctctatcaagcaaaagtcagagaagaaaaagccttaagctaaaaaatgacaagaccattgtattttcagagaatcataaaaatgatatggatattacccagagttgtatggtggaaatagataacgaaagtgccctggaggataaagaggacttccatttggcaggggcttctaaaactattttgtattcatgtgggcaggatgacatggagatcactaggagtcacacaactgccttagaatgtaaaactctcctgccaaatgaaatagctattaggcccatggacaaaaccgtattgttcacagataattacagtgatctggaagtcaccgattcccatactgttttcattgactgtcaagccacagagaaaatacttgaagaaaaccctaaatttggaataggaaaaggaaaaaacttgggtgtttcctttcctaaggataatagctgtgttcaagaaatcgctgaaaaacaagcactggctgtaggaaacaaaatagttcttcacaccgagcaaaagcaacaactctttgctgctactaatagaactactaatgaaatcatcaaatttcatagtgctgctatggatgaaaaggtcatagggaaagttgtagaccaggcctgtacattggaaaaagcgcaagttgaaagctgtcagttaaataatagagatagaagaaatgtggactttacaagtagtcatgcaactgctgtttgtggatccagtgataattattcctgtttaccaaatgttatttcctgtactgataatttggagggtagtgccatgctcttatgtgataaagatgaggaaaaagccaattattgcccagtgcaaaatgatcttgcttatgcaaatgattttgccagtgaatattacttggaatctgagggacagcctctctctgctccttgtcctttgttagagaaggaagaagttattcaaaccagtaccaaaggacagttagactgtgttataacactgcacaaagatcaagatctgattaaggatccacgaaatctattggctaatcaaactttagtatatagtcaagatctgggggagatgactaaacttaattcaaagcgagtatcttttaagcttccaaaggatcaaatgaaagtctatgttgatgacatttatgttattcctcagcctcatttctcaaccgaccaacctccattacctaaaaaaggacagagtagtatcaataaagaagaagtaatactgtctaaagctggaaataagagtttaaatattatagaaaattcctctgcacccatatgtgaaaacaagcccaaaatactcaatagtgaggaatggtttgctgcagcctgtaaaaaagaactgaaggaaaatattcaaacaactaactataatacagctctagatttccacagtaactcagacgtaactaagcaagtcattcaaactcatgtcaatgctggagaagcaccagatcctgtaattacatctaatgttccatgttttcatagtatcaaaccaaatctgaataatttgaatggaaaaactggagagtttttagcctttcaaactgttcatctaccaccccttccagagcaattacttgaattaggaaataaggcacacaatgatatgcatatagtgcaagctacagaaatacataatattaacataatctccagcaatgctaaagatagtagagatgaggaaaataaaaagtctcataatggagctgaaaccacctctctaccgccaaagacagtttttaaagataaagtaaggagatgttctttgggaatctttttgcctagattgcccaacaagagaaattgtagtgtcactggtattgatgacctggaacagattccagcagacacaactgatataaatcacttagaaactcagccggtctctagcaaagattcaggcattggatctgttgcaggtaaactgaacctaagtccttctcaatatataaatgaggaaaatcttcctgtatatcctgatgagatcaattcttcagactctattaacatagaaactgaggaaaaggccttgattgagacataccaaaaagagatttcaccatatgaaaataaaatgggaaaaacttgcaatagccaaaaaagaacgtgggtacaagaagaagaagatattcataaggagaaaaaaatcagaaaaaatgagattaagtttagtgatacgacacaagatcgggagatttttgatcaccatactgaagaggatatagataaaagtgctaacagtgtattgataaaaaacctgagcaggaccccatctagttgcagcagctctctggattcaatcaaggctgatgggacctctctggacttcagcacttaccgcagtagtcaaatggaatcacagtttctcagagatactatttgtgaagagagcttgagggagaaactccaagatgggagaataacaataagggagttctttatacttctccaggtccacatcttgatacagaaaccccgacagagcaatctcccaggcaattttactgtaaacacaccacctactccagaagacctgatgttaagtcaatatgtttaccgacccaagatacagatttatagagaagattgtgaggctcgtcgccaaaagattgaagaattaaagctttctgcatcgaaccaagataagctgttggttgatataaataagaacctgtgggaaaaaatgagacactgctctgacaaagagctgaaggcctttggaatttatcttaacaaaataaagtcatgttttaccaagatgactaaagtcttcactcaccaaggaaaagtggctctgtatggcaagctggtgcagtcagctcagaatgagagggagaaacttcaaataaagatagatgagatggataaaatacttaagaagatcgataactgcctcactgagatggaaacagaaactaagaatttggaggatgaagagaaaaacaatcctgtggaagaatgggattctgaaatgagagctgcagaaaaagaattggaacagctgaaaactgaagaagaggagcttcaaagaaatctcttagaactggaggtacaaaaagagcagacccttgctcaaatagactttatgcaaaaacaaagaaatagaactgaagagctactggatcagttgagcttgtctgagtgggatgtcgttgagtggagtgatgatcaagctgtattcacctttgtttatgacacgatacaactcaccatcacctttgaagagtcagttgttggtttccctttcctggacaagcgttataggaagattgttgatgtcaattttcaatctctgttagatgaggatcaagctcctccttcctcccttttagttcataagcttattttccagtacgttgaagaaaaggaatcctggaagaagacatgtacaacccagcatcagttacccaagatgcttgaagaattctcactggtagtgcaccattgcagactccttggagaggagattgagtatttaaagagatggggaccaaattataacctaatgaacatagatattaataataatgaattgagacttttattctctagctccgcagcatttgcaaagtttgaaataactttgtttctctcagcctattatccatctgtaccattaccttccaccattcagaatcacgttgggaacactagccaagatgatattgctaccattctatctaaagtgccactggagaacaactacctgaagaatgtagtcaagcaaatttaccaagatctgtttcaggactgccatttctaccactagacccttggaccaccattggaacaaccaagcagaatgtacttgatattatttcagggtcccattgctgttcagcctttgtttttacgtcattacaagctgagtaaaattccttctgatgatgttatagttaatctgtatgttttttatatctctgcagaatgatggtgatgaagtctggatggtaggcctcatagcctactatcaacttactcatctttgtaccaaaggtttaagtaataggacacttaggaaaaatgtctcctaactaaactagtgctttctgctttagtacaagccctaaggattaacttaagtataagaagtgttatcactgacaagaacattagccattttcccataactagatagagctatgattttttaggttgcctggcttctgcctagcagatatttctggagtagaaatgtatctgtctacaaactattatcctttttctccgttactaaaatgctattaagagaaagtagggctgggtgcggtggctcacacctgtaataccagcagtttgggaggccaaaatgggtgaatagcctgagtccaggaattcaagaccagcctgggcaacatggcaaaaccccacctctacaaaaaatacgaaagttagccagtcatggtggcttgcgcctgtggtcccagctacttaggagcttaaggcaggaggatcacttgagcccaggaggcagaggttgcagtaagccgagaccattccactgcactccagcctaggcaacagagcaagaccctgtctcaaaaaaacaaaaagagagaaagcaatagcactcagctattgaaatggttgccatctttttttgaaggccttgctttttattctatggtgtctattatgttttctttttctttttttttgagacggagtcttgctctgtcgcccaggctggagtgcagtggcatgatctcagctcactgcaagctccgcctcctgggttcacgccattctcctgcctcagcctcccgagtagctgggactacaggtgcccaccaccatgccgggctaattttttgtctttttagtagaaatggggtttcacgatgttagccaggatggtctcgatctcctgacctcgtgatccgcctgcctcggcttcaaagtgctgggattacaggtgtgagccaccacacccagcaatgttttcttaataagtatagtttttctagggaaagttaattcatttttgtctagtacatatatgtaaatatattaatgttgtttttgtgtttgtgatgtagtaaggagatgtacatagaaattcattgaggtatatagatactcatctgtctaggcagttcccaattttctgaagaatgttttacagcaaaattttctattttcttttattaaatagtgacacgtcaaacaatgtcacatccaaaacactagtttcatcaatttctagcagtaataatagacttgctgtaagtattgttttctgatgccatacccttgtcatacatattattaaatgaccaatattatgtatgaagtagacaaaaaaatttactcaaacttcattcaaatcctaattgtgataatttttgttttatatttaattataaaccaaaatacatttgcatttttaagctaatttgtctcaaaattttgctttatatttttggatcaggttaaagtcctgtggatcccctgaatgttattgtccctcttgattggtttttacttctgagctatacgtcaaaagacacataagcttcaaaagtcaagacaaacctcatttgccataaaaatcaagatatagatgttctgttccgtaaactccttgaaaaacattttaaagtcatcaatatgatctgtttcccatgaaacttaagttagctttcttattggagttatttcttttctgtaagtctgaaaagtagagattttgttttacgcattttagtaacctgcaacaaccaactctaaaaaagatttggcttgtaatgacggtctctgcttttttgggtttggagtacacaattgtaatatttacttagttatttgtgtttttctttgttcaaggtattgactagtttcataaattttttgaaagtttttctttcattggttggaaagcagattacattttgcactattaaaataagtttattactttaaa

SEQ ID NO: 1284 - DNA, 5218 bp, Homo sapiens
  source 1..5218: mol_type = genomic DNA
cccatctctacgaaaaatacaaaaattagccaagtatggtggccggcgcctgtaatcccagctactcgggagactgaggcagagaactgcttgaacctgggaggcagaggttgcagtgatccgagatcgcgtcactgcactccagcgtgggcgacagagcgagactccgtttcagaaaagaaaaaaaaaaaaaaaaaaaagggagtcggggtggagctctcattggctcgttgcatgtgagtgtccctacggcctagaaatacaagagaagcacatcggaacgggctggaaatccacccagttaactagagggctttgaaccttttattaacttggaggttgactctcctgtcaactcgattcccttttggctgtttggcagggtcagtgagacatcccctgggtcgctcgaccccgtaggacggttcagggagccctccaggtcttcgtttctcctcttccccgcacagtgctgttatccagctgggggatccaacgcacacttaaggctccagcaaagtggctccgctgccggatgggagtgccccagtgtgctggatgaagctggcgcatgcaccatgtcatcatgtgtctctagccagcccagcagcaaccgggccgccccccaggatgagctggggggcaggggcagcagcagcagcgaaagccagaagccctgtgaggccctgcggggcctctcatccttgagcatccacctgggcatggagtccttcattgtggtcaccgagtgtgagccgggctgtgctgtggacctcggcttggcgcgggaccggcccctggaggccgatggccaagaggtcccccttgacacctccgggtcccaggcccggccccacctctccggtcgcaagctgtctctgcaagagcggtcccagggtgggctggcagccggtggcagcctggacatgaacggacgctgcatctgcccgtccctgccctactcacccgtcagctccccgcagtcctcgcctcggctgccccggcggccgacagtggagtctcaccacgtctccatcacgggtatgcaggactgtgtgcagctgaatcagtataccctgaaggatgaaattggaaagggctcctatggtgtcgtcaagttggcctacaatgaaaatgacaatacctactatgcaatgaaggtgctgtccaaaaagaagctgatccggcaggccggctttccacgtcgccctccaccccgaggcacccggccagctcctggaggctgcatccagcccaggggccccattgagcaggtgtaccaggaaattgccatcctcaagaagctggaccaccccaatgtggtgaagctggtggaggtcctggatgaccccaatgaggaccatctgtacatggtgttcgaactggtcaaccaagggcccgtgatggaagtgcccaccctcaaaccactctctgaagaccaggcccgtttctacttccaggatctgatcaaaggcatcgagtacttacactaccagaagatcatccaccgtgacatcaaaccttccaacctcctggtcggagaagatgggcacatcaagatcgctgactttggtgtgagcaatgaattcaagggcagtgacgcgctcctctccaacaccgtgggcacgcccgccttcatggcacccgagtcgctctctgagacccgcaagatcttctctgggaaggccttggatgtttgggccatgggtgtgacactatactgctttgtctttggccagtgcccattcatggacgagcggatcatgtgtttacacagtaagatcaagagtcaggccctggaatttccagaccagcccgacatagctgaggacttgaaggacctgatcacccgtatgctggacaagaaccccgagtcgaggatcgtggtgccggaaatcaagatcctggtgaagaccatgatacgtaaacgctcctttgggaacccattcgagggcagccggcgggaggaacgctcactgtcagcgcctggaaacttgctcaccaaaaaaccaaccagggaatgtgagtccctgtctgagctcaaggaagcaaggcagcgaagacaacctccagggcaccgacccgccccccgtgggggaggaggaagtgctcttgtgagaggcagtccctgcgtggaaagttgctgggcccccgcccccggctcccccgcacgcatgcatccactgcggccggaggaggccatggagcccgagtagctgcctggatcgctcgacctcgcatgcgcgccgcgtcgcctctggggggctgctgcaccgcgtttccatagcagcatgtcctacggaaacccagcacgtgtgtagagcctcgatcgtcatctctggttatttgttttttcctttgttgttttaaaggggacaaaaaaaaaaaaaggacttgactccatgacgtcgaccgtggccgctggctggctggacaggcgggtgtgaggagttgcagacccaaacccacgtgcattttgggacaattgctttttaaaacgtttttatgccaaaaatccttcattgtgattttcagaaccacgtcagatataccaagtgactgtgtgtggggtttgacaactgtggaaaggcgagcagaaaactccggcggtctgaggccatggaggtggttgctgcatttgagagggagtagggggctagatgtggctcctagtgcaaaccggaaaccatggcaccttccagagccgtggtctcaaggagtcagagcagggctggccctcagtagctgcagggagctttgatgcaacttatttgtaagaaggatttttaaattttttatgggtagaattgtagtcaggaaaacagaaagggcttgaaatttaataagtgctgctggaaggggattttccaagcctggaagggtattcagcagctgtggtggggaaacatttctcctgaaagactgaacgtgtttcttcatgacagctgctcaaagcaggtttctgagatagctgaccgagctctggtaaatctctttgtcaaattacgaaaacttcagggtgaaatcctatgcttccatgtacattacatggcttaagattaaacaaaaacatttttcaagtctctaactagagtgaactctagagcacagtagttcagaaactatttagagcttccaggatatatttcacagcttcaggcatgtgatcagttagagccgatgaaacctatgcccgcctgtatatatattagcagcttagctagttcataacctgtatattctaaagactgctaaggttttgttttcattttaaatcctagctgattgttgtggtcaatgaaatacccagtttctggagggccaggtgggaaatgctttcactggaccaacacacaaatgatcatcctgaggatctgagcttccctagactccacacaataaccttggggcacccttttagagaagactgttgaaacccacagcactcgttggggtatgaggaaaccagggcttggcacaggaagttcccctttgtagctaaaagtccagaaagaaagggttcatctttttgacttccaactgatattgggaagtttggttgaggttcaagtgtgactccttccagagccacaggtaggggagtgtgaagttgagggggaggaaagctggaaggactctgccttgggagattcccagctctgctttccagcgcttggtggaatctgggctggggaaagacggcaccgggaaactctgcttccccattgtttccatctgatcagctgtggtgtgaggacttctcagacaaaggcaaggcctcgtgcccctgcccagcccattcatggagccctgggccttcttggcttccatagatcctaagctcttgactgtagtttagccagacttgttttgctatcttataagcagttcagaattagggaatgctggttttgaagagcaaaggacaggtagtctagagagggtcgtctggcctgcttgctgggtctttgtaacccagcacttcctcttgccctcctggctttatgtttatggggagaggactcaatagctccaccccttctggcaccagatggggcttggttagtttgcaataagcaccttgcagaggttaaagccagcgggtccctagtcttaggcccagcctgcttgtgtgggctctggcctggcctggtggctggcccagggggcagcagtgcttagagcttctgcagggcttctcttgtttacacagctgcatcagacaatgccatttctccccaccacggaaccttccatctaagatttcttccagggaatgccagcaatcaggcagcacccagctgtgggggcagtggggtgggggagacccacattgatgactttttttttttcttttaatgaagaaacaccaaagaaagctgtggaaaggacctgccccacatgaaaaggataagccaagatggctgtaaacacagagcatttgagctgccactcttggagcacattgatttttcaaaagccagctctgtcaggaaaggaggtgctgttatgagcagctcttccagtgggcaaagaggacgcccataatttcttccattgctagctcatctgtgggaccaatttggtgtaagcaacctgtggcctgcacttgtggcctcgaaggaagcacaaaccctccatccacttcccatttcctctgcccttttccacctcccccttccatcccaccagctgccagtggctcccagaaagccttattgagccccttgttgacacttggggctgcggaggcctctccctactggtctggcctttcctgagaggcaggtcttccgtcctcagagcctttctggaacaaggagaatgcctgtgcaggtggacacacaggcctggcctgtcgctctcacttgtcttccagcggggagcttcacgttgccgagtggaagaaccatgacctccacttgcttccaaggtgctagggaagtttcagggtacgctggttcccctctccagctggaggccgagtttctggggactgcagatttttctactctgtgatcgattcaatgcccgatgcttctgtttcattcccgaccctttctactatgcattttccttttatcaggtgtataaagttaaatactgtgtatttatcactaaaaagtacatgaacttaagagacaactaagcctttcgtgtttttccacaggtgtttaagcttctctgtacagttgaaataaacagacagcaaaatggt

SEQ ID NO: 1285 - DNA, 550 bp, Homo sapiens
  source 1..550: mol_type = genomic DNA
gggctggcggccggggagctgcgtagctcccggccccgcggccatgcccaagcggagctgccccttcgcggacgtggccccgctacagctcaaggtccgcgtgagccagagggagttgagccgcggcgtgtgcgccgagcgctactcgcaggaggtcttcgacccatctggggtagcgtccattgcctgttcctcatgcgtgcgagccgtggatgggaaggcggtctgcggtcagtgtgagcgagccctgtgcgggcagtgtgtgcgcacctgctggggctgcggctccgtggcctgtaccctgtgtggcctcgtggactgcagtgacatgtacgagaaagtgctgtgcaccagctgtgccatgttcgagacctgaggctggctcaagccggctgccttcaccgggagccacgccgtgcatggcagccttccctggacgagcgctcggtgttcacactgaactgtggggtcgacgggaggggtgccttttacatgttctattttgtatcctaatgacagaatgaataaacctctttatatttgcacaaga

SEQ ID NO: 1286 - DNA, 2524 bp, Homo sapiens
  source 1..2524: mol_type = genomic DNA
gaagaggaggtggagaaggcttgggctcgcgccgctgaagaaaaggaagcaaatgagctgatggaagatctgtttgaaactttccaagatgagatgggattctccaacatggaagatgatggcccagaagaggaggagcgtgtggctgagcctcaagctaactttaacacccctcaagctctacggtttgaggaactactggccaacctactaaatgaacaacatcagatagcgaaggaactatttgaacagctgaagatgaagaaaccttcagccaaacagcagaaggaggtagagaaggttaaaccccagtgtaaggaagttcatcagaccctgattctggacccagcacaaaggaagagactccagcagcagatgcagcagcatgttcagctcttgacacaaatccaccttcttgccacctgcaaccccaatctcaatccggaggccagtagcaccaggatatgtcttaaagagctgggaacctttgctcaaagctccatcgcccttcaccatcagtacaaccccaagtttcagaccctgttccaaccctgtaacttgatgggagctatgcagctgattgaagacttcagcacacatgtcagcattgactgcagccctcataaaactgtcaagaagactgccaatgaatttccctgtttgccaaagcaagtggcttggatcctggccacaagcaaggttttcatgtatccagagttacttccagtgtgttccctgaaggcaaagaatccccaggataagatcctcttcaccaaggctgaggacaatttgttagctttaggactgaagcattttgaagggactgagtttcttaaccctctaatcagcaagtaccttctaacctgcaagactgcccgccaactgacagtgagaatcaagaacctcaacatgaacagagctcctgacaacatcattaaattttataagaagaccaaacagctgccagtcctaggaaaatgctgtgaagagatccagccacatcagtggaagccacctatagagagagaagaacaccggctcccattctggttaaaggccagtctgccatccatccaggaagaactgcggcacatggctgatggtgctagagaggtaggaaatatgactggaaccactgagatcaactcagatcaaggcctagaaaaagacaactcagagttggggagtgaaactcggtacccactgctattgcctaagggtgtagtcctgaaactgaagccagttgccgaccgtttccccaagaaggcttggagacagaagcgttcatcagtcctgaaacccctccttatccaacccagcccctctctccagcccagcttcaaccctgggaaaacaccagcccaatcaactcattcagaagcccctccgagcaaaatggtgctccggattcctcacccaatacagccagccactgttttacagacagttccaggtgtccctccactgggggtcagtggaggtgagagttttgagtctcctgcagcactgcctgctatgccccctgaggccaggacaagcttccctctgtctgagtcccagactttgctctcttctgcccctgtgcccaaggtaatgatgccctcccctgcctcttccatgtttcgaaagccatatgtgagacggagaccctcaaaaagaaggggagccagggcctttcgctgtatcaaacctgcccctgttatccaccctgcatctgttatcttcactgttcctgctaccactgtgaagattgtgagccttggcggtggctgtaacatgatccagcctgtcaatgcggctgtggcccagagtccccagactattcccatcgccaccctcttggttaaccctacttccttcccctgtccattgaaccagccccttgtggcctcctctgtctcacccttaattgtttctggcaattctgtgaatcttcctataccatccacccctgaagataaggcccacatgaatgtggacattgcttgtgctgtggctgatggggaaaatgcctttcagggcctagaacccaaattagagccccaggaactatctcctctctctgctactgttttccccaaagtggaacatagcccagggcctccaccagtcgataaacagtgccaagaaggattgtcagagaacagtgcctatcgctggaccgttgtgaaaacagaggagggaaggcaagctctggagccgctccctcagggcatccaggagtctctaaacaactcttcccctggggatttagaggaagttgtcaagatggaacctgaagatgctacagaggaaatcagtggatttctttgagctaggagaataagagtctggagactgggagccttcacttcggcctccgattggtggcgcatagggtgtaaccaataggaaacccctaaagggtacttaaaccccagattttgcaactggggctcttgagcagcttgctttagcctgctcccactctgtggaatatacttttgcttcaataaatctgtgcttttattgcttcattgtttca

SEQ ID NO: 1287 - DNA, 7068 bp, Homo sapiens
  source 1..7068: mol_type = genomic DNA
tgttaggaaagaaaaaaaaattcctgatgtctggtccaagcaggaattccccggtggattggggaatgtctggcttttcctcagcttattgatctctgtggtaaccactggaggcccccagaagacccatagaaatgagaggcctgaggtctacaagtcgctgctagaaatattttagcctctccaaagcccagaatgcagccccgacccaagtttgtaagggttctgggtgcacgctgaccctgcgcgggcagacgcgccctttgctccaggtccggacctgggcgctgctatagcaacgtcctggacgcccagaccttaggccgccgccgccgcggaagcgaggaacccggccttctcccgctcctgagggctgtggcggcggcggcccgggaggcggcccaggctgggtaaagaccgcccggctcctcctatgcaagctgaggcagcggattggttttcaagcatgcccttccagaagcatgtctactacccgctcgccagcggcccagaggggcccgacgtcgctgtggccgccgccgccgcgggtgcggcctccatggcctgtgcgccccccagcgcggcttcggggcccctgcccttcttccagttcaggccgcggctggagagtgtggactggcggcggctgagcgccatcgacgtggacaaggtggcgggggctgtggacgtgctgacgctgcaggagaacatcatgaacatcaccttctgcaagctggaagacgagaagtgcccacactgccagtcgggggtggacccggtgctgctgaagctcatccgtctggcgcagttcaccatcgagtacttgctgcactcacaagagttcctcacctcgcagctgcacaccctggaggagcggctgcgcctgagccactgcgacggcgagcagagcaagaagctgctcaccaagcaggcgggggagatcaagacgctcaaggaagagtgcaaacgccggaagaagatgatctccacccagcagctgatgatcgaggccaaagccaactattaccagtgccatttttgtgacaaggcctttatgaaccaagcttttctacaaagtcacattcaacgccgccacactgaagaaaattctcattttgagtatcagaaaaatgcacagattgagaagctccggagtgagatcgtcgtattgaaggaagagctgcagctcaccaggtctgagctagaggctgcacaccatgccagtgcagtcagattctccaaggaatatgaaatgcagaaaacaaaagaggaagactttttgaagttatttgacaggtggaaagaagaagaaaaggagaaactagttgatgaaatggaaaaagtcaaggagatgtttatgaaggaatttaaagaattaacttcgaagaattcagcattagaatatcaactgtcagaaatccagaagtccaatatgcagatcaagtccaacataggcacattaaaagatgcacacgagtttaaagaagaccgttctccatatccccaggatttccataatgtcatgcagcttcttgatagtcaggaaagcaaatggacagctcgagttcaagctattcatcaagaacacaagaaagagaagggtcggctcctgtcacatatagagaaacttcgaacctcaatgatagatgatctaaatgcaagcaatgttttctataagaaaaggatagaagagctagggcagagactccaggagcagaatgagctgattataactcagagacagcagattaaagactttacctgtaatccattaaacagtatcagtgaacccaaaggaaatcctttagcctggcaggcttttgaatctcagccagctgctccagctgtgcctatgaatgccccagccctgcacactttggaaactaaatcaagtctgccaatggtgcatgaacaggcattctcgtcgcacatactggaaccaatagaagaactttcagaggaagaaaaaggaagggaaaatgaacagaaattaaataacaacaaaatgcatttaaggaaagctttgaagagtaactcctccctcactaagggactaagaacaatggtggagcagaacttgatggagaaactggaaaccttggggattaatgcagatatacgtggcatttcaagtgatcagttgcatagagtactaaaaagtgtggaatcagaaagacataagcaagaaagagaaatacctaactttcatcaaattcgagaattccttgaacatcaagtcagctgtaaaattgaggagaaagcactactctcttcagatcagtgcagtgtttctcaaatggataccctttcaactggagaagtacccaaaatgatacaacttccttccaaaaacagacaactgattagacaaaaagctgtttctactgataggacatctgttccaaaaattaagaaaaatgtcatggaagatccttttcccagaaagtcttcaactattacgacccctccttttagttcagaggaggagcaggaggacgacgacctcatccgggcatacgcatccccaggcccacttcctgtgccgccaccacaaaacaagggcagcttcgggaagaacacagtgaaaagtgacgcggacgggaccgagggaagcgaaatcgaggacactgatgattctcccaagcccgcaggagtcgccgttaaaacacctactgaaaaagttgaaaagatgtttccacatcgcaaaaatgtgaacaaaccagtcggtggaactaatgtccctgagatgtttatcaaaaaagaagaattacaagaactaaagtgtgcggatgtggaggatgaagactgggacatatcatccctagaggaagagatatctttgggaaaaaaatctgggaaagaacagaaggaacctccacctgcgaaaaatgaaccacattttgctcatgtgctaaatgcctggggcgcatttaatcctaaggggccaaagggagaaggacttcaagaaaatgaatcaagcacattaaaaagcagcttagtaactgtgactgattggagcgacacttcagatgtctaattccacatgtcagaagattattccagaagccagcagtatttcagtatcacagtgtttcagtaatttgcctccatgattctagtgcttctgccttaccgtgtttcccacagcaacacagagactgattcaaagaacaatggtctctttaatggcacccaatacagtattgaaaatcagatcatcaacagtatttcgaagcatgtaaaggtgtttaagacttccgctgctgcttaaaaataacatgtcattgaagtcataaaaagttttttcttcagaaaggtactctagtgttaagtgtatttttttcaactaattttttagtgaattttttttaaacttacagcatgttttggtttgaattactaaaactttaaaaaatatttttcttatgtatgctgtcgtatcgtaggcgtttatattataaaattctgttagtagtcttaaaattgaattggtggaaccactaatccttaaaagttagtctggttatttttcatatagaagtaagtttaatccgagtgtggtggtgttcacctttaatcccagctacttgggaggctgaggtgggaggataacttgagcacaggagttcaagaccagcgtgggcaatatagcaagactccacccctccacaccccaaaaaagtaagtttaggattagaatatagctaggtccaatgttaaatacattttcctggagtacatttgtcacattcagctttgagccactgtaagcatgttactattaaatggttggttattttatatagcatattctttatcttggatattttatgaataaagtatagttattttaagtgccaattaatttatcagactaaatagaaaatatttgagccattactgaattcacatatgtatgtttttttttactatttaaaatacccaacatgtattatgaaatacctcaaaagtaatttagttacattcttaaacaatgacattgtcgaaagaaagttcttataagctgttttttgcatttttataacttggttatactatattctgtttccaagtaaccttttaactaaaagatttgttgggttttagatctcttttcatttgtcaaccttttcagtaaagccctctgttacatcactgtgactgtggctgtgttattagagatgaattctgagttaaatttgtacttattaggggtcttacagagggagaatctggccttgattgctatgccatatgacattctgtcctaatggttagaacaaatctttatctgtttccacccaccctgggatcctttttacttgtagcccattcctgccctctaaaagaatccttccaacttcctataggggccatttcatgcagatatactcactttatatgtatgtttctaaaagctttagtgaaggctgaatccaagtttcatgtagtaggacagagaacagaaggccgaatccaagtttcatgtggtaggacagagaacggcaatctacaaaactacaccaagcctaagatggcccatgtgccactttgttcattcatttatttattcagcagatatttattgaaccacttggtctggtttggttttgaacacgcactaattcatttaattacaacaactttgcgatgtagttattgttataatcctcatcctaaaggtgtgagaaacagagttattaagtaagttgccagaagccatacaagtacaaagtgtcaaggggagactttaagccaggtctctattccatgttttgtgtctgccatgttttcattcctgagcagaagagcttggggaaatgaacttttgctaagtaaacccagtatttaaattaagtcactatatctgtgtcttttaagagcccctcctttagcttacatggttagttgtatctttttttttttttttttttgagacagagtctcactatgttgcccaggcttgagcgcagtggcaccatctcggctcactacaacctccgcctcccagattcaagcgattttcctgcctcagcctcccaagtagctgggattacaggtgcccaccaccatgcctggcttaattttttgtatttttagtagagatgaggtttcaccatgttggccagactggtctcgaactcctgacctcaaatgatccgctgtcttgtcctcccaaagtgctgggattataggcgtgagccatcgcgccctgctgcatttcatttttttgtataaaatttggtttgttcgtttttgaggggaaccattcctttatgttgccccttactgatgcccaactaatgtgtttctggttactaacagaccttcatcccccaccctccctaaattcttcggtgtaatctaagcgttatctgcaccacttctgaataataaatgtgtttgaaatgcacacctacacaaccctgtcccacactggcctgtaggacctaatctaccttcatgtctttcagttgatttgtatttctgcaaaagatatttcaaggattatcaaggtatggaattttttttattttttatcttttaacaaacttgttcatttccttttctttccattgagcacctctgaacaatgtgattcttttttttaagtctttcacacttcaggaaaatactacattcacccacgttgtgattcatatcggacagtttcttactcaaagataacacaaataccaattcttattcatactttgaaactatattttaccctagactgccttggttcaaaggcctagtttcgacattactgtggcaaattatttaagctctctgttttcatttctttttctgtaaatgcaggatgaaaacaatatgtatctcctaggatggctgtgaggagtgagtgagacaggacatgaaaggtgtgtatgaactgtgataactgttgcccttgtgggcatgttatatagggctggctctaggaagaagcctgtgtcttttttcagaaatccctggagcaacttaaatgtctttagaaatgacaagtctctcagttatccagttagccgtaaacaggttctggaagacacacctagatagaactcggcccgtcagttctgagtgaggcacgtaccacttgggcttgggatgtccttaacccatttatgcctgaggttgcaattttttgaatttttccaatcacaccttggcgatgaccttgagcagtaggatataaataactcccacatgcttagtgttccaataatggaacactaggcataaacaggttttaattggctcctcagtcaaccatgaccaatatctctatctcagcttctgctgatgccctagctcagggctctgcattccgtgccagggacgcctcagccccttaacatggatgtgccacatgacaggcaataatatattggccccattagcccttcctggagcagtcataatgaattacagtcatgacaggcacatgtaagaaaccaaaatttgctaaatatgtacatgagtcttcatcacagcatcgtttatgaaaacaactaaatattcactaatggtgccagtggaataaatcagagaacatcccctgctacgtaactctctgcatacatcaaagagaatggtgtggctttgctttttcaacaatctactgagtggccatgggcatgtggatatggccatgaatgagcaagatcctctctgatcctgtagaagttaagttctaccagataacttgctgcttcaacaaaaagatttacctttttaaataaatgttgtagaatacttaaaaaaaacaaactagaatttgcctgtgtgcagccagtaacatgtctatttaacctggacaccttttgaggaatattctcagattgcccccatgctgtttataagacattgttccttatacacctgtttatgaatgaaaagaaacataaggagtgggtacaaagacttctatctatgaatgattaaaaaggctagagtacgaatacttcttgaacctttggtactaaatgcttttcatgttctatataaatgtagaaaacattttacaaatcctgtaaataaactgtttattttttatagaaagcc

SEQ ID NO: 1288 - DNA, 2404 bp, Homo sapiens
  source 1..2404: mol_type = genomic DNA
agacccgtcaaaacaattgcctcgagcggcagccatcatggatttaaaggggcagtaccggcaagagcggcagccacaccggcagattgcagaccgggcaaggtcccccaggccaggatgtcaggcctggtgttggggcagcgggatgagcctgcaggccaccggctcagccaagaggagatcctggggagcacacggctggtcagccaagggctagaggccctacgcagtgaacaccaggccgtgctgcaaagcctgtcccagaccattgagtgtctgcagcagggaggccatgaggaagggctggtgcatgagaaggcccggcagcttcgccgttctatggaaaacattgagctcgggctgagtgaggcccaggtgatgctggctctagccagccacctgagcacagtggagtcggagaaacagaagctgcgggctcaggtgcggcggctatgccaggagaaccagtggctgcgggatgagctggctggcacccagcagcggctacagcgcagtgaacaggctgtggctcagctggaggaggaaaagaagcacctggagttcctggggcagctgcggcagtatgatgaggatggacatacctcggaggagaaagaaggcgatgccaccaaggattccctggatgacctctttcctaatgaggaggaagaggaccccagcaatggcttgtcccgtggtcaaggtgctacagcagctcagcagggtggatatgagatcccagcaaggttgcggacgttgcacaacctggtgatccagtacgcagcccaaggtcgctatgaggtggccgtgccactctgtaagcaggcactagaggacctggagcgcacatcaggccgtggccaccctgatgtcgccaccatgctcaacatccttgctttggtgtatcgtgaccagaataagtataaggaagctgcccacctgctgaatgatgcccttagcatccgggagagcaccttgggacctgaccatcctgctgtggctgccacactcaacaatttggctgtgctctatggcaaaaggggcaagtacaaggaggcagagcctctgtgccagcgggcactggagattcgagaaaaggtcctgggcacgaatcatccagatgtggcaaaacagctgaacaacctggccctcttgtgccaaaaccagggcaagtatgaggccgtggaacgctactaccagcgagcactggccatctacgaggggcagctggggccggacaaccctaatgtagcccggaccaagaacaacctggcttcctgttacctgaaacagggcaaatatgctgaggctgagacactatacaaagagatcctgacccgtgcccatgtacaggagtttgggtctgtggatgatgaccacaagcccatctggatgcatgcagaggagcgggaggaaatgagcaaaagccggcaccatgagggtgggacaccctatgctgagtatggaggctggtacaaggcctgcaaagtgagcagccccacagtgaacactactctgagaaacctgggagctctgtataggcgccagggaaagctggaggctgctgagaccctggaggaatgtgccctgcggtcccggagacagggcactgaccctatcagccagacgaaggtggcagagctgcttggggagagtgatggtagaaggacctcccaggagggccctggagacagtgtgaaattcgagggaggtgaagatgcttctgtggctgtggagtggtccggggatggcagtgggaccctgcagaggagtggctctcttggcaagatccgggatgtgctccgcagaagcagtgaactcttggtgaggaagctccaggggactgagcctcggccctccagcagcaacatgaagcgagcagcctccttgaactatctgaaccaacctagtgcagcacccctccaggtctcccggggcctcagtgccagcaccatggacctctcttcaagcagctgacattcaacccggcccccaggtctgctgggtccccccacccccacagccctcacagcattccccattgctcctggctcttccccacccctaggtgggacagtgaaggggagcagtttaaccagaagattgctgctgcccttagggtctcagctccctcctcaggaatccctcttaggaaggaccctcaggacaccctctctgcaccctgtggtcctctagagtagctagctctgaggccccaaggtgggtacaaagcaggtatggccctcagagatgcagcctgctgctggcttttcagtcagagggttgggggctggccagccaagctgccttgccctggccgctcttactccctccctctgctgtctcacttcaggtccatgtatttcacttttcttaaataaaagaatcaggtaacctttctgtg

SEQ ID NO: 1289 - DNA, 1744 bp, Homo sapiens
  source 1..1744: mol_type = genomic DNA
gcacatttggctatttttcaaagagagcatgtagttcaagaaatggcttattttgttttttattcttctttttgtggtctatttaggaaaacaaaatgaaggaacagctaccggacctgcatagccatttttctgatctgaacctggaagctcatatgtatgcatcccagtggtttctcactctttttactgccaagttcccactctgcatggtgttccacatcattgacttactgctttgtgagggtttgaacataatctttcatgtagctttggctctcctaaagacctcaaaggaagaccttctgcaggctgattttgaaggtgctttaaagttctttagagttcagcttccaaagagatacagggcagaggaaaatgcaagaagactgatggagcaggcttgcaatattaaagtaccaaccaagaagctgaagaaatatgagaaagaatatcagacaatgcgagagagtcagctgcaacaggaagacccaatggatagatacaagagggagaaccgaagattacaggaggccagcatgaggttggaacaagagaatgatgaccttgcccatgaactagtaacaagcaaaattgctctacggaatgacttggatcaggcagaagacaaggcagatgtgttgaataaagagctccttttgaccaaacagaggctggtggagactgaagaggagaagaggaagcaagaggaagagactgcccagctaaaagaagtcttcaggaaacagctagagaaggcagaatatgaaataaagaagactacagctatcattgctgagtataaacagatctgttcgcagttgagtaccaggctggagaaacagcaagcagccagcaaggaggagctggaagtggtaaagggtaagatgatggcatgcaaacactgcagtgacattttcagcaaggagggtgctttgaaactagcagccacaggcagagaggaccagggaattgaaacagatgatgagaaggactcacttaagaagcagctgagagagatggaactggaactggcacaaaccaaactgcagttggtggaggccaagtgtaaaattcaggaacttgaacatcagagaggagcccttatgaatgaaatccaagctgcgaaaaactcttggtttagcaaaaccctgaactctatcaaaacggccacgggcacccagccattgcagccagcaccggtcacccagccacccaaggagagcacatagttccagccttacccaagcacaagagcacaatgttcaaaccaatggaaatctgggaggattcttcctggtgtccctttgaaggaaagtcaaggaggccagaaaacaagccagaatttttcagtagctctcactctttcttgtatgacacttttcaaagggatgctatttaaactgacctgttctatgttgaatacctattttccagcttctggaaggccatgttcagatccatcatagtattacacattattttgtttgcctgatgtttagttggaaataagtaattcagaactaaatgcttttttatttagaattattcataattatttttatcttacataaaaatggagacatctgttattccaaggttgaagtgataagaagatctttgtcacaggaaaaaaaaaattgaaacctaaacatcttaagttttcaggatttattcagataaagcacactgtggggccaggcatgaccactctcaggtttcctcctgagcctgattcccaggg

SEQ ID NO: 1290 - DNA, 2904 bp, Homo sapiens
  source 1..2904: mol_type = genomic DNA
gttcgcctctcttcggccctctactcaagagctccgtctccgtctcgccctcctcgaagtcctcgtcgcgcgcccgcgacccaggtcgccctgaaatctagcccgtccgagcgcgagtccaacgccgcggccgcaccaaggccccctcagaccgtgccatgggtgacagtgatgacgagtacgatcgaaggcgcagggacaagttcagaagagagcgcagcgactacgaccgttcccgcgagagagatgaaagacgtcgaggggacgattggaatgacagagagtgggaccgtggccgtgagcgccgtagtcggggtgaatatcgggactatgaccggaatcggcgagagcgcttctcgccacctcgccacgaactcagcccgccacagaagcgcatgaggagagactgggatgagcacagctctgacccataccacagtggctatgagatgccctatgctggggggggtgggggcccaacttatggcccccctcagccctggggccaccctgacgtccacatcatgcagcaccatgtcctgcctatccaggccaggctgggcagcattgcagagattgacctgggtgtgccgccgcccgtgatgaagaccttcaaggagtttctcctctccctggatgactcggtggatgagacggaggccgtcaagcgctataatgactacaagctggatttccggaggcaacagatgcaggatttcttcctggcgcacaaagatgaggagtggtttcggtctaagtaccacccagatgaggtggggaagcgtcggcaggaggcccggggggccctgcaaaaccgactgagggtcttcctgtccctcatggagactggctggtttgataaccttctcctggacatagacaaagctgatgccattgtcaagatgctggatgcagccgtgattaagatggaaggaggcacggagaatgatcttcgcatcctggagcaggaggaggaggaggagcaggcaggaaagcctggggagcccagcaagaaagaagaaggacgggctggagcaggcctaggggacggggagcgcaaaaccaacgacaaggatgagaagaaggaagacggcaagcaggctgagaatgacagttctaatgatgacaaaacaaagaagtcggagggtgatggggacaaggaagagaagaaagaagactccgagaaggaagccaaaaagagtagcaagaagcggaaccggaagcacagtggtgacgacagctttgacgagggcagcgtgtcagagtctgagtcggagtcagagagcggccaggctgaggaggagaaggaggaggccgaagaagcgctcaaggagaaggagaagcccaaggaagaagaatgggagaagcccaaggacgccgcggggctggagtgcaagccgcggccgctgcataagacctgctccctcttcatgcgcaacatcgcgcccaacatctcccgggccgagatcatctccctttgtaaaaggtacccaggctttatgcgggtggcgctctcagagccccagccagagaggaggtttttccgtcgtggctgggtgaccttcgaccgcagtgttaacattaaagagatctgttggaacctgcagaacatccgtctccgggagtgtgagctgagccctggtgtgaacagggacctgacccggcgcgttcgcaacatcaacggcatcacccagcacaagcagattgtgcgcaacgacatcaagctggcggccaagctgatccacacgctggatgacaggacacagctttgggcctcagaaccagggacgcctcccctgcccacgagcctgccctcgcaaaacccgatcttgaagaatatcaccgactacctgatcgaggaagtaagcgccgaggaggaggagctgctggggagcagcgggggcgctcctcctgaggagcctcctaaggaagggaacccggcagagatcaacgtggagcgggatgagaagttgattaaggtcttggacaagctcctcctttacctgcgcatcgtgcattccttggattattacaacacctgtgagtaccccaacgaggacgagatgcccaatcgctgtgggatcatccacgttcgggggcccatgccacccaaccgcatcagtcacggggaagtgctggagtggcagaagacttttgaggagaagctcacgccgttgctgagtgtgcgggagtcactctcagaggaagaggcccagaagatggggcgcaaagacccagagcaggaagtggagaagttcgtcacctccaacacgcaggaactgggcaaggataagtggctgtgtcctctcagtggcaagaaattcaagggtcctgagtttgtgcgcaaacatatcttcaacaagcatgcagagaaaattgaggaagtgaaaaaggaagtcgcgttttttaacaacttcctcactgatgctaagcgcccagctctgcctgagatcaagccagcccagccacctggccccgcccagatactccccccaggtttgaccccaggactcccctacccacaccagactccccagggcctgatgccctatggtcagccccggcccccgatcttgggctatggagctggtgctgtccgccctgcagtccccacaggaggccctccatacccccatgccccgtatggtgctggtcgagggaactatgatgccttccgaggccagggaggttatcctgggaaacctcgcaacaggatggttcgtggagacccaagggccattgtggaatatcgggacctggatgccccagacgatgttgatttcttttgagccgtcccccgttcctcagtcctgtatcatccatacttgtactaccttgtcctatgaagctctgagaattttttgtacgatcagccttactgctaataaaagcacttccacaggg

SEQ ID NO: 1291 - DNA, 3136 bp, Homo sapiens
  source 1..3136: mol_type = genomic DNA
acttcctgccgggctgcgggcgcctgagcggctcttcagcgtttgcgccggcggctgccgcgtctctctcggctcccgcttcctttgaccgcctcccccccccggcccggcggcgcccgcctcctccacggccactccgcctcttccctcccttcgtcccttcttcctctcccttttttccttcttccttcccctcctcgccgccaccgcccaggaccgccggccgggggacgagctcggagcagcagccagaaagcataacccctactgtagaactaaatgcactgtgcatgaaacttggaaaaaaaccaatgtataagcctgttgacccttactctcggatgcagtccacctataactacaacatgagaggaggtgcttatcccccgaggtacttttacccatttccagttccacctttactttatcaagtggaactttctgtgggaggacagcaatttaatggcaaaggaaagacaagacaggctgcgaaacacgatgctgctgccaaagcgttgaggatcctgcagaatgagcccctgccagagaggctggaggtgaatggaagagaatccgaagaagaaaatctcaataaatctgaaataagtcaagtgtttgagattgcacttaaacggaacttgcctgtgaatttcgaggtggcccgggagagtggcccaccccacatgaagaactttgtgaccaaggtttcggttggggagtttgtgggggaaggtgaagggaaaagcaagaagatttcaaagaaaaatgccgccatagctgttcttgaggagctgaagaagttaccgcccctgcctgcagttgaacgagtaaagcctagaatcaaaaagaaaacaaaacccatagtcaagccacagacaagcccagaatatggccaggggatcaatccgattagccgactggcccagatccagcaggcaaaaaaggagaaggagccagagtacacgctcctcacagagcgaggcctcccgcgccgcagggagtttgtgatgcaggtgaaggttggaaaccacactgcagaaggaacgggcaccaacaagaaggtggccaagcgcaatgcagccgagaacatgctggagatccttggtttcaaagtcccgcaggcgcagcccaccaaacccgcactcaagtcagaggagaagacacccataaagaaaccaggggatggaagaaaagtaaccttttttgaacctggctctggggatgaaaatgggactagtaataaagaggatgagttcaggatgccttatctaagtcatcagcagctgcctgctggaattcttcccatggtgcccgaggtcgcccaggctgtaggagttagtcaaggacatcacaccaaagattttaccagggcagctccgaatcctgccaaggccacggtaactgccatgatagcccgagagttgttgtatgggggcacctcgcccacagccgagaccattttaaagaataacatctcttcaggccacgtaccccatggacctctcacgagaccctctgagcaactggactatctttccagagtccagggattccaggttgaatacaaagacttccccaaaaacaacaagaacgaatttgtatctcttatcaattgctcctctcagccacctctgatcagccatggtatcggcaaggatgtggagtcctgccatgatatggctgcgctgaacatcttaaagttgctgtctgagttggaccaacaaagtacagagatgccaagaacaggaaacggaccaatgtctgtgtgtgggaggtgctgaaccttttctggccatgaaccattataaaatcccaacatatatactgaaaatactgaaactgctttgaaaatttggaatttctgatacctccagtgggccgagagacacggtgggtaaaggatgtgggcagcagcagggaagacaacagaaacacaaggaggcggctgtggccgggctggactgtgctggggtttgttgtgatggccactcggtgacctggcggtccctacgcaatagcagctgcctgtggggaagaagggctgcccagccagctggttctcccgggacaccagcagatccacaccctgggcacctccgtgtttggtcttttttttcccctgtgtgaaagaagaaacggcacgaccccttctcaagctggctcactcagacacattgggacaaaccctggacagccatgccagagagaggcctttgaccggccccagagctaaaagcaccagagaaaatcaaatgcttcctactcagcgtgacccaacttttctagtgtgccacggccccaccacctcctgcagtacccacaccatcaccactgctttctcttccaacagtgatctgtattcttagtttcattattttcttttgattgatatgacactatataaaattttcatttgagaatttctcaattgtatctagttaaatagcacagtttggaaacttgtctgagactgactttatcaataatctaaccgacaaagatcatatccatgtgtatgtggttagacatttttatttcattgactaacccaggacagtttcagtgatgcaaattgtgtgccctctggttcagctgaaacagtcctggactttcaaaaaccttgaataagtctcccacagttgtataaattggacaatttaggaattttaaactttagatgatcatttggttccatttttatttcatttttatttttgttaatgcaaacaggacttaaatgaactttgatctctgttttaaagattattaaaaaacattgtgtatctatacatatggctcttgaggacttagctttcactacactacaggatatgatctccatgtagtccatataaacctgcagagtgattttccagagtgctcgatactgttaattacatctccattagggctgaaaagaatgacctacgtttctgtatacagctgtgttgcttttgatgttgtgttactgtacacagaagtgtgtgcactgaggctctgcgtgtggtccgtatggaaagcctggtagccctgcgagttaagtactgcttccattcattgtttacgctggaatttttctccccatggaatgtaagtaaaacttaagtgtttgtcatcaataaatggtaatactaaa

SEQ ID NO: 1292 - DNA, 429 bp, Homo sapiens
  source 1..429: mol_type = genomic DNA
gagtagatatcccggagttccgcgcggcgccagcccttccgccacggccgtctctggagagcagcagccatggccctacgctaccctatggccgtgggcctcaacaagggccacaaagtgaccaagaacgtgagcaagcccaggcacagccgacgccgcgggcgtctgaccaaacacaccaagttcgtgcgggacatgattcgggaggtgtgtggctttgccccgtacgagcggcgcgccatggagttactgaaggtctccaaggacaaacgggccctcaaatttatcaagaaaagggtggggacgcacatccgcgccaagaggaagcgggaggagctgagcaacgtactggccgccatgaggaaagctgctgccaagaaagactgagcccctcccctgccctctccctgaaataaagaacagcttgac

SEQ ID NO: 1293 - DNA, 3792 bp, Homo sapiens
  source 1..3792: mol_type = genomic DNA
atggcgaacgactcccctgcaaaaagtctggtggacatcgacctctcctccctgcgggatcctgctgggatttttgagctggtggaagtggttggaaatggcacctatggacaagtctataagggtcgacatgttaaaacgggtcagttggcagccatcaaagttatggatgtcactgaggatgaagaggaagaaatcaaactggagataaatatgctaaagaaatactctcatcacagaaacattgcaacatattatggtgctttcatcaaaaagagccctccaggacatgatgaccaactctggcttgttatggagttctgtggggctgggtccattacagaccttgtgaagaacaccaaagggaacacactcaaagaagactggatcgcttacatctccagagaaatcctgaggggactggcacatcttcacattcatcatgtgattcaccgggatatcaagggccagaatgtgttgctgactgagaatgcagaggtgaaacttgttgactttggtgtgagtgctcagctggacaggactgtggggcggagaaatacgttcataggcactccctactggatggctcctgaggtcatcgcctgtgatgagaacccagatgccacctatgattacagaagtgatctttggtcttgtggcattacagccattgagatggcagaaggtgctccccctctctgtgacatgcatccaatgagagcactgtttctcattcccagaaaccctcctccccggctgaagtcaaaaaaatggtcgaagaagttttttagttttatagaagggtgcctggtgaagaattacatgcagcggccctctacagagcagcttttgaaacatccttttataagggatcagccaaatgaaaggcaagttagaatccagcttaaggatcatatagatcgtaccaggaagaagagaggcgagaaagatgaaactgagtatgagtacagtgggagtgaggaagaagaggaggaagtgcctgaacaggaaggagagccaagttccattgtgaacgtgcctggtgagtctactcttcgccgagatttcctgagactgcagcaggagaacaaggaacgttccgaggctcttcggagacaacagttactacaggagcaacagctccgggagcaggaagaatataaaaggcaactgctggcagagagacagaagcggattgagcagcagaaagaacagaggcgacggctagaagagcaacaaaggagagagcgggaagctagaaggcagcaggaacgtgaacagcgaaggagagaacaagaagaaaagaggcgtctagaggagttggagagaaggcgcaaagaagaagaggagaggagacgggcagaagaagaaaagaggagagttgaaagagaacaggagtatatcaggcgacagctagaagaggagcagcggcacttggaagtccttcagcagcagctgctccaggagcaggccatgttactggagtgccgatggcgggagatggaggagcaccggcaggcagagaggctccagaggcagttgcaacaagaacaagcatatctcctgtctctacagcatgaccataggaggccgcacccgcagcactcgcagcagccgccaccaccgcagcaggaaaggagcaagccaagcttccatgctcccgagcccaaagcccactacgagcctgctgaccgagcgcgagaggtggaagatagatttaggaaaactaaccacagctcccctgaagcccagtctaagcagacaggcagagtattggagccaccagtgccttcccgatcagagtctttttccaatggcaactccgagtctgtgcatcccgccctgcagagaccagcggagccacaggttcctgtgagaacaacatctcgctcccctgttctgtcccgtcgagattccccactgcagggcagtgggcagcagaatagccaggcaggacagagaaactccaccagtattgagcccaggcttctgtgggagagagtggagaagctggtgcccagacctggcagtggcagctcctcagggtccagcaactcaggatcccagcccgggtctcaccctgggtctcagagtggctccggggaacgcttcagagtgagatcatcatccaagtctgaaggctctccatctcagcgcctggaaaatgcagtgaaaaaacctgaagataaaaaggaagttttcagacccctcaagcctgctgatctgaccgcactggccaaagagcttcgagcagtggaagatgtacggccacctcacaaagtaacggactactcctcatccagtgaggagtcggggacgacggatgaggaggacgacgatgtggagcaggaaggggctgacgagtccacctcaggaccagaggacaccagagcagcgtcatctctgaatttgagcaatggtgaaacggaatctgtgaaaaccatgattgtccatgatgatgtagaaagtgagccggccatgaccccatccaaggagggcactctaatcgtccgccagactcagtccgctagtagcacactccagaaacacaaatcttcctcctcctttacaccttttatagaccccagattactacagatttctccatctagcggaacaacagtgacatctgtggtgggattttcctgtgatgggatgagaccagaagccataaggcaagatcctacccggaaaggctcagtggtcaatgtgaatcctaccaacactaggccacagagtgacaccccggagattcgtaaatacaagaagaggtttaactctgagattctgtgtgctgccttatggggagtgaatttgctagtgggtacagagagtggcctgatgctgctggacagaagtggccaagggaaggtctatcctcttatcaaccgaagacgatttcaacaaatggacgtacttgagggcttgaatgtcttggtgacaatatctggcaaaaaggataagttacgtgtctactatttgtcctggttaagaaataaaatacttcacaatgatccagaagttgagaagaagcagggatggacaaccgtaggggatttggaaggatgtgtacattataaagttgtaaaatatgaaagaatcaaatttctggtgattgctttgaagagttctgtggaagtctatgcgtgggcaccaaagccatatcacaaatttatggcctttaagtcatttggagaattggtacataagccattactggtggatctcactgttgaggaaggccagaggttgaaagtgatctatggatcctgtgctggattccatgctgttgatgtggattcaggatcagtctatgacatttatctaccaacacatatccagtgtagcatcaaaccccatgcaatcatcatcctccccaatacagatggaatggagcttctggtgtgctatgaagatgagggggtttatgtaaacacatatggaaggatcaccaaggatgtagttctacagtggggagagatgcctacatcagtagcatatattcgatccaatcagacaatgggctggggagagaaggccatagagatccgatctgtggaaactggtcacttggatggtgtgttcatgcacaaaagggctcaaagactaaaattcttgtgtgaacgcaatgacaaggtgttctttgcctctgttcggtctggtggcagcagtcaggtttatttcatgaccttaggcaggacttctcttctgagctggtagaagcagtgtgatccagggattactggcctccagagtcttcaagatcctgagaacttggaattccttgtaact

SEQ ID NO: 1294 - DNA, 4955 bp, Homo sapiens
  source 1..4955: mol_type = genomic DNA
gtgctgtggcggcggcggcggcggtagtggcggcggcggcggtgcctgggcggcagcagcagcagtagcggcagccctgaggacggtgagacggccgcggcggcggcgacagcgcggaagtcgcgcgggacccagagcttcccccctgtcgctagtgctgaggctttcgcctttcctacccagcttcttgctcacggcccgggctgggctgggcagggcaacgcgcccccggggaggggcggagctgtagatatggtgtaagatacttcttcaagattggacagctggggaccttcttctgattaaccttaaaccaacttgtagccatagagacacctcacaaggttcccatttttgttgttgttgttgttgattttctgctcacacctttcctgaccttgcaaccatgtatggaagtgcccgctctgttgggaaggtggagccgagcagccagagccctgggcgttcacccaggcttccacgttcccctcgcttgggtcaccgtcgaaccaacagtacgggagggagttcgggaagcagtgttggaggtggcagtgggaaaaccctttcaatggaaaatatacaatctttaaatgctgcctatgccacctctggccctatgtatctaagtgaccatgaaaatgtgggttcagaaacacctaaaagcaccatgacacttggccgttctgggggacgtctgccttacggtgttcggatgactgctatgggtagtagccccaatatagctagcagtggggttgctagtgacaccatagcatttggagagcatcacctccctcctgtgagtatggcatccactgtacctcactcccttcgtcaggcgagagataacacaatcatggatctgcagacacagctgaaggaagtattaagagaaaatgatctcttgcggaaggatgtggaagtaaaggagagcaaattgagttcttcaatgaatagcatcaagaccttctggagcccagagctgaagaaggaacgagccctgagaaaagatgaagcttccaaaatcaccatttggaaggaacagtacagagttgtacaggaggaaaaccagcacatgcagatgacaatccaggctctccaggatgaattgcggatccagagggacctgaatcagctgtttcagcaggatagtagcagcaggactggcgaaccttgtgtagcagagctgacagaggagaactttcagaggcttcatgctgagcatgagcggcaggccaaagagctgtttcttcttcgaaagacattggaggaaatggagctgcgtattgagactcaaaagcagaccctaaatgctcgggatgaatccattaagaagcttctggaaatgttgcagagcaaaggactttctgccaaggctaccgaggaagaccatgagagaacaagacgactggcagaggcagagatgcacgttcatcacctagaaagccttttggagcagaaggaaaaagagaacagtatgttgagagaggagatgcatcgaaggtttgagaatgctcctgattctgccaaaacaaaagctctgcaaactgttattgagatgaaggattcaaaaatttcctctatggagcgtgggcttcgagacctggaagaggaaattcagatgctgaaatcgaatggtgctttgagtactgaggaaagggaagaagaaatgaagcaaatggaagtgtatcggagccattctaaatttatgaaaaataagattggccaggtgaaacaggagctgtccagaaaggacacagaactactcgccctgcagacaaagctagaaacactcacaaaccagttctcagatagtaaacagcacattgaagtgttgaaggagtccttgactgctaaggagcagagggctgccatcctgcagactgaggtggatgctctccgattgcgtttggaagagaaggaaaccatgttgaataaaaagacaaaacaaattcaggatatggctgaagagaaggggacacaagctggagagatacatgacctcaaggacatgttggatgtgaaggagcggaaggttaatgttcttcagaagaagattgaaaatcttcaagagcagcttagagacaaggaaaagcagatgagcagcttgaaagaacgggtcaaatccttgcaggctgacaccaccaacactgacactgccttgacaactttggaggaggcccttgcagagaaagagcggacaattgaacgcttaaaggagcagagggacagagatgagcgagagaagcaagaggaaattgataactacaaaaaagatcttaaagacttgaaggaaaaagtcagcctgttgcaaggcgacctttcagagaaagaggcttcacttttggatctgaaagagcatgcttcttctctggcatcctcaggactgaaaaaggactcacggcttaagacactagagattgctttggagcagaagaaggaggagtgtctgaaaatggaatcacaattgaaaaaggcacatgaggcagcattggaagccagagccagtccagagatgagtgaccgaatacagcacttggagagagagatcaccaggtacaaagatgaatctagcaaggcccaggcagaagttgatcgactcttagaaatcttgaaggaggtggaaaatgagaagaatgacaaagataagaagatagctgagttggaaagtctcacctcaaggcaagtgaaagaccagaataagaaggtagcaaatctgaagcacaaggaacaggtggaaaaaaagaagagtgcacaaatgttagaggaggcgcgacgacgggaggacaatctcaacgacagctctcagcagctacaggtggaggagttactgatggccatggagaaggtaaagcaggaactagaatccatgaaagcaaagctgtcctccacccagcagtctctggcagaaaaggaaactcacttgactaatcttcgggcagagagaaggaaacacttagaggaagttctggagatgaagcaagaagctcttctggctgccattagtgaaaaagacgccaatatagctctcttggagctttcgtcctctaagaagaagacccaagaggaagtggctgccctgaagcgggagaaggatcgtctggtacagcagcttaagcagcagacgcaaaatcgaatgaagctaatggccgacaactacgaggatgaccacttcaaatcctcccattccaatcaaacaaatcacaagccctccccagaccaggatgaggaggagggtatatgggcatagccaatcagaggcttagttcagccattttgttcagaacgatcatccagcccctcttagaacttgaccaaaatagaagtaaattaaagttgtacattggacacctgacaaccctctgccatgaccgagaccccctgatcctccgtggactcactccaccagcttcctataacttggacgatgaccaggcggcttgggagaatgagctgcagaagatgacccgggggcagcttcaggatgagttagagaaaggtgaacgggacaatgcagaactgcaggagtttgccaacgccattcttcagcagatagcagaccattgtcccgacatcctagagcaagtggtcaacgccctggaagagtcctcttgaccctgctttatggggaagcctgaggtagtcaacccaggagccaagaaaagagaactacgaggaacaggtgcccggaaccttcttggcaccaaacactacaaacttcatcccaacttgctcacttgaagaagtgtgattccagcaccgtttctacatctgccatcttactctgcctttctgctttggatgtggtctctacactaaccttcttgatgtccagggtagataaagggtcgaatctctctgaagaactgccacctggtcatcagcagtggagaactgtgggagctggtggctctgccctgacagagagccatggagcagaggagcctctcacctcctgtcctctgacatgagaatgaaaccaggaatggacttggagttcaacaggctgagaggatgcctccaatggaccagagagctgagtgttctaatatcacaataggtgctttctcctaaaagggcaaaaaacaatctcaaaaagattagaaaaagagaaggggggaagggaagagaaaatcgactcttctttttactgtctcttctgcttactttccacatgagatgctttgtaccggggagctgtgagcaggcctcacgatggcttgggagcactcgttctcccaaggtctgagtcttcatccagccctgcctgtctgtcgcagccttcctcactctgttcctcggccagttaacaagaagatggtgtgaggtgttctccaccagtctctcctgtttgagactgttgacgttatcatactgaggtgttagatcaaatatctctaattgaagaacatgtgaggttgaaagagcaccagccagggcaacatagcgtgaccctgtctctacaaaaaattaaaaagagaacatacaaagttgacatatgagaccctgttgtccccgcctgcagctttgccccagtaacagatgcccgttgctcttgggctggtttcccctgaacacctccaagaggctgcctgccttgccagcacccgtgtcctgagctcctgcagcccagtggctgctgaagttgtgatccctcactcaccctgctagctttgcccttgactcgtcttctctgaacctcagcctcgtgcattgcctggaaccttcttctagcataaatgaaggtttttcctcctacacacattccttcctcggttatttcattcagagaatatttatgaaatgcctactgtgtgcaagtcatccatccttgaaaaggccacttctcagtgagggagagatgtagtggattctgtgagacatacctgctggagttgaagcagtaaatagcatgtccttcccctccccgatcttaaggtgtgttttctaga

SEQ ID NO: 1295 - DNA, 2998 bp, Homo sapiens
  source 1..2998: mol_type = genomic DNA
gccggcgggatcccaggcgccgagcgcccgctgagcagccaccctttgcgcgccgcctgcagcgcagcttccccgggcgctgcctggacaggcctgcctgcgtgctgggacatgtctggcctccaaggaccgtcggtgggcgatggctgcaacggtggaggggccagagctggaggcagctgctgccgcaggagatgcttcagaggattcggacgcagggtccagggcgctgcctttcctgggcggcaaccggctgagcttggacctgtaccccgggggctgccagcagctgctgcacctgtgtgtccagcagcctctgcagctgctgcaggtggaattcttgcgtctgagcactcacgaggaccctcagctgctggaggccaccctggcccagctgcctcagagcctgtcctgcctccgctccctggtcctcaaaggagggcaacgccgggacacactgggtgcctgtctccggggtgccctgaccaacctgcccgctggtctgagtggcctggcccatctggcccacctggacctgagcttcaacagcctggagacactgccggcctgtgtcctgcagatgcgaggtctgggtgcgctcttgctgtctcacaactgcctctctgagctgcctgaggctctgggggccctccccgccctcaccttcctcacagtgacacacaaccgcctgcagacgctgcccccagcactgggggccctatccaccctgcagcgcctcgatctctctcagaatctgctggacacgctacctcctgagattggaggcctgggcagcctcctggagctcaacctggcctccaaccggctgcagagcctcccagcctctctggcgggacttcggtccttgcggctccttgtcctgcacagcaacctcctggcctctgtgccagctgacttggcccgccttccactcctcacccggctcgacctgagggacaaccagctccgggacctgccccctgagctgctagacgccccctttgtgcgcctgcaggggaaccccctgggtgaggcctcgccagacgccccgagttcaccagtggcagccctcattccagaaatgcccagactgttcctgacctcagatttggacagctttcctgtgacccctcaaggctgctcagtgaccctggcctgtggcgtccgcctgcagttcccagcgggagccaccgccacccccatcaccatccgctatcggctgctgctgccggagccaggcctcgtccccctgggtcctcatgacgccctgctcagccatgtgctggagctgcagccccatggggtggccttccagcaggatgtggggctgtggctgctcttcaccccaccgcaggcccggcgctgccgtgaagtggtggtcaggacccggaatgacaacagctggggtgacctggagacctacctggaggaagaggcaccccagcggctctgggctcactgccaggtgccccacttctcctggttccttgtggtttcccgccctgtgtccaatgcctgcctggtgccaccggaggggacactgctgtgctcctcgggtcatcctggggtcaaagtcatcttcccccctggggccactgaggagcctcgtcgagtctccatgcaggtggtgcgcatggctggccgagagctgcaggccctcctgggagaaccagaggctgcagtgagccccctgctgtgcctgtcacagagcggtccccccagcttcctccaaccggtcaccgtgcagctgcctctgccctctggcatcacaggcctcagtctggaccgctcccgcctgcacctgttgtactgggcccctcctgcagccacctgggatgacatcacagctcaggtggtcctggagctcacccacctgtacgcacgcttccaggtcacacacttctcctggtactggctctggtacaccaccaagaactgtgtgggaggcctggctcggaaggcctgggagcggctgcggctgcaccgtgtgaacctcatcgctctgcagcggcgccgggaccctgagcaggtcctgctgcagtgcctgccccgaaacaaggtggacgccacccttcggcggctgctggagcggtaccggggccccgagccctctgacacggtggagatgttcgagggcgaagagttctttgcggccttcgagcgcggcatcgacgtggatgctgaccgccctgactgtgtggagggcagaatctgctttgtcttctactcgcacctgaagaatgtgaaggaggtatacgtgaccaccactctggaccgggaggctcaggctgtgcggggccaggtgtccttctaccgtggcgcggtgcctgtgcgggtgcccgaggaggctgaggctgcccggcagaggaagggcgcagacgccctgtggatggccactctgcccatcaagctgccgagacttcgagggtccgaggggccacggcggggggctggcctctccttggcacccttgaatctgggagatgccgagaccggctttctgacgcagagcaacctgctgagtgtggctgggcgtctgggtctggactggccagccgtggccctgcacctgggggtgtcctaccgggaggtgcagcgcatccggcacgagttccgggatgatctggatgagcagatccgtcacatgctcttctcctgggctgagcgccaggctgggcagccaggggctgtggggctcctggtgcaggccctggagcagagtgaccggcaggacgtggctgaagaggtgcgcgcagtcttggagctcggccgccgcaagtaccaggacagcatccgacgcatgggcttggcccccaaggaccccgctctgcctggctcctcggctccacagcccccagagcctgcccaggcctaggccccacagacttttaggctggcccagatattccccagtggatgggcagagcccccaccttcaagtctctccagtgtgtggggacgggtccctgtgagcaacaaaactgcactgtttctttca

SEQ ID NO: 1296 - DNA, 5913 bp, Homo sapiens
  source 1..5913: mol_type = genomic DNA
agagccctagtgtcgtgctctcctcggtaggggaggaattggttaggcggcggcggcggcgaagcggcggcggcggctgtaggggagcagcggcagtggcggcgacggcgaggaggtgttcggtttgcgcagcgtagaaacgcccgcagcttcagagaaggagttcttgtgggaccaaattaggcattctgaacccacgccggcttagctgggccgagtccaggcgctgccgcacgtacagttttggtggcggtgacagacactgttcttgactctaggggcctattaggccgacgtctgaggcgcagatcgctggctctcgacgcattactctttacgccttacatttctgtcttccttcctgggtcagtgattcccggaccctggaagagaagagggtggctaatgattaaggctttccttaaagtttcccatgtctcaatggactcctgaatataacgagctctacaccttaaaagtggatatgaagagtgagattccttctgatgcaccaaagacacaggagagtctgaaagggatccttttgcatccagagcccattggggcagccaaaagttttcctgcaggagttgagatgattaatagtaaagtggggaatgaattctctcacctgtgtgatgattctcaaaagcaagagaaggaaatgaatggtaaccagcaagaacaagaaaaaagtctcgttgtgaggaaaaaacgcaaaagccagcaggctggcccttcgtatgtgcagaattgtgttaaagaaaaccagggaatattaggactgaggcaacacctagggacaccaagtgatgaagataatgattcctcttttagtgattgtctttcttctccttcatctagtctgcattttggagattctgatactgtgacttcagatgaggataaagaagtctctgtaagacattcccagaccattttgaatgctaaaagtagaagccatagtgcacggtctcataagtggcctcggactgagacagaatctgtatcgggattgttaatgaaaagaccctgtttacatggcagttcgttacggagacttccatgcagaaagagatttgtaaaaaataattcctcacagaggacacagaaacaaaaagagaggatattaatgcagaggaagaaacgagaagtgttagctcgaagaaaatatgccttgctacctagttctagtagttccagtgagaatgacctcagcagtgaatcctcttctagctcatcaactgaaggagaagaagatttgtttgtttctgccagtgaaaaccaccaaaacaatccagctgttccctcaggaagtattgatgaagatgttgtggtgatagaagcttcctccactccccaggttactgccaatgaagaaattaatgttacctcaactgacagtgaagtggagattgtaacagttggagaaagctatcggtctcgttcaacccttggacactccagatctcattggagccagggttccagttctcatgcaagtcggccacaggagccacggaaccgcagtaggatttctactgttatacagcccttgaggcagaatgcagcagaagttgtggaccttaccgttgatgaagatgaacctactgtagtaccaaccacttctgcaagaatggaatcacaagctactagcgcttccattaacaattcaaatccatctacctctgagcaggcctctgatactgcttcagctgtcaccagtagccaaccttccacagtgtcagagacttcagctactcttacaagcaatagtaccactggcacttctataggagatgactcaaggagaactacatctagtgctgtaacggaaactggccctcctgcaatgccaaggttaccttcctgctgtccccagcactcaccatgtggagggtcgtcacagaaccaccatgcattaggacatcctcatacaagttgctttcagcagcatggtcaccattttcaacatcatcaccaccaccaccatactccccacccagctgtcccagtttctccttcctttagtgatcctgcttgccctgtggaaagacctccacaagtacaagcaccttgtggagcaaatagtagttctggtaccagctatcatgaacagcaggcattgccagtggacctgagcaacagtggtatcagaagtcatggaagtggcagttttcatggagcatctgcatttgacccctgctgccctgtttcttcctcccgagctgcaatctttggccatcaggccgctgctgctgccccaagtcaacctttatcatcaatagatggctatggatcaagcatggttgcgcagccccagccccagccccctccacagccctctctctcatcatgtcgacattacatgccacccccttatgcctctttgacaaggccacttcatcatcaagcttctgcctgcccgcattctcatggaaacccccctcctcagactcagcctccgcctcaagtggattatgttattcctcatcctgtacatgctttccattctcaaatatcttctcatgcaacatctcatcctgtggcacccccaccaccaactcacttagccagtacagctgcaccaatccctcagcatcttcctcctacacaccagccaatttcgcaccatattccagccacagcacctccagcacagagactgcatcctcatgaagtgatgcagaggatggaagttcaaaggaggaggatgatgcagcatccaacgcgggcacatgaacgccccccaccccatccacataggatgcacccaaactatggtcatgggcatcatattcatgtgcctcagactatgtcctcacatcctcgacaggctccagagaggtctgcctgggaactgggaattgaagctggagtgactgcagctacttatacacctggtgcattgcatcctcacttggcccattatcacgcacctcctcgacttcatcacttacaattaggagctcttcctttaatggttcctgatatggcaggctatcctcacatccgttacatttcatcaggattggatggaacatcattcagaggtcctttcaggggcaattttgaggaactgattcatttggaagaaagattaggcaatgtcaatcgtggagcatcccaggggacaattgaaagatgtacatatccacataaatacaaaaagaggaaactgcactgcaaacaagatggggaagaagggactgaggaagacacagaggaaaaatgtactatctgtttgtctattttagaggaaggtgaagatgtgagacgtcttccatgtatgcaccttttccaccaagtgtgtgttgaccaatggttgattaccaataagaagtgccccatatgcagagtggacattgaggcccagctgccaagtgaaagttgacaccatgtttcagaactcttgccctccctctcattcccatccttcctggtactgcagtcaaccaaagatggcatgacttacctgcgcagatttggaagcattgaacttagagtgctggctctgctatatggtacaactaatgctagacctacagtttatgtatacagttgattttgatgtatttataaaagcttttttttctagatttgacatttttctgtatcattttactgtatttttgcatggttccttgtattgcatttctttgcacatattatgggcttgtgaccctaaacttgcaggcaaggttagctgctttagtaagtagaattttgtggtctttttgttttttacatagtaccaagccttgataattatgaattttttatccattactaacctttaatttaatcaatcatgtactttagtttaatgtataaagatcctctagaaaatgataatattgtgtattaagacattccttaattaggacaaaatggctgctgtatatttactatatggagttctgagttaaataccatccttaatactgggaacagaatacaacccatataaatcagatgcaggtggtagtcacatcaccagagtgatcagtataaattttcttggtgtatccttttcctttcaacacagtgcagataagagttgaatattgatatcatacatttagactgctgttctgattgcatttatctttttcctacatcatttagaattttatttccctgattcagtttttgctgctgtgaaacagctctgatgaacactaaatattaatttcaattagctagattgtacatacttgcagatttaacaaaattttagggaaattgaaaaagacatgtagaatttgttgtcttctgctaagcacgaaaagttaagatatctgcttacattgattttgtagacacattaagtcaagatttggaatttaagtcactggcaggtatctgtgcattcatagaacttataaaggtcccaggatcacttttaagggatttttattagtttaaaggtaaataaagtcagctgaatctacatgtctcttgttttatttctctctaaacttgaaaacagtaaatctgcagatactgtgaggcacaaattatactgtcaacctactgttgctatggttatatactcccacttcatacattaccaagagtcgatcactgatttaaaatttttaatttctatagttaagatttactgcataatatagaatataaagttaagttaacatactaacatttctcctttggaggaagttttaatctacttcaggatgcatattattatcaagatactttcatatacaggatagcctaattttatttgtttaaatatgcttaatatgccccagattgcaaatgcatccagtcagtaatatcactgtctgtatgtggaggacatgttcccatggatcatatgtgaagatgtcaataagcttgcattaagccacctgctttgtaagtggattgattaataaataacttatatttctattgtctttgtgtttcataattagtttttataaaaacagtttacattaaacatcttggaattcaacaatagtgatctcactcaaattgacatttgcataatttgacatttatattcattcagttatgactacttgcccttttcttcatattagtaaatgttacactgtagtagttgtcaatgttaacaggcttcaacatagtatgtgtgcagatggacgatggatttaaagagcataccttatgattaaaccgaggttatagaaggtcaggggagagtgaaggagtcagtgacctatgtctgccatcttactggggaaaagagcaagtagcctgtcttcctttaagtaagtagcctgtaatggatgtactactttgccactggaataccccgggtctgtgccaagggactgaagaagtgtaagatggggagaactgtatgtcatggagtcctcttgacgttcccccagatacaagtaaagcacaggtggatttctctatttttgaatactacatcagatttagatgcacgactacctgttgacttgttttataattgctactgatttttttaatgtaggcaaagctttgttactttgaaatttatttaataaaagtatttgtgacataaacctgaattgttaatataggagcttattaagctactgccattagttatcgaaaaatgtgataagtaatgaagaaagtaaggaagaaaatgactttgaacattttgactttttgtgctttgttttggtgtcttccatatcctgctgcatcttatatgtcaaaatgaacatttcagtggtagctgtccaaatacataaaaactaaaattcttttgttagcaagtccttatttttattgttgttaacatgcaagtgataaactgataatttgaaacatttttcttactctggtgactttcttttagctgctagcacacttcagcatttgaaccataacagttgtgataaactgatcgtttgaaacgtt

SEQ ID NO: 1297 - DNA, 455 bp, Homo sapiens
  source 1..455: mol_type = genomic DNA
cttcctctttccctcggagcgggcggcggcgttggcggcttgtgcagcaatggccaagatcaaggctcgagatcttcgcgggaagaagaaggaggagctgctgaaacagctggacgacctgaaggtggagctgtcccagctgcgcgtcgccaaagtgacaggcggtgcggcctccaagctctctaagatccgagtcgtccggaaatccattgcccgtgttctcacagttattaaccagactcagaaagaaaacctcaggaaattctacaagggcaagaagtacaagcccctggacctgcggcctaagaagacacgtgccatgcgccgccggctcaacaagcacgaggagaacctgaagaccaagaagcagcagcggaaggagcggctgtacccgctgcggaagtacgcggtcaaggcctgaggggcgcattgtcaataaagcacagctggctgag

SEQ ID NO: 1298 - DNA, 2502 bp, Homo sapiens
  source 1..2502: mol_type = genomic DNA
cgctttggggttctgtgtgcagcgagcatggtgtccttggcaccagggtttcggcagaggagcctagcgtgggcctacttggactcctccgcgtggggcagctcgggacacccgggcctgcaggagagcggggttctaggctggccccggctctgcagtgcagccgggtgcctgccactcgcggggctctgtcgcagtactcgtgcctggcgcctcccctcagccacagagaccgcagtagctccaaccatcgcacccctaactgggccacgagttctctgattgccagacctgttgtctttgccactcactgttctgagtaattggagagtcgtgtattcactacacgccaaccagagtggtcctgtaaaagcgtaagcctagtgtagatacgcttctgcttaaaactcttgagtggctcccagtgcttttagaacaaaatccaaacgcctttccgaagtcgacaaggcccagcttgattgagcagaagatgtgataggagatgaggagcggggggcttctgcaaaagtgcttcggtcgctcaggcttttggcacattttgcttatgcaacctagttctttctaccttagggccttttcttgggaaagttgggagtctcactctgctgcctaggctgagtgcagtggtgtgatcgaggcgcactgcagccttgacctcctgggctcaagcgatcctcacctcggcctaccgagtagctgggactacaggcacgcgccactacactcggatttctgacagtcagacttgtccacaagaactcaactggcaaggctgcttttctgtgctaaaactggggagctagtgggcaccatgaagatcttctgcagtcgggccaatccgaccacggggtctgtggagtggctggaggaggatgaacactatgattaccaccaggagattgcaaggtcatcttatgcagatatgctacatgacaaagacagaaatgtaaaatactaccaaggtatccgggctgccgtgagcagggtgaaggacagaggacagaaggccttggttctcgacattggcactggcacgggactcttgtcaatgatggcggtcacagcaggtgccgacttctgctatgccatcgaggaaaattgtgaggccgtgccccacagagccaccgtctatgcacagctggtggagtccgggaggatgtggtcgtggaacaagctatttcccatccacgtgcagaccagcctcggagagcaggtcatcgtccctcccgttgacgtggagagctgccctggcgcaccctctgtctgtgacattcagctgaaccaggtgtcaccagccgactttacagtcctcagcgatgtgctgcccatgttcagcatagacttcagcaagcaagtcagtagctcagcagcctgccatagcaggcggtttgaacctctgacatctggccgagctcaggtggttctctcgtggtgggacattgaaatggaccctgaggggaagatcaagtgcaccatggcccccttctgggcacactcagacccagaggagatgcagtggcgggaccactggatgcagtgtgtgtacttcctgccacaagaggagcctgtggtgcagggctcagcgctctatctggtagcccaccacgatgactactgcgtatggtacagcctgcagaggaccagccctgaaaagaatgagagagtccgccagatgcgccccgtgtgtgactgccaggctcacctgctctggaaccggcctcggtttggagagatcaatgaccaggacagaactgatcgatacgtccaggctctgaggaccgtctctctcctcctgggcgagccgttcttcactaccagcctgctgccgtggcacaacctctacttctggtacgtgcggaccgctgtggaccagcacctggggccaggtgccatggtgatgccccaggcagcctcgctgcacgctgtggttgtggagttcagggacctgtggcggatccggagcccctgtggtgactgcgaaggcttcgacgtgcacatcatggacgacatgattaagcgtgccctggacttcagggagagcagggaagctgagccccacccgctgtgggagtacccatgccgcagcctctccgagccctggcagatcctgacctttgacttccagcagccggtgcccctgcagcccctgtgtgccgagggcaccgtggagctcagaaggcccgggcagagccacgcagcggtgctatggatggagtaccacctgaccccggagtgcacgctcagcactggcctcctggagcctgcagaccccgaggggggctgctgctggaacccccactgcaagcaggccgtctacttcttcagccctgccccagatcccagagcactgctgggtggcccacggactgtcagctatgcagtggagtttcaccccgacacaggcgacatcatcatggagttcaggcatgcagataccccagactgaccactcttgagcaataaagtggcctgagggctggg

SEQ ID NO: 1299 - DNA, 1887 bp, Homo sapiens
  source 1..1887: mol_type = genomic DNA
tcctctcctattatgcaaacccacaccatggatccagcagactactctggccccagcatgctgctccttgggatgatgggagaagggggaaacctgtgttttctcttggttttagggtatgggtctacttctttgaacattcgctcagatcgtaaggtaaccccaagaatcggcatcactctctggtctgggcgcctggatagtcacgcatggagtccgcgaggtgctggcgccggagcacgctgggaacgccgggctcccggccggcctgacccggaagggctggcgcatggtaaccccagcttccctagcaaccaagcaggcgcaagaagcaaccagccgcgctatccgctcccgttgctaccggaatgcctcttcaggttagcgattacagctggcagcagacgaagactgcggtctttctgtctctgcccctcaaaggcgtgtgcgtcagagacacggacgtgttctgcacggaaaactatctgaaggtcaactttcctccatttttatttgaggcatttctttatgctcccatagacgatgagagcagcaaagcaaagattgggaatgacaccattgtcttcaccttgtataaaaaagaagcggccatgtgggagaccctttctgtgacgggtgttgacaaagagatgatgcaaagaattagagaaaaatctattttacaagcacaagagagagcaaaagaagctacagaagcaaaagctgcagcaaagcgggaagatcaaaaatacgcactaagtgtcatgatgaagattgaagaagaagagaggaaaaaaatagaagatatgaaagaaaatgaacggataaaagccactaaagcattggaagcctggaaagaatatcaaagaaaagctgaggagcaaaaaaaaattcagagagaagagaaattatgtcaaaaagaaaagcaaattaaagaagaaagaaaaaaaataaaatataagagtcttactagaaatttggcatctagaaatcttgctccaaaagggagaaattcagaaaatatatttactgagaagttaaaggaagacagtattcctgctcctcgctctgttggcagtattaaaatcaactttacccctcgagtattcccaacagctcttcgtgaatcacaagtagcagaagaggaggagtggctacacaaacaagctgaggcacgaagagcaatgaatactgacatagctgaactttgcgatttaaaagaagaagaaaagaacccagaatggttgaaggataaaggaaacaaattgtttgcaacggaaaactatttggcagctatcaatgcatataatttagccataagactaaataataagatgccactattgtatttgaaccgggctgcttgccacctaaaactaaaaaacttacacaaggctattgaagattcttctaaggcctacaggattatgaagcggcacttaagattgatccatccaacaaaattgtacaaattgatgctgagaagattcggaatgtaattcaaggaacagaactaaaatcttaatgactattagaagtaactaagtattgttataagttttttaaaaacaactggaggcatctttgtacatattatggccagttgtacagaatcgctttctgtttagtactttagttctgttgagggcaaaatattataaatctatagaaaataaactgtttgacttgaatcatttctgaataagtaaatctaaataagaatctattttaattccttatttcttcatattaatacatatgtatacttttttgtgttactgaattaagcttgcccttgtaacaaaatatgttttggtatagttaccaggacacttactgattaatttttaacaaggtagaattttaaaataaaagatttataaataa

SEQ ID NO: 1300 - DNA, 5083 bp, Homo sapiens
  source 1..5083: mol_type = genomic DNA
atgtggtcattgacggccagtgagggcgagagtaccacggcccacttcttccttggagctggagatgaggggctgggcacccgtggaataggcatgaggccagaagagagtgacagcgagctccttgaggatgaggaggatgaagtgcctcctgaacctcagatcattgttggcatctgtgccatgaccaagaaatccaagtccaagccaatgactcaaatcctagagcgactctgcagatttgactacctgactgttgtcattctgggagaagatgtaatccttaatgaacctgtggaaaactggccatcctgccactgcctcatctctttccactccaaaggctttcctctggacaaagctgttgcttactccaagcttcgaaacccctttcttatcaatgatctggccatgcagtattacatccaagataggagggaggtgtaccggatcctgcaggaagagggtattgatctgcctcgatatgctgtgctcaaccgtgatcctgcccggcctgaggaatgcaacctgatagaaggtgaagaccaagtagaggtcaatggagctgtctttcccaagccctttgtggagaagccagtgagtgcagaagaccacaatgtttacatctactaccccagctcagctggaggaggaagccagcgtctctttcgtaagattggcagccgaagcagtgtttactctcctgagagcagcgtccgaaagacggggtcgtacatctatgaggagtttatgccaacagatggcacagatgtcaaggtgtatacagtggggccagattatgcccatgctgaagctagaaaatctccagctttggatgggaaggttgaacgagacagtgaggggaaagagattcgatatccagtcatgctgactgccatggaaaagctggtggccaggaaagtctgcgtagctttcaagcaaacagtttgtggatttgaccttcttcgtgccaatggtcattcctttgtgtgtgatgtcaatggctttagttttgtcaagaactcgatgaaatactacgatgactgtgccaagattctggggaacaccataatgcgggagcttgccccacagttccagattccatggtccatccccacggaggctgaggacattcccattgttcccaccacatctggcactatgatggaacttcgttgtgtcattgcaattattcgtcatggggatcgtactcccaagcagaagatgaagatggaagtgaaacacccaaggttttttgctctgtttgaaaaacatggtggctacaagacagggaaattaaaactcaagcgacctgagcagctccaggaggtgctggatatcacaaggctgttgttggctgaactggagaaagaaccaggtggtgagatcgaggagaagactggaaaactagagcagctgaagtctgtactggagatgtatggtcacttctcaggtataaaccggaaggtacaattgacttactaccctcatggagtaaaagcttctaatgaggggcaagatccacagagggaaactctggccccatctctgttgctggtactgaagtggggtggagaactgactcctgctggccgtgttcaggctgaggagctggggcgagcttttcgctgcatgtaccctggaggacagggtgactatgctggcttccctggttgtgggctgcttcgtctccatagcactttccgccacgatctcaagatctatgcctctgatgagggtcgtgttcagatgactgctgctgccttcgccaagggccttctggctctagaaggggagctgacacccattttggtgcaaatggtgaagagtgccaacatgaatgggctactggacagcgatggggattccttgagcagctgccagcaccgggtgaaggctcggctgcaccatattctacagcaggatgcgccctttggccctgaggactacgatcagctggctcccaccagaagtacttccctgctcaactccatgactatcatccagaatcctgtgaaggtctgtgatcaggtatttgccctgatcgaaaacctcacccaccagatccgggaacgaatgcaggaccccaggtctgtagacctgcagctctaccacagtgagacactagagctaatgctacagcgttggagcaagctggagcgtgactttcgacagaagagtgggcgctatgatatcagtaagatccctgacatctatgactgtgtcaagtatgatgtgcagcacaatgggagtctgggacttcaaggcacagcagagttgctccgtctctctaaggcactggctgatgtggtcattccccaggagtacgggatcagtcgggaggagaaactggaaattgctgtgggcttctgtcttccactgttgcggaagatactacttgacctgcagagaacccacgaggatgagtctgtcaacaagctgcatcccctgtactcccgaggcgtgctctccccaggtcgccacgttcgaacgcgtctctatttcaccagtgagagccatgtccactccctgctcagtgtcttccgttatggaggacttcttgatgagacccaggatgcacaatggcagcgagctttggattatcttagtgccatctcagagcttaactacatgacccagattgtcatcatgctttatgaggacaacacacaggatcccttatcagaggaacggttccatgtggagctacacttcagccccggagtgaaaggtgttgaggaagaaggcagtgccccggctggctgtggattccgtccagcctcttctgagaatgaggagatgaaaaccaaccaaggcagtatggagaacctgtgtccaggaaaggcatcagatgaaccagaccgggcattgcagacttcaccccagcctcctgagggccctggccttccgaggagatcacccctcattcgtaaccgaaaagctggttccatggaggtactttctgagacttcatcctcgaggcctggtggctaccggctcttttcatcttcacggccacccacagaaatgaagcagagtggcctagggtttgaagggtgttccatggtgcctaccatctaccctctggaaacactgcataatgccctttccctacgtcaagtgagtgaattcttgagtagagtctgccagcgccacactgatgcccaggcacaggcatctgcagccctctttgattccatgcacagcagccaggcctcagataacccattttctccaccacgtactcttcattcacctcccctgcaactccagcagcgctctgagaagcccccttggttagagacaaggttttgccatgttggccaggctggtttagagctcctgacctcaagtgatctgcctgcctcggcctcccaaagtgctgggattacaggcgtgagccaccgcacccagccagacagcagtggcccttctagcactgtgtccagtgctggtccttcttcccctactacagtagatggtaactcccaatttggcttcagtgatcaaccctccctaaattcacacgtggctgaagaacatcaaggccttgggctgctccaggagacccctgggagtggagcacaagagctctccatagaaggggagcaagagctttttgaaccaaatcagtccccacaggtgccacctatggaaaccagccagccatacgaggaggtcagccagccatgtcaggaggtccctgacatcagccagccatgccaggacatttctgaggcgctcagccagccatgtcagaaggtccctgacatcagccagcaatgccaggagaaccatgacaatggtaaccacacatgccaggaggtccctcacatcagccagccatgccagaagtccagccaactgtgccagaaagtctctgaggaagtttgccagctatgtctggagaactccgaggaggtcagccagccatgccagggggtctctgtggaggttggcaagctggtccataagttccatgtaggggttggtagcttggtccaggaaacccttgtagaagttggcagcccagctgaagagatccctgaggaggtcatccagccataccaggagttctctgtggaggttggcaggctggcccaggagacttctgcgatcaatctgttatctcagggcatccctgagattgataaaccatcccaagagttccctgaggagattgatctgcaggcccaggaggtccctgaggagataaattagaagtcctgggtggtccctgaagtgattgatcagctgcctggagagggtattcctcaagcccagcatccatctggtgatccaaaccctcagagccagtctctagcccatgaccagcactcaccccttccaccagcaacatgtgattaattttctcattagtggtatcacactataccagccatttgagccagcaaccttttctgttggctaactcactggccagctctcaccagcggtgtctggggaagtagttctctttgtatgaagcatacctgtgccagagctgtggttgaggaggagccagttttaggttcgaagaagccattggctcctcacttagccattagacttgaataggatttccttggggtgggttggtctgtcattacccagccttctctgagcatcctaggaaatcacagattgttaaaggaaatgccgcttcactgctgaagacaccatctggcgacagcaaatgcaaaagaggggactctagggtcttcacttttctggggaaatgttcacgacttctcaaggtacgcttagaccatatgtgcattcaggggactcttgtctttgccagcactcctcaggtgagcccgggatggctatctgaaatgtctggaaaatagagtcccttccccaaacatctgacatggccactaaatctttagacttgccttatagatccttccatatcatccccaagtgccccttctgcctcagtcctgttcctctgggcaatagctctagggaaaagtaggtattagactgctgtgcaaaattcagagcaactacttaaaatgctctagaggattcttagccagtctgtgaaagtgggcctcctctgtggtggggctgt

SEQ ID NO: 1301 - DNA, 2783 bp, Homo sapiens
  source 1..2783: mol_type = genomic DNA
gaaggggcggagctccgcctacgaaggctgagcatcgccgcaagaggcggagtctggagcgaggcggagctctcctaggggcggggaaaatggggcggggcctccggacagggggcggagcgtggctgttcgcgctcatccccctcccccggccctgggtgtccccgtgacgaggcagcgcggagccgccgcgggccgggcccatcccgccgcagcggcccggggccgagcaggggctaggcggggagggagcggcgcccagcggggcccggagcgtggccagaatggtgctggaaggaaaccctgaagtggggtccccccgaacctcagacctccagcaccgggggaacaagggctcttgcgttctctcctctcccggtgaagatgcgcagccaggcgaggagcccatcaagtatggtgaactcatcgtcctgggctacaatggttgtctggcaagtggggacaagggccgccggcgaagccgcctggcactgagccgccggtcgcacgccaacggggtgaagccagacgtcatgcaccacatctccacgccgctcgtctccaaggcactgagtaaccgtggtcagcacagcatctcgtatacactgtcccggagccactcggtcatagtggagtatacacatgatagcgacacagacatgttccagattggccgctccacagagaacatgattgacttcgtggtaacagacacgtcccctggaggaggggctgccgagggcccttctgcccagagcaccatctcccgctatgcctgccgcatcctctgtgaccgccggccaccctatactgcccgcatctatgccgctggcttcgatgcctctagcaacatcttccttggagagcgagcggccaaatggcggaccccagatggcctgatggatggactgaccaccaatggagtcctggtgatgcacccggcaggcggcttctccgaggactcagccccgggtgtctggcgggagatctcggtctgtgggaatgtgtacacattgcgggacagccgctcagcccagcagcggggcaagctggtggaaaacgagtccaacgtgctgcaggacggctctctcatcgacctgtgtggggccacactgctgtggcgcacaccggcggggctgctgcgggctcccacactgaagcaactggaggcccagcggcaggaggcaaatgcagcgcggccccagtgccccgtgggcctcagcactctggccttccccagcccagcccgtggccgcacagcgcccgacaaacagcagccctgggtctacgtccgctgcgggcacgtccatggctaccacggctggggctgccggcgggagcggggcccccaggagcgcgaatgtcctctctgccgccttgtggggccttatgtgcctctatggcttggccaggaggccggcctctgcctggaccctgggccgcctagccatgcctttgcaccttgcggccacgtctgctctgagaagactgcccgctactgggcccagacaccactgccccacggcacccatgctttccatgccgcctgccccttttgcggggcctggcttaccggcgagcatggctgcgtccgcctcattttccagggcccgctggattaggctccctggggccccctgctgctgtgcccacctgcccacccaggtccccacctcctgcagcccagagggagctctgcatgtgggacactccctgctggcacagccacaccagatggacatgttggatgggctgtgcccttccccccaactgtggccccccaaggaggtccccaagatctccaccccagtcatgctgatggggccttcagcaccagctctgtcctgggtcgatggaggaaagcccagccccatggccttgcccttcctggggcatcccacatcgtgccgccgacactgtgtgcccctgggggagtgaaggggccaggggcctttgacccccagcttaggctggctatgccctgagcctgccaacccagtttcagacactcatccttcatccttcctgctgccgccctgggttcctctataaacctcgctgctcagctgcccccacaagtcccacatgccccgcatgcgtgcaatgcctccagcccccaagtgagtggtgggtgggtggcaggctgggcctagcacttgctgatagccactatgggctcgactctgtgctaagtggtatctggggacacagaggcaatcagacctggttccccccctggtggagttcacagtctagtggaggacagactgttaacaaatggcaacacggcttcatgcgtgccaggatcagagtacaaatcaggctgtggcaggcctcactggtaatggaaaagtgagggaggcttcacggaggaggtgtcataggagctcagcctcaacggctgctcggaaccctccgagtccacaagatgggaagcaagtccacaagatgggaagcgtgctctatacagaagggagggcctgtgcacaggctcaggtgtcagtaagccagaaatccagggacagagtcaggatggctggagcatggactgcggggggaacagagaagggggtggagcaaaaggttgggaccatgtgaccagggaagatgctggatggaggattctgaacctcatttgtggacggtcaggagtcaacaaagggaggagagaggactcactggtcaagagtgtcggctgtgacacaagggccatcatccctgaatgcccaccatgtgccccgcactgtgctgatgatgataataataactacgtccattgagca

SEQ ID NO: 1302 - DNA, 1950 bp, Homo sapiens
  source 1..1950: mol_type = genomic DNA
atggggaccgcgcttgtgtaccatgaggacatgacggccacccggctgctctgggacgaccccgagtgcgagatcgagcgtcctgagcgcctgaccgcagccctggatcgcctgcggcagcgcggcctggaacagaggtgtctgcggttgtcagcccgcgaggcctcggaagaggagctgggcctggtgcacagcccagagtatgtatccctggtcagggagacccaggtcctaggcaaggaggagctgcaggcgctgtccggacagttcgacgccatctacttccacccgagtacctttcactgcgcgcggctggccgcaggggctggactgcagctggtggacgctgtgctcactggagctgtgcaaaatgggcttgccctggtgaggcctcccgggcaccatggccagagggcggctgccaacgggttctgtgtgttcaacaacgtggccatagcagctgcacatgccaagcagaaacacgggctacacaggatcctcgtcgtggactgggatgtgcaccatggccaggggatccagtatctctttgaggatgaccccagcgtcctttacttctcctggcaccgctatgagcatgggcgcttctggcctttcctgcgagagtcagatgcagacgcagtggggcggggacagggcctcggcttcactgtcaacctgccctggaaccaggttgggatgggaaacgctgactacgtggctgccttcctgcacctgctgctcccactggcctttgaggggcaaatgcaggccacgccagagtgcttcgcccacctcacacagctgctgcaggtgctggccggcggccgggtctgtgccgtgctggagggcggctaccacctggagtcactggcggagtcagtgtgcatgacagtacagacgctgctgggtgacccggccccacccctgtcagggccaatggcgccatgtcagagtgccctagagtccatccagagtgcccgtgctgcccaggccccgcactggaagagcctccagcagcaagatgtgaccgctgtgccgatgagccccagcagccactccccagaggggaggcctccacctctgctgcctgggggtccagtgtgtaaggcagctgcatctgcaccgagctccctcctggaccagccgtgcctctgccccgcaccctctgtccgcaccgctgttgccctgacaacgccggatatcacattggttctgccccctgacgtcatccaacaggaagcgtcagccctgagggaggagacagaagcctgggccaggccacacgagtccctggcccgggaggaggccctcactgcacttgggaagctcctgtacctcttagatgggatgctggatgggcaggtgaacagtggtatagcagccactccagcctctgctgcagcagccaccctggatgtggctgttcggagaggcctgtcccacggagcccagaggctgctgtgcgtggccctgggacagctggaccggcctccagacctcgcccatgacgggaggagtctgtggctgaacatcaggggcaaggaggcggctgccctatccatgttccatgtctccacgccactgccagtgatgaccggtggtttcctgagctgcatcttgggcttggtgctgcccctggcctatggcttccagcctgacctggtgctggtggcgctggggcctggccatggcctgcagggcccccacgctgcactcctggctgcaatgcttcgggggctggcagggggccgagtcctggccctcctggaggagaactccacaccccagctagcagggatcctggcccgggtgctgaatggagaggcacctcctagcctaggcccttcctctgtggcctccccagaggacgtccaggccctgatgtacctgagagggcagctggagcctcagtggaagatgttgcagtgccatcctcacctggtggcttga

SEQ ID NO: 1303 - DNA, 2544 bp, Homo sapiens
  source 1..2544: mol_type = genomic DNA
ggcgacgggtcggcggagacagaaaagcgccggacgccggggtgatcatggacgcttgacaacctgcgggcaggcgccgggaggccgagccagcgactaagaggaccgagaggtggcgtggacagatttcaaggccagagaatggcaggggaacagaaaccctcaagtaatctcctggagcagtttattttactagccaaaggtaccagtggctcagccctcactgctctcataagccaggtcttagaggctcccggagtgtatgtctttggagaacttctggagctggccaacgtgcaggagcttgcggaaggagctaatgctgcttatttgcagttgttgaacctgtttgcctatgggacatacccagattacatagccaacaaggagagcctgccagaactgagcacagctcagcagaacaagctgaagcatcttaccatcgtgagcttggcatcaagaatgaagtgtatcccctactccgtgttgctgaaagacctggagatgcggaatctccgggaactagaagaccttatcattgaggctgtctacactgacatcatccagggcaagctggaccagcgaaaccagctgctggaagtggatttctgcattggccgtgacatccgaaagaaggatatcaataatattgtcaagaccctgcatgaatggtgtgatggctgtgaagcagttctactgggcatcgagcagcaagttctgagagccaaccagtacaaagagaaccacaaccgaactcagcagcaggtagaagcagaggttaccaacatcaagaagacactcaaagccaccgcatcctcctcggctcaggagatggagcagcagctggctgaacgggagtgtccccctcacgctgagcagaggcagcccaccaagaagatgtccaaagtgaaaggtctggtctccagccgccactagggccggctggggcagctggcactcaccaggcctgggtcaggtggggaggggacaccaagggcccatttcctcccctctctacctgcagtgagttccagacctgcccgtcccctcaccagcgcctccccaccctgttggtactgttccagaaaaactgttactccccctcacccactccctccttccccagttgttcccttcagactcaggggctccaccaatgccatcccaaaacagggtcagacactgcccagcttccctccaggaggttcttgtctctgtgtaagggcttgtctccctcccagtttttcttttgctccacgtcattttgtcaggctggttataagccggaggcagctttaaccagcccccagggatgattgtgaaggaggcccctccccttgtgaggagggggcactcctctccagcccctggtaccacagtcctcacgatggtgcagtgatttctagccaggcgtcaagatgcgctgctttccctctcctgcctcatcccttgttggcagctccagttcaggccgtggagggacgtgatgctgggctgtgtttactaaacccacgggttttcagcctcttaagcccagctccgatctccaattagttgagagcgctgggttgactaacctctggtatctgagcacagacagagggtgctgtgggtctgctgggtggcagaaatggttccttccggcttggcgttctctcctggccactcttcctgctgcctctgactactcagccttgttttcggtgtgtaggccccagctgcccactggaactgccggctaatgcttgctctcccaagatctttaactcctcctggctgcacctgggtagggatggtggcatcgatgcccctctgtctgctgaaggacctgttgctgcttctgtcttttcacccctccttggctgatgacccagagccctctgatgatggcattctcctggcaagagaaaaagacttaactagacttctgaacttgaacagtttcaggttatattttaatttttttttttttgtacaggttctgattctaatacatttcaacatgcttttgtcccccctcgtgtcaatatttgttatagactaatcgccggggatttttcacctggttggagggtgggggtggggtggggtgtgtgtgtgtgtgtgtgtgtgtgtgtgtgtgtgtgtgtgtgtttgtaggtcctggactgattaaagttcattgaggaaaaagcacattttacaacaaaaaaataaaagtgtagatttaatgtatgtgactggggtttggggttgcatacctggtggatcttgaggggctgggattagggtggttcaggaaaatgtgatgctgtttccccatgtttagccatggtcaaaaaatggatttctcctttttctaaaatgtccagcaactgcctactgttgatcaaatgttgaagtattcttgtttcccttttaagccaatccatgtgcccacataacattatgcccaagtggagagttcactttaatttccaaagtatgtttcatgcagccccctgtcagctgctctgtggaaaaggggttctgttatgaaataaatgttgcactccctgcatccca

SEQ ID NO: 1304 - DNA, 1177 bp, Homo sapiens
  source 1..1177: mol_type = genomic DNA
tcctgtcactggcttatatggacacgtcagcccaccgtcacgtgaccgcaggctgctaaaaacagctccagcacccactccaaaccagggcctgaaacaatgtcctccaccgagagaaacgtaaaggacacttgatcacacaatccctggaataatatccaggaaacacttgctggagccactcgcagcacccttccctggcagcacacttggggacagcgaggagatgagcgcatctctgaattacaaatctttttccaaagagcagcagaccatggataacttagagaagcaactcatctgtcccatctgcttagagatgttcacgaaacctgtggtgattctcccttgtcagcacaacctgtgtaggaaatgtgccagtgatattttccaggcctctaacccgtatttgcccacaagaggaggtaccaccatggcatcagggggccgattccgctgcccatcctgtagacatgaagtggttttggatagacatggggtatatggacttcagaggaacctgctggtggaaaatatcattgacatctacaagcaggagtccaccaggccagaaaagaaatccgaccagcccatgtgcgaggaacatgaagaggagcgcatcaacatctactgtctgaactgcgaagtacccacctgctctctgtgcaaggtgtttggtgcacacaaagactgccaggtggctcccctcactcatgtgttccagagacagaagtctgagctcagtgatggcatcgccatcctcgtgggcagcaacgatcgagtccagggagtgatcagccagctggaagacacctgcaaaactatcgagattggatttgaggctcctcccctccagggacaggctgcagctccagcgagtggcagtggagctgattctgagccagctcgccatatcttctccttttcctggttgaactccctaaatgaatgatattcattccaactgctgcccctctgtctgcctggctgagatgcatgtgggcagcaggaagcccaagtgaaattaatattatgcagatgatgaaagggacctctgaacaggatttctgcaaaaatagccccaaactgcaattccatatgacttatctaacatcttggggggaaagaatattttgagaaaatagttgcagaaagcactggaaataataaacttgat

SEQ ID NO: 1305 - DNA, 3654 bp, Homo sapiens
  source 1..3654: mol_type = genomic DNA
ctggtctgcggctgagatacacagagcgacagagacatttattgttatttgttttttggtggcaaaaagggaaaatggcgaacgactcccctgcaaaaagtctggtggacatcgacctctcctccctgcgggatcctgctgggatttttgagctggtggaagtggttggaaatggcacctatggacaagtctataagggtcgacatgttaaaacgggtcagttggcagccatcaaagttatggatgtcactgaggatgaagaggaagaaatcaaactggagataaatatgctaaagaaatactctcatcacagaaacattgcaacatattatggtgctttcatcaaaaagagccctccaggacatgatgaccaactctggcttgttatggagttctgtggggctgggtccattacagaccttgtgaagaacaccaaagggaacacactcaaagaagactggatcgcttacatctccagagaaatcctgaggggactggcacatcttcacattcatcatgtgattcaccgggatatcaagggccagaatgtgttgctgactgagaatgcagaggtgaaacttgttgactttggtgtgagtgctcagctggacaggactgtggggcggagaaatacgttcataggcactccctactggatggctcctgaggtcatcgcctgtgatgagaacccagatgccacctatgattacagaagtgatctttggtcttgtggcattacagccattgagatggcagaaggtgctccccctctctgtgacatgcatccaatgagagcactgtttctcattcccagaaaccctcctccccggctgaagtcaaaaaaatggtcgaagaagttttttagttttatagaagggtgcctggtgaagaattacatgcagcggccctctacagagcagcttttgaaacatccttttataagggatcagccaaatgaaaggcaagttagaatccagcttaaggatcatatagatcgtaccaggaagaagagaggcgagaaagatgaaactgagtatgagtacagtgggagtgaggaagaagaggaggaagtgcctgaacaggaaggagagccaagttccattgtgaacgtgcctggtgagtctactcttcgccgagatttcctgagactgcagcaggagaacaaggaacgttccgaggctcttcggagacaacagttactacaggagcaacagctccgggagcaggaagaatataaaaggcaactgctggcagagagacagaagcggattgagcagcagaaagaacagaggcgacggctagaagagcaacaaaggagagagcgggaagctagaaggcagcaggaacgtgaacagcgaaggagagaacaagaagaaaagaggcgtctagaggagttggagagaaggcgcaaagaagaagaggagaggagacgggcagaagaagaaaagaggagagttgaaagagaacaggagtatatcaggcgacagctagaagaggagcagcggcacttggaagtccttcagcagcagctgctccaggagcaggccatgttactgcatgaccataggaggccgcacccgcagcactcgcagcagccgccaccaccgcagcaggaaaggagcaagccaagcttccatgctcccgagcccaaagcccactacgagcctgctgaccgagcgcgagaggttcctgtgagaacaacatctcgctcccctgttctgtcccgtcgagattccccactgcagggcagtgggcagcagaatagccaggcaggacagagaaactccaccagcagtattgagcccaggcttctgtgggagagagtggagaagctggtgcccagacctggcagtggcagctcctcagggtccagcaactcaggatcccagcccgggtctcaccctgggtctcagagtggctccggggaacgcttcagagtgagatcatcatccaagtctgaaggctctccatctcagcgcctggaaaatgcagtgaaaaaacctgaagataaaaaggaagttttcagacccctcaagcctgctgtaaggattgatctgaccgcactggccaaagagcttcgagcagtggaagatgtacggccacctcacaaagtaacggactactcctcatccagtgaggagtcggggacgacggatgaggaggacgacgatgtggagcaggaaggggctgacgagtccacctcaggaccagaggacaccagagcagcgtcatctctgaatttgagcaatggtgaaacggaatctgtgaaaaccatgattgtccatgatgatgtagaaagtgagccggccatgaccccatccaaggagggcactctaatcgtccgccagactcagtccgctagtagcacactccagaaacacaaatcttcctcctcctttacaccttttatagaccccagattactacagatttctccatctagcggaacaacagtgacatctgtggtgggattttcctgtgatgggatgagaccagaagccataaggcaagatcctacccggaaaggctcagtggtcaatgtgaatcctaccaacactaggccacagagtgacaccccggagattcgtaaatacaagaagaggtttaactctgagattctgtgtgctgccttatggggagtgaatttgctagtgggtacagagagtggcctgatgctgctggacagaagtggccaagggaaggtctatcctcttatcaaccgaagacgatttcaacaaatggacgtacttgagggcttgaatgtcttggtgacaatatctggcaaaaaggataagttacgtgtctactatttgtcctggttaagaaataaaatacttcacaatgatccagaagttgagaagaagcagggatggacaaccgtaggggatttggaaggatgtgtacattataaagttgtaaaatatgaaagaatcaaatttctggtgattgctttgaagagttctgtggaagtctatgcgtgggcaccaaagccatatcacaaatttatggcctttaagtcatttggagaattggtacataagccattactggtggatctcactgttgaggaaggccagaggttgaaagtgatctatggatcctgtgctggattccatgctgttgatgtggattcaggatcagtctatgacatttatctaccaacacatgtaagaaagaacccacactctatgatccagtgtagcatcaaaccccatgcaatcatcatcctccccaatacagatggaatggagcttctggtgtgctatgaagatgagggggtttatgtaaacacatatggaaggatcaccaaggatgtagttctacagtggggagagatgcctacatcagtagcatatattcgatccaatcagacaatgggctggggagagaaggccatagagatccgatctgtggaaactggtcacttggatggtgtgttcatgcacaaaagggctcaaagactaaaattcttgtgtgaacgcaatgacaaggtgttctttgcctctgttcggtctggtggcagcagtcaggtttatttcatgaccttaggcaggacttctcttctgagctggtagaagcagtgtgatccagggattactggcctccagagtcttcaagatcctgagaacttggaattccttgtaactggagctc

SEQ ID NO: 1306 - DNA, 2487 bp, Homo sapiens
  source 1..2487: mol_type = genomic DNA
gaccagttggcgacatggtggcacccgtgctggagacttctcacgtgttttgctgcccaaaccgggtgcggggagtcctgaactggagctctgggcccagaggacttctggcctttggcacgtcctgctccgtggtgctctatgaccccctgaaaagggttgttgttaccaacttgaatggtcacaccgcccgagtcaattgcatacagtggatttgtaaacaggatggctccccttctactgaattagtttctggaggatctgataatcaagtgattcactgggaaatagaggataatcagcttttaaaagcagtgcatcttcaaggccatgaaggacctgtttatgcggtgcatgctgtttaccagaggaggacatcagatcctgcattatgtacactgatcgtttctgcagctgcagattctgctgttcgactctggtctaaaaagggtccagaagttacctggaagactggccaggtggaacgaggcagggcctggaagccaccagcctctctcgccctctgtagcaggagctgcgactctatggtttcatgttacgcttccattctgtgcaaggctctgtggaaggagaagctgcacacattctggcatcataacagaatttcatttcttccatctgcattcaggccaataccaatattagcatgtggcaatgatgattgcagaattcacatatttgctcaacaaaatgatcagtttcagaaagtgctttctctctgtggacatgaggattggattagaggagtggaatgggcagcctttggtagagatcttttcctagcaagctgttcacaagattgcctgataagaatatggaagctgtatataaagtcaacatctttagaaactcaggatgacgataacataagactgaaagaaaatacttttaccatagaaaatgaaagtgttaaaatagcatttgctgttactctggagacagtgctagccggtcatgaaaactgggtaaatgcagttcactggcaacctgtgttttacaaagatggtgtcctacagcagccagtgagattattatctgcttccatggataaaaccatgattctctgggctccagatgaagagtcaggagtttggctagaacagagagagtggactccagagattgtcatttcaggacactttgatggtgtccaagacctagtctgggatccagaaggagaatttattatcactgttggtactgatcagacaactagactttttgctccatggaagagaaaagaccaatcacaggtgacttggcatgaaattgcaaggcctcagatacatgggtatgacctgaaatgtttggcaatgattaatcggtttcagtttgtatctggagcagatgaaaaagttcttcgggttttttctgcacctcggaattttgtggaaaatttttgtgccattacaggacaatcactgaatcatgtgctctgtaatcaagatagtgatcttccagaaggagccactgtccctgcattgggattatcaaataaagctgtctttcagggagatatagcttctcagccttctgatgaagaggagctgttaactagtactggttttgagtatcagcaggtggcctttcagccctccatacttactgagcctcccactgaggatcatcttctgcagaatactttgtggcctgaagttcaaaaactatatgggcacggttatgaaatattttgtgttacttgtaacagttcaaagactctgcttgcctcagcttgtaaggcagctaagaaagagcatgcagctatcattctttggaacactacatcttggaaacaggtgcagaatttagttttccacagtttgacagtcacgcagatggccttctcacctaatgagaagttcttactagctgtttccagagatcgaacctggtcattgtggaaaaagcaggatacaatctcacctgagttcgagccagtttttagtctttttgccttcaccaacaaaattacttctgtgcacagtagaattatttggtcttgtgattggagtcctgacagcaagtatttcttcactgggagtcgagacaaaaaggtggttgtctggggtgagtgcgactccactgatgactgtattgagcacaacattggcccctgctcctcagtcctggacgtgggtggggctgtgacagctgtcagcgtctgcccagtgctccacccttctcaacgatacgtggttgcagtaggattggagtgtggaaagatttgcttatatacctggaaaaagactgatcaagttccagaaataaatgactggacccactgtgtagaaacaagtcaaagccaaagtcatacactggctatcagaaaattatgctggaagaattgcagtggaaaaactgaacagaaggaagcagaaggtgctgagtggttacactttgcaagctgtggtgaagatcacactgtgaagatacacagagtcaataaatgtgcactgtaatggactt

SEQ ID NO: 1307 - DNA, 1425 bp, Homo sapiens
  source 1..1425: mol_type = genomic DNA
ccgagcgcgttgctgcccggaggctcctacgccacggcccgtcgggcccggcgccggaagtgagctgttccgaggcgccgccgggagctgccacgtccgagacctggagcagccaccgccgcaatcatggtgtcagtaattaacactgtggatacctcccatgaggacatgattcacgacgcccagatggactactatggcacccgcctggcaacctgctcatcagacaggtccgtcaaaatctttgatgtgcgcaatggagggcagatccttatcgccgacctcaggggtcatgagggtcctgtgtggcaagtggcctgggctcaccccatgtacggcaacatcctggcatcgtgctcctatgaccggaaagtcattatctggagagaggaaaacggcacctgggagaagagccacgagcatgcgggacacgactcctcagtgaactcggtgtgctgggccccccatgactacggcctgatcctggcctgtgggagctcggatggggccatctccctgctgacttacaccggggaaggccaatgggaagtaaagaagatcaacaacgctcacaccattggctgcaatgccgtcagctgggcccctgctgttgtacctggaagcctcatagaccacccatcggggcagaaacccaattacatcaagaggtttgcatcaggtggctgtgacaacctcatcaagctgtggaaggaggaggaggacggccagtggaaggaggagcagaagctagaagcgcacagtgactgggttcgagatgtggcctgggccccctccatcggcctgcccaccagcaccatcgccagctgctcccaggatggtcgtgtgttcatttggacctgtgatgatgcctcaagcaatacgtggtcccctaaattgttgcacaagttcaacgatgtggtgtggcatgtgagctggtccatcacagccaacatcctggctgtctctggtggagacaataaggtgaccctgtggaaggagtcagttgatgggcagtgggtgtgcatcagtgatgtcaacaagggccagggctccgtatcagcatcagtgacagagggccagcagaacgagcagtgacaagacaggtggggcctggctccccacccgccagctccaggactgccccttcctgggccaactaaccagacaactgggaagagcccccaactccaacaggattattttcccaggaggagttacagatgcagccacagattgatcatctgccttaacgtgatcggagatgctttgtaatctactgtccagctgaaagcactcatgttacgaggaagaaactacaagtgatgttcaaatctattttgggtcatttttatgtacctttgggttcaggcattatttggggggttttgtttccaaaggaactaaataaagtcatattgcttataa

SEQ ID NO: 1308 - DNA, 2628 bp, Homo sapiens
  source 1..2628: mol_type = genomic DNA
tcccgcctccttctgcgaaccgcaccacccagatcccggggtgcgcggagggcgcgtctctgacggaagccggggcggacggtcggagtccggaagaaaaacagtccgcgacagctaggcgcgtgagaccggccgcccgcagggctgctctggccgggacccgctggccgggagacgcgaacctgccggaccaccgcgcggggacgacggcggccatgagctcgcggaagctgagcgggccgaaaggcaggaggctcagcatacacgtcgtgacttggaacgtggcttcggcagcgccccctctagatctcagtgacctgcttcagctgaacaaccggaacctcaatcttgacatatatgttattggtttgcaggaattgaactctgggatcataagcctcctttccgatgctgcctttaatgactcgtggagcagtttcctcatggatgtgctttcccctctgagcttcatcaaggtctcccatgtccgtatgcaggggatcctcttactggtctttgccaagtatcagcatttgccctatatccagattctgtctactaaatccacccccactggcctgtttgggtactgggggaacaaaggtggagtcaacatctgcctgaagctttatggctactatgtcagcatcatcaactgccacctgcctccccacatttccaacaattaccagcggctggagcactttgaccggatcctggagatgcagaattgtgaggggcgagacatcccaaacatcctggaccacgacctcattatctggtttggagacatgaactttcggatcgaggactttgggttgcactttgttcgggaatccattaaaaatcggtgctacggtggcctgtgggagaaggaccagctcagcattgccaagaaacatgacccgctgctccgggagttccaggagggccgcctactcttcccgcccacctacaagtttgataggaactccaacgactatgacaccagtgagaaaaaacgcaagcctgcatggaccgatcgcatcctgtggaggctgaagcggcagccctgtgctggccccgacactcccataccgccggcgtcacacttctccttgtctctgaggggctacagcagccacatgacgtacggcatcagcgaccacaagcctgtctccggcacgttcgacttggagctgaagccattggtgtctgctccgctgatcgtcctgatgcccgaggacctgtggaccgtggaaaatgacatgatggtcagctactcttcaacctcggacttccccagcagcccgtgggactggattggactgtacaaggtggggctgcgggacgttaatgactacgtgtcctatgcctgggtcggggacagcaaggtctcctgcagcgacaacctgaaccaggtttacatcgacatcagcaatatccctaccactgaagatgagtttctcctctgttactacagcaacagtctgcgttctgtggtggggataagcagacccttccagatcccgcctggctccttgagggaggacccactgggtgaagcacagccacagatctgagccaggatgggagtgaatcccaggcggaggccagagctggcagccagctctgcctttccactgccgggagtgctgggggcccagcctggccccctgaagagacagccaagtgtcgtccacatactcctcccagagtgagctctaaccaggctcatttgctctctccactactcatctctggaattagccgcttaaatacaggtttttgttgctgagatgtgagtgaaaccagctagtgtgtcaacagtgaagacctggggacagttctgcgtctcatttctggattcctaccccctcttctagtcttgcccaagtagtcctgccaggcacatgccccatttggcacaggcctgcattcttgtcgtgccgtcctgggcctcaggctgtctgggaggggagatgctcacatttgtacaggctacatagactggtgcaagcagtgctggattccaggagtcttggcatctcatagcttgtccccgtgaggagtgagcagagggtctgggatttctgctttcagcaaaagcagtctgactcagtgggcagaatggaggggcccctctagccaggctcttacgccatggttatgagcaggttgatgagggtccttcggccagcacaaccttcctccctactcacggcatggagtctgactgcatggaagttccagatcctgacagagagaactgggaaggatccaggttcgcttccgttggtagcttgagtcccatgcctccaccctgccatctgaggaaggggtgacaagtggtcaaggagctgtggccacagacttttccagggtggtccttggcaggtgaggtgcgtctgtgccacccttgtcaggagccattgacgacgggccccccctggaccccccgggacctcagagtgggggcaggcagaagggagaaccagctcaagacattttggaggatctggccctggggttcttcagagaacaccctctaggggctttggggacatggcctgtccccacatccagcacttgcctccgccatggtcactcggcagcccttttcccaggagaagacacctctgggagcct

SEQ ID NO: 1309 - DNA, 2146 bp, Homo sapiens
  source 1..2146: mol_type = genomic DNA
gtcccgttaccgcctcctgctcctgccgcgcgcacccccggggcttcggctccggcacgggtcgcgcccagctttcctgcacctgaggccgccggccagccgccgccatgggtgcctacctctcccagcccaacacggtgaagtgctccggggacggggtcggcgccccgcgcctgccgctgccctacggcttctccgccatgcaaggctggcgcgtctccatggaggatgctcacaactgtattcctgagctggacagtgagacagccatgttttctgtctacgatggacatggaggggaggaagttgccttgtactgtgccaaatatcttcctgatatcatcaaagatcagaaggcctacaaggaaggcaagctacagaaggctttagaagatgccttcttggctattgacgccaaattgaccactgaagaagtcattaaagagctggcacagattgcagggcgacccactgaggatgaagatgaaaaagaaaaagtagctgatgaagatgatgtggacaatgaggaggctgcactgctgcatgaagaggctaccatgactattgaagagctgctgacacgctacgggcagaactgtcacaagggccctccccacagcaaatctggaggtgggacaggcgaggaaccagggtcccagggcctcaatggggaggcaggacctgaggactcaactagggaaactccttcacaagaaaatggccccacagccaaggcctacacaggcttttcctccaactcggaacgtgggactgaggcaggccaagttggtgagcctggcattcccactggtgaggctgggccttcctgctcttcagcctctgacaagctgcctcgagttgctaagtccaagttctttgaggacagtgaggatgagtcagatgaggcggaggaagaagaggaagacagtgaggaatgcagcgaggaagaggatggctacagcagtgaggaggcagagaatgaggaagatgaggatgacaccgaggaggctgaagaggacgatgaagaagaagaagaagagatgatggtgccagggatggaaggcaaagaggagcctggctctgacagtggtacaacagcggtggtggccctgatacgagggaagcagttgattgtagccaacgcaggagactctcgctgtgtggtatctgaggctggcaaagctttagacatgtcctatgatcacaaaccagaggatgaagtagaactagcacgcatcaagaatgctggtggcaaggtcaccatggatgggcgagtcaacgggggcctcaacctctccagagccattggggaccacttctataagagaaacaagaacctgccacctgaggaacagatgatttcagcccttcctgacatcaaggtgctgactctcactgacgaccatgaattcatggtcattgcctgtgatggcatctggaatgtgatgagcagccaggaagttgtagatttcattcaatcaaagatcagccagcgtgatgaaaatggggagcttcggttattgtcatccattgtggaagagctgctggatcagtgcctggcaccagacacttctggggatggtacagggtgtgacaacatgacctgcatcatcatttgcttcaagccccgaaacacagcagagctccagccagagagtggcaagcgaaaactagaggaggtgctctctactgagggggctgaagaaaatggcaacagcgacaagaagaagaaggccaagcgagactagcagtcatccagacccctgcccacctagactgttttctgagccctccggacctgagactgagttttgtctttttcctttagccttagcagtgggtatgaggtgtgcagggggagctgggtggcttcactccgcccattccaaagagggctctccctccacactgcagccgggagcctctgctgtccttcccagccgcctctgctcctcgggctcatcaccggttctgtgcctgtgctctgttgtgttggagggaaggactggcggttctggtttttactctgtgaactttatttaaggacattcttttttattggcggctccatggccctcggccgcttgcacccgctctctgttgtacactttcaatcaacactttttcagactaaaggccaaaacct

SEQ ID NO: 1310 - DNA, 3919 bp, Homo sapiens
  source 1..3919: mol_type = genomic DNA
atgctacaggccttacagcttcgtactggcttcttctgttttagggtgttggtggcactttctccctgtgctttgcatgactctggcagacttaccacaggatcattcaacgttgtcagggatgaagaggaagaaatcaaactggagataaatatgctaaagaaatactctcatcacagaaacattgcaacatattatggtgctttcatcaaaaagagccctccaggacatgatgaccaactctggcttgttatggagttctgtggggctgggtccattacagaccttgtgaagaacaccaaagggaacacactcaaagaagactggatcgcttacatctccagagaaatcctgaggggactggcacatcttcacattcatcatgtgattcaccgggatatcaagggccagaatgtgttgctgactgagaatgcagaggtgaaacttgttgactttggtgtgagtgctcagctggacaggactgtggggcggagaaatacgttcataggcactccctactggatggctcctgaggtcatcgcctgtgatgagaacccagatgccacctatgattacagaagtgatctttggtcttgtggcattacagccattgagatggcagaaggtgctccccctctctgtgacatgcatccaatgagagcactgtttctcattcccagaaaccctcctccccggctgaagtcaaaaaaatggtcgaagaagttttttagttttatagaagggtgcctggtgaagaattacatgcagcggccctctacagagcagcttttgaaacatccttttataagggatcagccaaatgaaaggcaagttagaatccagcttaaggatcatatagatcgtaccaggaagaagagaggcgagaaagatgaaactgagtatgagtacagtgggagtgaggaagaagaggaggaagtgcctgaacaggaaggagagccaagttccattgtgaacgtgcctggtgagtctactcttcgccgagatttcctgagactgcagcaggagaacaaggaacgttccgaggctcttcggagacaacagttactacaggagcaacagctccgggagcaggaagaatataaaaggcaactgctggcagagagacagaagcggattgagcagcagaaagaacagaggcgacggctagaagagcaacaaaggagagagcgggaagctagaaggcagcaggaacgtgaacagcgaaggagagaacaagaagaaaagaggcgtctagaggagttggagagaaggcgcaaagaagaagaggagaggagacgggcagaagaagaaaagaggagagttgaaagagaacaggagtatatcaggcgacagctagaagaggagcagcggcacttggaagtccttcagcagcagctgctccaggagcaggccatgttactgcatgaccataggaggccgcacccgcagcactcgcagcagccgccaccaccgcagcaggaaaggagcaagccaagcttccatgctcccgagcccaaagcccactacgagcctgctgaccgagcgcgagaggtacagtggtcccacctggcatctctcaagaacaatgtttcccctgtctcgcgatcccattccttcagtgacccttctcccaaatttgcacaccaccatcttcgttctcaggacccatgtccaccttcccgcagtgaggtgctcagtcagagctctgactctaagtcagaggcgcctgaccctacccaaaaggcttggtctagatcagacagtgacgaggtgcctccaagggttcctgtgagaacaacatctcgctcccctgttctgtcccgtcgagattccccactgcagggcagtgggcagcagaatagccaggcaggacagagaaactccaccagcagtattgagcccaggcttctgtgggagagagtggagaagctggtgcccagacctggcagtggcagctcctcagggtccagcaactcaggatcccagcccgggtctcaccctgggtctcagagtggctccggggaacgcttcagagtgagatcatcatccaagtctgaaggctctccatctcagcgcctggaaaatgcagtgaaaaaacctgaagataaaaaggaagttttcagacccctcaagcctgctgtaaggattgatctgaccgcactggccaaagagcttcgagcagtggaagatgtacggccacctcacaaagtaacggactactcctcatccagtgaggagtcggggacgacggatgaggaggacgacgatgtggagcaggaaggggctgacgagtccacctcaggaccagaggacaccagagcagcgtcatctctgaatttgagcaatggtgaaacggaatctgtgaaaaccatgattgtccatgatgatgtagaaagtgagccggccatgaccccatccaaggagggcactctaatcgtccgccagagtacagttgaccaaaagcgtgccagccatcatgagagcaatggctttgccggtcgcattcacctcttgccagatctcttacagcaaagccattcctcctccacttcctccacctcctcctccccatcctccagccagccgacacccaccatgtccccacagacaccccaggacaagctcactgctaatgagactcagtccgctagtagcacactccagaaacacaaatcttcctcctcctttacaccttttatagaccccagattactacagatttctccatctagcggaacaacagtgacatctgtggtgggattttcctgtgatgggatgagaccagaagccataaggcaagatcctacccggaaaggctcagtggtcaatgtgaatcctaccaacactaggccacagagtgacaccccggagattcgtaaatacaagaagaggtttaactctgagattctgtgtgctgccttatggggagtgaatttgctagtgggtacagagagtggcctgatgctgctggacagaagtggccaagggaaggtctatcctcttatcaaccgaagacgatttcaacaaatggacgtacttgagggcttgaatgtcttggtgacaatatctggcaaaaaggataagttacgtgtctactatttgtcctggttaagaaataaaatacttcacaatgatccagaagttgagaagaagcagggatggacaaccgtaggggatttggaaggatgtgtacattataaagttgtaaaatatgaaagaatcaaatttctggtgattgctttgaagagttctgtggaagtctatgcgtgggcaccaaagccatatcacaaatttatggcctttaagtcatttggagaattggtacataagccattactggtggatctcactgttgaggaaggccagaggttgaaagtgatctatggatcctgtgctggattccatgctgttgatgtggattcaggatcagtctatgacatttatctaccaacacatatccagtgtagcatcaaaccccatgcaatcatcatcctccccaatacagatggaatggagcttctggtgtgctatgaagatgagggggtttatgtaaacacatatggaaggatcaccaaggatgtagttctacagtggggagagatgcctacatcagtagcatatattcgatccaatcagacaatgggctggggagagaaggccatagagatccgatctgtggaaactggtcacttggatggtgtgttcatgcacaaaagggctcaaagactaaaattcttgtgtgaacgcaatgacaaggtgttctttgcctctgttcggtctggtggcagcagtcaggtttatttcatgaccttaggcaggacttctcttctgagctggtagaagcagtgtgatccagggattactggcctccagagtcttcaagatcctgagaacttggaattccttgtaactggagctc

SEQ ID NO: 1311 - DNA, 2643 bp, Homo sapiens
  source 1..2643: mol_type = genomic DNA
aagttaagctgaagaccgaagcaagagctggttcaggtggcagccacagcagcctcagggacctcagcaactatggcctcctgcccagactctgataatagctgggtgcttgctggctccgagagcctgccagtggagacactgggcccggcatccaggatggacccagaatctgagagagccctgcaggcccctcacagcccctccaagacagatgggaaagaattagctgggaccatggatggagaagggacgctcttccagactgaaagccctcagtctggcagcattctaacagaggagactgaggtcaagggcaccctggaaggtgatgtttgtggtgtggagcctcctggcccaggagacacagtagtccagggagacctgcaggagaccaccgtggtgacaggcctgggaccagacacacaggacctggaaggccagagccctccacagagcctgccttcaacccccaaagcagcttggatcagggaggagggccgctgctccagcagtgacgatgacaccgacgtggacatggagggtctgcggagacggcggggccgggaggccggcccacctcagcccatggtgcccctggctgtggagaaccaggctgggggtgagggtgcaggcggggagctgggcatctccctcaacatgtgcctccttggggccctggttctgcttggcctgggggtcctcctcttctcaggtggcctctcagagtctgagactgggcccatggaggaagtggagcggcaggtcctcccagaccccgaggtgctggaagctgtgggggacaggcaggatgggctaagggaacagctgcaggccccagtgcctcctgacagtgtccccagcctgcaaaacatgggtcttctgctggacaagctggccaaggagaaccaggacatccggctgctgcaggcccagctgcaggcccaaaaggaagagcttcagagcctgatgcaccagcccaaagggctagaggaggagaatgcccagctccggggggctctgcagcagggcgaagccttccagcgggctctggagtcagagctgcagcagctgcgggcccggctccaggggctggaggccgactgtgtccggggcccagatggggtgtgcctcagtgggggtagaggcccacagggtgacaaggccatcagggagcaaggccccagggagcaggagccagaactcagcttcctgaagcagaaggaacagctggaggctgaggcacaggcattaaggcaagagttagagaggcagcgacggctgctggggtctgtacagcaggatctggagaggagcttgcaggatgccagccgcggggacccagctcatgctggcttggctgagctgggccacagattggcccagaaactgcagggcctggagaactggggccaggaccctggggtctctgccaatgcctcaaaggcctggcaccagaagtcccacttccagaattctagggagtggagtggaaaggaaaagtggtgggatgggcagagagaccggaaggctgagcactggaaacataagaaggaagaatctggccgggaaaggaagaagaactggggaggtcaggaggacagggagccagcaggaaggtggaaggagggcaggccaagggtggaggagtcggggagcaagaaggagggcaagcgacagggcccgaaggaacccccaaggaaaagtggtagcttccactcctctggagaaaagcagaagcaacctcggtggagggaagggactaaggagctacccctctcacctgctttctttggtgaggatggcatcttccgtcatgaccgcctccgcttccgggattttgtggatgccctggaggacagcttggaggaggtggctgtgcaacagacaggtgatgatgatgaagtagatgactttgaggacttcatcttcagccacttctttggagacaaagcactgaagaagaggtcagggaagaaggacaagcactcacagagcccaagagctgcggggcccagggaggggcacagccatagccaccaccaccaccaccggggctgacaccctgccccacagggaatggccttggcctggcccagcccaagatcccagcgttatctaactcctggagggtggactctgtcctggcttgtttggtgtcctcagatatctttcacacagtagagcaaaatcaccagccctgcactgatgtcactttatgtagaaaaaggccttagctggacctgcgttgccgtctatgcaaatgcatgcaaatactccaggccctgggatgtgggcttgtgttttgtcactgtgaagggggagatgggagaggagcctgttttggggtggggtctggggaaggcaatctgattctgaagctaaagagctttcatcctcttgagtgtatgtccccatagtgggccccttgacccacatgctgaccggtgccttgggatttgactagagttgctggctcgaggcccagcacgaggacttaccctggggttttgttaggtttggaagcagctgtccctagggggtgaagtcccccccctttttttttttacccctgcttctcccacggcttcacctccctatgtgaactgtagactcagatcccaataaagtgctgttgcagct

SEQ ID NO: 1312 - DNA, 2453 bp, Homo sapiens
  source 1..2453: mol_type = genomic DNA
ggaagtgcgcgtctcttgtttgtgcggctgaccagttggcgacatggtggcacccgtgctggagacttctcacgtgttttgctgcccaaaccgggtgcggggagtcctgaactggagctctgggcccagaggacttctggcctttggcacgtcctgctccgtggtgctctatgaccccctgaaaagggttgttgttaccaacttgaatggtcacaccgcccgagtcaattgcatacagtggatttgtaaacaggatggctccccttctactgaattagtttctggaggatctgataatcaagtgattcactgggaaatagaggataatcagcttttaaaagcagtgcatcttcaaggccatgaaggacctgtttatgcggtgcatgctgtttaccagaggaggacatcagatcctgcattatgtacactgatcgtttctgcagctgcagattctgctgttcgactctggtctaaaaagggtccagaagtaccaatattagcatgtggcaatgatgattgcagaattcacatatttgctcaacaaaatgatcagtttcagaaagtgctttctctctgtggacatgaggattggattagaggagtggaatgggcagcctttggtagagatcttttcctagcaagctgttcacaagattgcctgataagaatatggaagctgtatataaagtcaacatctttagaaactcaggatgacgataacataagactgaaagaaaatacttttaccatagaaaatgaaagtgttaaaatagcatttgctgttactctggagacagtgctagccggtcatgaaaactgggtaaatgcagttcactggcaacctgtgttttacaaagatggtgtcctacagcagccagtgagattattatctgcttccatggataaaaccatgattctctgggctccagatgaagagtcaggagtttggctagaacaggttcgagtaggtgaagtaggtgggaatactttgggattttatgattgccagttcaatgaagatggctccatgatcattgctcatgctttccacggagcgttgcacctttggaaacagaatacagttaacccaagagagtggactccagagattgtcatttcaggacactttgatggtgtccaagacctagtctgggatccagaaggagaatttattatcactgttggtactgatcagacaactagactttttgctccatggaagagaaaagaccaatcacaggtgacttggcatgaaattgcaaggcctcagatacatgggtatgacctgaaatgtttggcaatgattaatcggtttcagtttgtatctggagcagatgaaaaagttcttcgggttttttctgcacctcggaattttgtggaaaatttttgtgccattacaggacaatcactgaatcatgtgctctgtaatcaagatagtgatcttccagaaggagccactgtccctgcattgggattatcaaataaagctgtctttcagggagatatagcttctcagccttctgatgaagaggagctgttaactagtactggttttgagtatcagcaggtggcctttcagccctccatacttactgagcctcccactgaggatcatcttctgcagaatactttgtggcctgaagttcaaaaactatatgggcacggttatgaaatattttgtgttacttgtaacagttcaaagactctgcttgcctcagcttgtaaggcagctaagaaagagcatgcagctatcattctttggaacactacatcttggaaacaggtgcagaatttagttttccacagtttgacagtcacgcagatggccttctcacctaatgagaagttcttactagctgtttccagagatcgaacctggtcattgtggaaaaagcaggatacaatctcacctgagttcgagccagtttttagtctttttgccttcaccaacaaaattacttctgtgcacagtagaattatttggtcttgtgattggagtcctgacagcaagtatttcttcactgggagtcgagacaaaaaggtggttgtctggggtgagtgcgactccactgatgactgtattgagcacaacattggcccctgctcctcagtcctggacgtgggtggggctgtgacagctgtcagcgtctgcccagtgctccacccttctcaacgatacgtggttgcagtaggattggagtgtggaaagatttgcttatatacctggaaaaagactgatcaagttccagaaataaatgactggacccactgtgtagaaacaagtcaaagccaaagtcatacactggctatcagaaaattatgctggaagaattgcagtggaaaaactgaacagaaggaagcagaaggtgctgagtggttacactttgcaagctgtggtgaagatcacactgtgaagatacacagagtcaataaatgtgcactgtaatggactt

SEQ ID NO: 1313 - DNA, 4781 bp, Homo sapiens
  source 1..4781: mol_type = genomic DNA
acgcgcatggaacgcagcgaaggactatggcaggggagaacttcgctacgccgttccacgggcacgtgggccgcggcgccttcagcgacgtgtacgagcccgcggaggacacgtttctgcttttgaacgcgctggaggcagcggctgccgaactggcaggagtggaaatatgcctggaagtagggtcagggtctggtgtagtatctgcattcctagcctctatgataggccctcaggctttgtacatgtgcactgatatcaaccctgaggcagcagcttgtaccctagagacagcacgctgtaacaaagttcacattcaaccagttattacagatttggtaggaagtcacggaatagaggcagcttgggctggtggcaaaaatggtcgggaagtcatggacaggttttttcccctggttccagatctcctttcaccaaaaggattattctatttagttaccattaaagaaaacaacccagaagaaattttgaaaataatgaagacaaaaggtctgcaaggaaccactgcactttccagacaagcaggccaagaaactctttcagtcctcaagttcaccaagtcttagcatacagtgtgtgcccagaactactggaaactgaatgcatttagcatattttgaaactgaagtcattcattaggtaacaaggaattttatcagaaatttgtcattaaaaaaaggtagaaaggtggaacattccctttcagtcaggcctatagaattatttgcacaagtacaagtaaatatgtgtattatatttatagtttgcattttaaatataaaaattatgtatgaaatatttatttcagcattatgtggtaaggcaatggaattgatctggcaaatgtcttttttttcataccagtccataaaggcagtttgctttcagatggcagggccagcaacacaccttcattgtcgtatctccggtgtgtatcagctctccaactctatgtcataattcagttcatggggatcttgattacctttcccttccacaaaatattacactgattggttatatcgatgacattatgctgatttgacctagtgagcaagaagtaggaactacattagacttagtggaaagacatttgcatcagagggtaggaaataaatatgactacaattcaagggccttctaccttagtgaaattggtagggatccagtgacatggggcatgttaggatatttcttctacggtgaaggataagtacttgcatcttgctgctcttaaaaccaagaaagaggcacaatacttagtgggcctctttgggttttggaggcaacattttccaatttcattatgttataccagcctgtttaccaattgactcaaaaagctgctagttttgagtagggcccagaacaagaaaagagtctgcaacaggtccaggctgctgtgcaagctgctctgccacttgggtcatatgatccagcagatccagtggtgtttcagtggcagtggcagatagggatgctgtttgaagcttctggcaggtccctataggtgaatcttggtttaggattttagagcaaagccgtgccattaccaacaaataactagtctctttttgagaaacagctcttggcctgctactgggccttagtagagactgatacttaatgagtcaccaagttaccgtgcaacctgagcttcccatcatgaactggatgttatctgagccaccaacgcacaaagttggatatgcacagcaacactctgtcatcagatggaagtggtatacacatgattgggcctgagaggccctgaaggcacaaggaagttacatgaagaagtaggccaaatttccgtagtccccacttctgctacctgccttctctcttccagcctgcatcggtggcttcatggggacttccctgtgatcagctgacagagaaagagaagacttaggcctggtttacagagtgttctgtatgatatgcaggtaccaccctaaagtggatagctgcagcactacatctcacctctgggctaccttgaaggacagtggtgaagggaaatcctcctggtggacacaactttgagcagtccccctgttgactttgcttagaaggaaaaatagccagatattcaattatatgccaattcataggccgtggccagtggtttggctggatggtcagggagttcaatataactggaaaattggtgacaaagaaatttggagatgaagtatgtggatagacactgaatgggcaaaaagggtgaagatatttgtgccccatgtgaatgctcaccaaagggttagcaaaaaaggattttaataaagtggacaagataacctgttctgtggatactagtaggcctctttctccagccacacctgtcatcacccaattgtttcatgagcaaagtagccatggtgacaagaatagaggttatgcatgggctcagcaacgtggacttctactcaccaaggctgacctggccaaggctatctctgagtgcccagtctgccagcaacagagaccaacactgagcccctgatatgacaccattccccagggtcatcagtcagttgcctagtggcaggttcattacattgatccacctctatcattgaagggatagtgttttatccttactgaaatagatcttactctggatacagattcactttcccttcgcgcagggtgtctgctaaaactaccatccgtggacttacagaatgtctcatctatgaccatggtattccacacagcattacaagaaactcagttcacagcaaaagtgtggcagtgggcccatgatcatggaattttcttaccatgttccctactatcttgaatcaactggctacatagagcagtggaatggcattttgaagacagtaataacaccagctatatagcagtgccttgtagggctgggacaaggttctctagaagactgtctatgctctgaatcaacatccagtatatggtgcatttctcttatgactgggattcacaggtccaggaatcaaggggtcagaataggaaggacaccattcgctattagccctggtgacccactagcaaaatttttgcttcctgttcccatgacttatgcactgctggcctagaggtcttacatagggtggaatattttccactgagagacgcaatcatgatttaattgaactggaagtttaagactgctcctcagccatttggggcttcttatgcctctaactcaatagacaaatgagttacagtgctggctgggtgattgttcctgactaccaagtagaaactggactaccccgaatggtggtaaggtaaagtatgttgggaatacacaggattccttagggcatctcttagtgttatcatgccctgtgattaaggtcaatggaaaactacagcctaattcagacaggaccactaatgatccagacctttcaggaatgaaggtttgggtcaccaccaggtaagtaccatgaccagatgaagtgcttgctgaaggcaaagggaatacagaataaatggtggaataaatactagctttgatcatatgaccagttacagaaacacagactgtgattgtcataagtatgtcctccatattttgctataactacattttgtgtgtgtgtagctttgttttcttctcatttccttattctgtaacataagatgcattgattttatagcatagtgtttaaatattgttaatttttttaactggctccagtgttcaaccttgattaattttacatcatagtatttaagttatgggatatcaaggagagagtaaacatcacatgaagactttaccacctcttctgggaaacgggttaaagtgtttctggtggaatgctggattgttaatcgtgttagatggaattatgaccttgttgttgtctttatgtggcagttaagtatggtttaaagagatgtttatgggtgccaagttgacaagggtaaacttgtgatggttaattttatatgtcaacttgaataggccacagggtgccaaatatctgtttaaacattattctgaagtgtcttgagtgtgtttacagacaagatttgcatttgaactgggggactcagtaaaggagatagccatccccaaggtgggtggacatcatccagtttgttgagggcgtaaataaaataaaaggcagaggaaggaagaattccccccccttttttttcctgcctcattgtttgagctgtgacatctcatcttctgtcctcagatggatttacatcactggcttccctggttctcaagcctttggattcagactgaattataccacaggccttcctgggtctccagcttatagatgacagatcatgggacctcttagcctccataatcatgtaagccactttcttgtagtactggtaaaagatatattaaaccaatctataaaacagatagctatgaaagagaaaggtgacaggcacaagcctaggcaaatagagaagggttcctggacagcctctgacttgcctaggtcattgtgcacacgtggcttgcctgaatgaacatgcccactgtgaaagattccatttctcaacacatgtgcagtaagggaaataaatcaatgtggctcaaactaaccgcccacacatggggtggagccacaaggagtttgctccttatgcaggggagaagccgtgcctcttcagctcgtgtgtggtggcctggcattcaatttgtgaggtgtaaaacctgcatgaaggacccctctttttgtggagagctttccttttgcctaataaattctgccctcctcgcc

SEQ ID NO: 1314 - DNA, 4750 bp, Homo sapiens
  source 1..4750: mol_type = genomic DNA
accactgaccgggacaaaaccctgccaggcatcagaaagctccgcagttcttgagttccacatgcagagcagatgcgacagctagaagtgagtagggcccagaccctggcccaggaagatccactaaaggaggccatccttccgccttcttctgcaggagtcaggatggaaaggcagatgtaaagtccctcatggcgaaatataacacggggggcaacccgacagaggatgtctcagtcaatagccgacccttcagagtcacagggccaaactcatcttcaggaatacaagcaagaaagaacttattcaacaaccaaggaaatgccagccctcctgcaggacccagcaatgtacctaagtttgggtccccaaagccacctgtggcagtcaaaccttcttctgaggaaaagcctgacaaggaacccaagcccccgtttctaaagcccactggagcaggccaaagattcggaacaccagccagcttgaccaccagagaccccgaggcgaaagtgggatttctgaaacctgtaggccccaagcccatcaacttgcccaaagaagattccaaacctacatttccctggcctcctggaaacaagccatctcttcacagtgtaaaccaagaccatgacttaaagccactaggcccgaaatctgggcctactcctccaacctcagaaaatgaacagaagcaagcgtttcccaaattgactggggttaaagggaaatttatgtcagcatcacaagatcttgaacccaagcccctcttccccaaacccgcctttggccagaagccgcccctaagtaccgagaactcccatgaagacgaaagccccatgaagaatgtgtcttcatcaaaagggtccccagctcccctgggagtcaggtccaaaagcggccctttaaaaccagcaagggaagactcagaaaataaagaccatgcaggggagatttcaagtttgccctttcctggagtggttttgaaacctgctgcgagcaggggaggcccaggtctctccaaaaatggtgaagaaaaaaaggaagataggaagatagatgctgctaagaacaccttccagagcaaaataaatcaggaagagttggcctcagggactcctcctgccaggttccctaaggccccttctaagctgacagtgggggggccatggggccaaagtcaggaaaaggaaaagggagacaagaattcagccaccccgaaacagaagccattgcctcccttgtttaccttgggtccacctccaccaaaacccaacagaccaccaaatgttgacctgacgaaattccacaaaacctcttctggaaacagtactagcaaaggccagacgtcttactcaacaacttccctgccaccacctccaccatcccatccggccagccaaccaccattgccagcatctcacccatcacaaccaccagtcccaagcctacctcccagaaacattaaacctccgtttgacctaaaaagccctgtcaatgaagacaatcaagatggtgtcacgcactctgatggtgctggaaatctagatgaggaacaagacagtgaaggagaaacatatgaagacatagaagcatccaaagaaagagagaagaaaagggaaaaggaagaaaagaagaggttagagctggagaaaaaggaacagaaagagaaagaaaagaaagaacaagaaataaagaagaaatttaaactaacaggccctattcaagtcatccatcttgcaaaagcttgttgtgatgtcaaaggaggaaagaatgaactgagcttcaagcaaggagagcaaattgaaatcatccgcatcacagacaacccagaaggaaaatggttgggcagaacagcaaggggttcatatggctatattaaaacaactgctgtagagattgactatgattctttgaaactgaaaaaagactctcttggtgccccttcaagacctattgaagatgaccaagaagtatatgatgatgttgcagagcaggatgatattagcagccacagtcagagtggaagtggagggatattccctccaccaccagatgatgacatttatgatgggattgaagaggaagatgctgatgatggtttccctgctcctcctaaacaattggacatgggagatgaagtttacgatgatgtggatacctctgatttccctgtttcatcagcagagatgagtcaaggaactaatgttggaaaagctaagacagaagaaaaggaccttaagaagctaaaaaagcaggaaaaagaagaaaaagacttcaggaaaaaatttaaatatgatggtgaaattagagtcctatattcaactaaagttacaacttccataacttctaaaaagtggggaaccagagatctacaggtaaaacctggtgaatctctagaagttatacaaaccacagatgacacaaaagttctctgcagaaatgaagaagggaaatatggttatgtccttcggagttacctagcggacaatgatggagagatctatgatgatattgctgatggctgcatctatgacaatgactagcactcaactttggtcattctgctgtgttcattaggtgccaatgtgaagtctggattttaattggcatgttattgggtatcaagaaaattaatgcacaaaaccacttattatcatttgttatgaaatcccaattatctttacaaagtgtttaaagtttgaacatagaaaataatctctctgcttaattgttaactcagaagactacattagtgagatgtaagaattattaaatattccatttccgctttggctacaattatgaagaagttgaaggtacttcttttagaccaccagtaaataatcctccttcaaaaaataaaaataaaagaaaaaggaaaatcattcaggaagaaatgacctgtctaaaaaaacctaaggaagaataataatataagaaaggaaatttaaaaacattccacaagaagaaaaattattgtttatacttctacttatggttatatcttatattctctattcaagtgacctgtcttttaaaaaggcagtgctgtcttacctcttgctagtgggttaaatgttttcaaaaattatagcagtagtagaagttttgtataaaatttgtccttatttgttaattgtatataaatgttaattatttgatacgaatgttatgcatttagtatgcacattgaagtctaaactgtagaagagtctaaaacaagttctctttttgcagattcacatactaatggtttaattctgtgctctgtttaaagtactattataactagagtagatctgaatgaggataaccctaaaatcatgaggaatggaagaatggaccttgaaactacctaggcttttatgcatggcacctctttataatgaagacactttttaaagtttttgtttttgtttcaattaccgctagatttttttttctctttttttaaaatccattttactggaaagttggccagcagagggagtagaaattattaaaattctagtgtttggattgggcccttctctaacagtacatactcattcccaaagcaatccaaaaacaaaatgtgaaccatttgggtttcaaatgttaagaacactaaatagcatgatttaaaaaatgaaaaatgctaacacccaagaaaagaagatattaagtgctttttaacaactcctagagtacaaaatgagtacatcataatgctggctcttctactaatgaaccatcgagtgatattgaataaattatttatcttctcagtttccttatctgtaaattacaatattagactaagtaagtttttccaactcttcactaccaattaccttaggcttttataatgctccgcctacttcagtcccatgtttcagaagcttttgtctattttttaaactcattgattaaataatgattaatgcattctccacattttaatattgcaaaggcccattggagtttctgaagtggctccacagaattgaaataatttcaaataactgtaaaggaactgaaaatcttcacagagatgaagtggggtttccattaggtgctttgaaatttgataacaaatcatcaacttccactggtcaatatatagattttgggtgtctgaggccccaagattagatgccactaatctccaaagattccctccaattatgaaatattttaatgtctacttttagagagcactagccagtatatgaccatgtgattaatttcttttcacactagataaaattacctggttcaaaagtggtttttgtttattaaatttggtaataaatatatataatacacagacaggatagtttttatgctgaagtttttggccagctttagtttgaggactccttgataagcttgctaaactttcagagtgccctgagacacttccagccatccctcctcctgccttcattggggcagacttgcattgcagtctgacagtaattttttttctgattgagaattatgtaaattcagtacaatgtcagtttttaaaagtcaaagttagatcaagagaatatttcagagttttggtttacacatcaagaaacagacacacatacctaggaaagatttacacaatagataatcatcttaatgtgaaagatatttgaagtattaattttaatatattaaatatgatttctgttatagtcttctgtatggaattttgtcacttaagatgagctgcaaataaataataccttcaatggataaccttgcctcctacttc

SEQ ID NO: 1315 - DNA, 3067 bp, Homo sapiens
  source 1..3067: mol_type = genomic DNA
gggaccaagagcggaagtgggtgtgacggggacgggggcccggtgggcccgcggaggaaagatactggggagtgggagccgcggggttcagagcgatgattcccccacaggaggcatccgctcgacggcgggagattgaggacaagctgaagcaggaggaggagactctgtccttcatccgagacagcctggagaagagcgaccagctcactaagaacatggtgtctatcttatcatcctttgagagccgccttatgaagctggagaactccatcatccctgtgcacaagcagacggagaatctgcagcggctgcaggagaatgttgagaagacgctgtcctgcctggaccatgtcatcagctactaccatgtgatcagtggtgacgatgatctggaggcccaggaggacgtgaccctggagcacctgcccgagagcgtgctccaggatgtcattcgcatctcccgctggctggtggaatatggccgcaaccaagatttcatgaacgtctactaccagatacgctccagccagctggaccgctccatcaaaggactgaaggagcatttccataagagcagttcttcctctggggttccctactcccctgctatccccaacaagaggaaagacacacctaccaagaagccagtcaagcggccagggagagatgacatgctggacgtggagaccgatgcctacatccactgcgtcagtgccttcgtcaagctggcgcagagcgagtaccagctgctggccgacatcatccccgagcaccaccagaagaagaccttcgactccctgatacaggatgccctggatgggctgatgcttgaaggggagaacatcgtgtctgctgcccggaaggccattgtgcgacacgacttctccacggtgctcaccgtcttccccatcctgcgacacctcaagcagaccaagcctgagtttgaccaggtgctccagggcacggctgccagcacaaagaacaagctgcctggcctcatcacatccatggagaccatcggtgccaaagcgctggaggacttcgcagacaacatcaagaatgacccggacaaggagtacaacatgccgaaggacggcaccgtacacgagctcaccagcaatgccatcctcttcctgcagcagcttttggacttccaggagacggcaggcgccatgctggcctcccaagagaccagctcttcggccaccagctacagctctgagttcagcaagcggctgctaagcacctatatctgtaaagtgctgggcaacctgcagttgaacttgctgagcaagtccaaggtgtacgaggacccagctctgagcgccatcttcctgcacaacaactacaattacatcctcaagtccctggagaagtctgaactgatccagctggtggcagtgacacagaagactgctgagcgctcctaccgggagcacattgagcagcagatccagacctaccagcgcagctggttaaaggtgactgattacatcgcagagaagaatctacctgtgttccagccgggagtcaagctccgggacaaggagcggcagattatcaaggagcgttttaagggcttcaatgatggcctcgaagaactgtgcaaaatccagaaggcctgggctattccagacacagagcagagggacaggattcgccaggcccagaagaccattgtcaaggagacctacggggcctttctacagaagtttggcagcgtgcccttcaccaagaacccggagaagtacatcaagtacggggtggagcaggtgggcgacatgatcgatcgccttttcgacacctctgcctgagcctgctgctagccctgcctggttccaccagactggcgtgtcattggacagataaaccagtgttagcttgcctctgggctgggtgagcttgaagtcctctgggacagagacctgtctccacgcctccgggagctgtgtccctgagccccctagtcctggctcctgctttttccccacagcccgtgttcccagccgaaccagcactctcccggaagcctggggtccctccacaccttggcttttatgaccctgatggcttctgaaacaggaaaagagagaaggaagacagaggcctgtgcccactgctgctccatgtgtaccaagagcagcagggcagaagggccctccctccagcctaggtcagaggtggggacagagaactcccctacagcccagagatgtggcagggctcagagaagcagccagagctcctggaggaaaggcagtcgggactgaccccctctcttaaaacacattcccgcccgcccacaggcctgaggtctgggacctttccctcccaggagtcccctaggtggctgggggaggcaggctcactggccattttccctagagtccagcacactgcaggaggcgttcggaggaggagttccgccccaccctctacagccttcctcaggcccctgtctctggcccccagcctcagtgcctcttggcccagggccaggcagtcgtggttgcagaaggagcaattaggctgcctgcctgtgggctgggagacagggacaatggggaaaagttaaggagcaaaatgggggttggaagcaaaaaatagggccccacctatttaggacgagattgaagactgacccttgaggcacacttgcactggagatgggtttatttcacgctctgtgcttgtgtgctagcggagggagagctcagggtggcttaatccagaggccctgtcatggcccgcccccagccatgggaaagcaaacttcatcctaaggtgtgcagcccaggccctgcccctttacagtctaggccgcctgccatggggtgcagcctctccaggggctgcgtcagacttgcacgctgcccacatccagattcctgcaaagacgaattgggtgcacagcaccccaaccacatacacgaggaagaagatgcggtcagcagtctcaggccagcttctctgtgacccctttactcctctggagggctctgtggggagagatacagggaaaggagctgttcttcaaggtcccctcaacatgagcggaagagcg

SEQ ID NO: 1316 - DNA, 2856 bp, Homo sapiens
  source 1..2856: mol_type = genomic DNA
cgcaccacccccttcccgccgcgctctctcccgcccccgcgcttccggccccgcccgcccccgcgcggaggactgtgggagcggcttccttggattccgcgcttggcaacggctcggcgtcgcgctttggccaaccgctgcgtcgtccctgggcccgaataactgtcgcccgcttccctcagcgtgaggtacaaatgatgcaaaatgtgcacctggctccagagacagatgaagatgatctttattccggctataatgactacaatccaatctatgatatcgaggaattggagaatgatgcagcttttcagcaagctgtgaggactagtcatggcagaagacctccaataactgctaaaatatcaagcacggcagttactagacctatagctactggatatgggtccaagacatctctggcatcatcaataggaagaccaatgacaggggctattcaggatggagttactagacccatgacagcagtgagagcagctggttttaccaaagcagctttgagaggctctgcatttgacccccttagtcagtcaaggggccctgcttcccctttggaagccaagaaaaaagatagcccagaggaaaaaataaagcaattagagaaggaagtaaatgagttggtagaagaaagctgtattgccaatagttgtggagacttaaaattggccttagaaaaggcaaaagatgcaggaagaaaagagagagtcctggtgagacagcgagaacaagttacaactccagaaaatatcaatttggatttaacttactcagttcttttcaatttggccagtcagtattcagttaatgaaatgtatgccgaagcacttaacacttatcaagttatagtcaaaaataagatgtttagcaatgcaggaatattgaaaatgaatatgggaaatatctatttaaagcaaagaaattattccaaagccattaaattctaccgaatggcattagaccaagttccaagtgtcaataagcaaatgaggattaaaataatgcagaatattggagttacatttattcaggctggtcagtattcagatgctattaattcatatgagcacataatgagcatggcaccaaatctgaaggcaggctacaacctaactatctgttattttgctattggagaccgagaaaaaatgaagaaggcattccaaaaattgattactgttccattagaaattgatgaagataaatatatttcaccaagtgatgatcctcatactaacttagtaactgaagctataaaaaatgatcacctcaggcaaatggaacgtgaaaggaaagccatggcagaaaaatatattatgacatctgcaaaactcattgctcctgtaattgaaacatcttttgctgcaggttatgattggtgcgtggaagtggtgaaagcttctcaatatgtagagctagccaatgatctggaaataaacaaagcagttacatacttgagacaaaaagactataaccaagctgtagagatcttaaaagtgttggaaaaaaaggacagtagagtgaaaagtgcagctgcaaccaatctctcagccctgtattatatgggaaaggattttgcacaagccagcagctatgcagatatagctgtgaactctgatagatataatccagcagctcttactaataaagggaatacagtttttgcaaatggtgattatgagaaggccgctgaattctataaagaggctctaagaaatgattcttcttgtactgaagcactttataatattggccttacctatgagaaactaaatcggctagatgaggctttggactgtttcctgaaacttcacgcaatcctacgaaacagtgccgaagttctttaccagatagcaaatatatatgaattaatggaaaatcccagtcaagctattgaatggctaatgcaggtggtcagtgttattccaaccgatcctcaagttttatctaagctaggagaattatatgatcgtgaaggagataaatctcaagcatttcaatattactatgagtcatataggtattttccttgtaatattgaagtcattgagtggcttggagcctattacattgacacccaattttgggaaaaagctattcagtactttgaaagagcttctcttatacagcctacacaagtgaaatggcagctgatggtagctagttgtttcagaagaagtggtaactaccaaaaagcattagatacttacaaagatactcacagaaaatttccagaaaatgtcgaatgtctgcgtttcttagttcgtctctgcacagatcttggattaaaagatgctcaagaatatgccagaaaactgaagaggttggaaaaaatgaaagaaataagggaacagcgcataaagtcaggcagagatggcagtgggggctcccgtggcaaaagagaaggaagtgctagcggtgatagtggccagaactatagtgccagtagtaaaggtgaacgactaagtgccagactcagagctttacctgggacaaatgaaccttatgaaagtagcagtaacaaagaaatagatgcctcctatgtggacccacttggccctcaaatagaacgaccaaaaactgcagccaagaaaaggatcgatgaggatgattttgctgatgaagaattaggagatgatttgcttccagaataatattcactttaatatttattaaaggaaagaaattgccttatgagatcatcctcatgttaaaccttggattaaatatctaacctgtaattattttttttcactgtcaaaacttaagtaagtgtattctattctgtatgtatgcatttaagttgtttttttcttttaaggaataaaaacaggtaaaact

SEQ ID NO: 1317 - DNA, 3516 bp, Homo sapiens
  source 1..3516: mol_type = genomic DNA
attggtgagtggggcagggcaggagggaactgaagagtgagaaagcattatttcagcaaaaggtctttcctcccttgctctctcctccaaccactggctcagcctctccgcccgctgcctgtgaatgatgcaatggaaggtgtgctggggtcgccctgtgtcccgtgcataggagcatctcagcctccaggtcctctcctttggggctcacggcacccccatgctacgaaccgcaggcagggacggcctctgtcgcctgtccacctacttggaagaactcgaggctgtggaactgaagaagttcaagttatacctggggaccgcgacagagctgggagaaggcaagatcccctggggaagcatggagaaggccggtcccctggaaatggcccagctgctcatcacccacttcgggccagaggaggcctggaggttggctctcagcacctttgagcggataaacaggaaggacctgtgggagagaggacagagagaggacctggtgagggataccccacctggtggcccgtcctcacttgggaaccagtcaacatgccttctggaagtctctcttgtcactccaagaaaagatccccaggaaacctacagggactatgtccgcaggaaattccggctcatggaagaccgcaatgcgcgcctaggggaatgtgtcaacctcagccaccggtacacccggctcctgctggtgaaggagcactcaaaccccatgcaggtccagcagcagcttctggacacaggccggggacacgcgaggaccgtgggacaccaggctagccccatcaagatagagaccctctttgagccagacgaggagcgccccgagccaccgcgcaccgtggtcatgcaaggcgcggcagggataggcaagtccatgctggcacacaaggtgatgctggactgggcggacgggaagctcttccaaggcagatttgattatctcttctacatcaactgcagggagatgaaccagagtgccacggaatgcagcatgcaagacctcatcttcagctgctggcctgagcccagcgcgcctctccaggagctcatccgagttcccgagcgcctccttttcatcatcgacggcttcgatgagctcaagccttctttccacgatcctcagggaccctggtgcctctgctgggaggagaaacggcccacggagctgcttcttaacagcttaattcggaagaagctgctccctgagctatctttgctcatcaccacacggcccacggctttggagaagctccaccgtctgctggagcaccccaggcatgtggagatcctgggcttctctgaggcagaaaggaaggaatacttctacaagtatttccacaatgcagagcaggcgggccaagtcttcaattacgtgagggacaacgagcctctcttcaccatgtgcttcgtccccctggtgtgctgggtggtgtgtacctgcctccagcagcagctggagggtggggggctgttgagacagacgtccaggaccaccactgcagtgtacatgctctacctgctgagtctgatgcaacccaagccgggggccccgcgcctccagcccccacccaaccagagagggttgtgctccttggcggcagatgggctctggaatcagaaaatcctatttgaggagcaggacctccggaagcacggcctagacggggaagacgtctctgccttcctcaacatgaacatcttccagaaggacatcaactgtgagaggtactacagcttcatccacttgagtttccaggaattctttgcagctatgtactatatcctggacgagggggagggcggggcaggcccagaccaggacgtgaccaggctgttgaccgagtacgcgttttctgaaaggagcttcctggcactcaccagccgcttcctgtttggactcctgaacgaggagaccaggagccacctggagaagagtctctgctggaaggtctcgccgcacatcaagatggacctgttgcagtggatccaaagcaaagctcagagcgacggctccaccctgcagcagggctccttggagttcttcagctgcttgtacgagatccaggaggaggagtttatccagcaggccctgagccacttccaggtgatcgtggtcagcaacattgcctccaagatggagcacatggtctcctcgttctgtctgaagcgctgcaggagcgcccaggtgctgcacttgtatggcgccacctacagcgcggacggggaagaccgcgcgaggtgctccgcaggagcgcacacgctgttggtgcagctaccagagaggaccgttctgctggacgcctacagtgaacatctggcagcggccctgtgcaccaatccaaacctgatagagctgtctctgtaccgaaatgccctgggcagccggggggtgaagctgctctgtcaaggactcagacaccccaactgcaaacttcagaacctgaggctgaagaggtgccgcatctccagctcagcctgcgaggacctctctgcagctctcatagccaataagaatttgacaaggatggatctcagtggcaacggcgttggattcccaggcatgatgctgctttgcgagggcctgcggcatccccagtgcaggctgcagatgattcagttgaggaagtgtcagctggagtccggggcttgtcaggagatggcttctgtgctcggcaccaacccacatctggttgagttggacctgacaggaaatgcactggaggatttgggcctgaggttactatgccagggactgaggcacccagtctgcagactacggactttgtggttgcagctggatagctgtggcctcacagccaaggcttgtgagaatctttacttcaccctggggatcaaccagaccttgaccgacctttacctgaccaacaacgccctaggggacacaggtgtccgactgctttgcaagcggctgagccatcctggctgcaaactccgagtcctctggttatttgggatggacctgaataaaatgacccacagtaggttggcagcgcttcgagtaacaaaaccttatttggacattggctgctgaatggtcctatctgctggctctcccctgagatctggacagaggaagatgggagggtgctcatcacccccccagcataatgatcagcctccttcctagagacagactcatgcagattgagatcaaaagtccctctgcttgggatcaaattaatgtttgacagagctggccaggcgtggtggctcatgtatgtaatcctagcacttcgagaggccgaggcaggtggatcacgaggtcaggagtttgagattagcctggccaagatggtgaaaccctgtctctactaaaaataaaaaaaaattagccaggcatggtggcgggcacctgtagtcccagctactcaggaggctgaggcaggagaatcgcttgaacccgggaggtggaggttgcagtgagccgagatcgcgccactgcactccagcctgggcgacagagtgggactccatctc

SEQ ID NO: 1318 - DNA, 7033 bp, Homo sapiens
  source 1..7033: mol_type = genomic DNA
ctgggcatccacttgacagccggcggcgctcgcggccctcagcatgttccgcgaggcgagggttttcctcccgcctgtgggctgaggcggcggcggcccccgaaacgagatgcacctgacgggcgcggcttagaggacgcggctggcgggaagtcccggcagccagcgggagggctttcgttgccgggccgccgccgcctcccgtcgccgccgcgggcccgagcgggagcggcgggtgggcgccccgacatggcggcccggagcgccccgagctgccacctgcggctcgagtgggtgtacggctaccggggccaccagtgccgcaacaacctctactacactgcggccaaggagatcgtatacttcgtggcgggggtcggcgtggtgtacagcccgcgggagcacaggcagaagttctaccggggccacagcgacgacatcatcagccttgcattgcatcctgaacgagtgttggtagcaacaggacaagttgggaaagagccttatatttgtatttgggattcatacactgtgcagaccatatcagttttaaaggatgttcatacacatggtatagcttgcttggcgtttgacttagatggacagcgcttggtttcagttggacttgattcaaagaatgcagtttgtgtttgggactggaaaaggggaaaaatgttgtctatggctcctggtcatacagatagaatatttgatatttcttgggatttgtaccagccaaataaacttgtcagctgtggtgtaaaacatatcaagttctggagtttatgtggaaatgctctgaccccaaaacgaggtgtctttggtaagacgggtgaccttcagacaatactgtgcctagcctgtgcaagggatgaattaacatattctggtgcactcaatggggatatatatgtttggaaaggaatcaatcttatacgaacaatacaaggagcccatgctgcaggaatttttagcatgaatgcttgtgaagaaggctttgctactggtggcagagatggttgtattcgtctttgggatttaacttttaaaccaattactgtgattgatctcagggaaacagaccagggatacaaaggtttgtctgtaaggagtgtgtgttggcgaggtgaccacattctagttggaacacaggacagtgaaatttttgaaattgtggtgcaagaaagaaataaaccttttctaattatgcaagggcattgtgaaggtgaactttgggcacttgctgtccatcctactaaacctttggctgtgactggaagtgatgatcgttcggtcaggatatggagcctagtagatcatgcattaatagcaaggtgtaatatggaagaaccaattcgttgtgcagctgtcaatgcagatggaatccatcttgcccttggaatgaaggatggctcattcactgtacttagagtaagagatatgacggaagttgtacatattaaagataggaaggaggcaattcatgagttaaaatattcaccagatggaacttaccttgctgttggatgcaatgacagctcggttgatatttatggagttgctcagcgttataaaaaagttggcgagtgtttgggatcccttagtttcatcactcatctggactggtcttcagacagtagatatttgcagacaaatgatggaaatgggaaaagacttttttatagaatgccaggaggaaaggaagtgacaagtacagaagaaataaaaggtgttcattgggcttcatggacatgtgtttcaggccttgaagtaaatggaatttggcccaagtattcagatatcaacgatataaattcagtagatggaaattatattggccaagttttagttacagctgatgactatggaattataaaattattccgatatccatgtttaagaaaaggggccaagtttagaaaatatattggccattcagctcacgtaactaatgtcagatggtcacatgattatcagtgggttatttctattggtggagcagatcactctgtctttcagtggaaatttattcctgaaagaaaactgaaagatgctgttcacatagcaccccaagaaagtctggctgactctcatagtgatgaatcagattcagatctgtctgatgttccagaactggattctgaaattgaacaagagacacagctcacctaccgtcgacaggtttacaaagaagatctacctcagcttaaagaacagtgcaaagagaaacaaaaaagtgctacttctaaaagaagagagcgggctccaggaaatagtattcgattacactttgttcacggttacagaggttatgactgtcgaagtaatctgttttatactcaaattggtgaaattgtgtaccatgtggcagcagtgggtgtcatttataatcgacagcaaaacacacagcgtttttatctgggtcatgatgatgatattctctgcctaactattcatcctttgaaagactacgtggcaacaggccaggttggtagagatccctcaattcatatatgggatacagagaccattaaaccattgtccatattaaagggccaccaccagtatggtgttagtgccgttgatttctcagcggatgggaaacgtttggcatcagttggcatagatgatagccatactgttgtgctctgggactggaagaaaggagagaaactttcaatagcaagaggaagtaaagataagatttttgttgtaaagatgaacccctatgtgcctgataaactaattacagctggaattaaacacatgaaattttggcgtaaagcaggagatgtgtgtatctggagagacatctttcttgtaaaaacagtgaaagcgcatgatgggccagtgttcagtatgcatgcattggaaaaagggtttgtaactggaggaaaagatggtatagtagctctttgggatgactcttttgaaagatgtctcaagacctatgctataaaaagagctgcattggccccaggatctaaaggtcttctcttggaagataatccatctatacgtgccatatcattaggacatggtcatattttagttggcacaaagaatggtgaaatactagaagtggataaaagtggcccaataacacttctggttcagggacacatggaaggagaggtgtggggtttagctacacacccttatctgcccatctgtgctactgtaagcgatgataaaaccttaagaatatgggatctctcacctagtcattgtatgttggctgtccggaagctgaaaaagggtgggaggtgttgctgtttttctcctgatggtaaagctttagccgtaggtctcaacgatggaagcttcttaatggcaaatgcggatactctagaggatcttgtgtcttttcatcacagaaaagatatgatttcagatattcgattttcacctggttctgggaaatatcttgctgtagcatcccatgacagctttatagatatatacaatgtaatgagtagtaaacgagtaggaatatgcaaaggagctaccagttacataacccatattgattgggatattagaggaaagcttttacaggtcaacactggtgctaaggaacaattattctttgaagctcccagagggaaaaaacaaaccatccccagcgtggaggtagaaaaaattgcttgggcatcatggacaagtgtacttggtttatgctgtgaaggaatttggccagtaattggagaagttacagatgtaactgcttcttgcctcaccagtgacaaaatggttctagctaccggggacgatttgggatttgtgaagttatttagatatcctactaaagggaaatttggaaagtttaagaggtatgtggcccatagtacacatgtcacaaatgttcgctggacttatgatgacagcatgttggttaccctaggcggtacagatatgtctttaatggtgtggacaaatgagatggaaggctatcgagaaaaaaggccttgtgatagtgaagaatccgacattgattctgaagaagatgggggctatgacagtgatgttacaagggagaatgaaatcagttacaccatcagagccttatcaacaaatattcgcccaatgttaggaatcaagcctcatttacaacaaaaagaaccctcaattgatgaaaggcctccagtgagcagggccccaccacagccagagaaactccagacaaacaatgtaggcaagaaaaagagacctatagaggaccttgtgttggagctcatttttggttatcgaggcagagactgtaggaataatgttcactatttaaatgatggtgatgatataatttatcacactgcatctgttggaattctgcacaatgttgctacaggttctcagagtttttatcaggaacataatgatgatattctgtgcctcacagtaaaccagcaccccaaatttatcaacatagtggcaactggccaagtagttttgagctgttctttgttaactacagctccttctattcacatctgggatgcaatgaacaagcagactttatctatcctaagatgctaccattcaaagggagtatgttcagtcagcttcagtgctactggcaaactattgctgtctgtgggactagacccagaacatactattaccatttggagatggcaggaaggtgccaaaattgccagcagagctggtcacaatcaacgtatttttgtggcagaattccgaccagattcagatacccagtttgtctcagtgggagtaaaacatgtgaagttctggaccctggcaggaagagctcttcttagcaaaaaagggctactgagcacactggaagatgcccggatgcagaccatgctcgctattgcatttggtgcaaataacttgacgtttacaggtaccatcagtggtgatgtctgtgtgtggaaagatcacatattgtgtagaatcgtggcgagagctcacaacgggcctgtgtttgccatgtacaccaccctgcgagatggacttatcgtgactgggggaaaggaaaggccgtcaaaagaaggaggagcggttaaactgtgggatcaggaactgaggcggtgccgtgccttcaggcttgagacaggacaagccacagattgtgttcgttctgtgtgcagaggcaaaggcaagatccttgttgggacaaggaatgctgaaataatcgaagttggagagaaaaatgcagcttgtaatattttagttaacggtcatgtggatgggccaatctggggactagcaacacatccttccagggattttttcctttctgctgcagaagatgggacagtgagactttgggatattgctgataaaaagatgttaaacaaagtgaatttgggacatgctgctcgtactgtgtgttacagccctgaaggggacatggtggctattggaatgaaaaatggagaatttatcattttactagtgagttctctaaaaatatggggaaagaagagagacaggagatgtgcaatccatgatatcagatttagtccggattcccggtatctggcagtaggttctagtgagaactcagtggatttttatgacctaacgctgggccccactcttaacagaatcagctactgcaaagacattccaagctttgtcattcaaatggacttctctgcagatagcagttatctccaggtctctagtggctgctataaacggcatgtctatgaagtgccttcaggaaaacatcttatggatcatgccgctattgacagaattacttgggctacatggactagtattctaggagatgaggttttgggaatctggtccagacatgctgagaaagctgatgtcaactgtgcctgtgtatctcattcaggaatcagtcttgttacaggagatgactttggcatggttaagttatttgacttcccatgtccagaaaaatttgcaaaacacaaaaggttcttgggtcattcgccccatgtgacaaatattcgatttaccagtggtgatcgacatgttgttagtgctggaggtgatgactgcagcttatttgtctggaaatgtgtacatacacctcactgagagatgctgagatgactacagaaattaactttgagaccagaattacagagaagaaaaaccaaaacccaaccctgcatggtcaagtggtgctaacccaagactgtaacagggagaaatgcccagaatcatcaaaatagtgaaagactgatctgttcaaaatatttgctatatgcactgggtataatccgtaatccatacactgccagataatgccatttcaaggaaggatcgaatacttgatggtaaaggccaagtccccctgtattgggaagtgtgtgatttcggcagacctgctgggaaaatttagggtagagcactctttacagaagaactcaaaaacccaatttggataattttcattatctttttagcaaaatggtttcttaatgtttatattttattttcaaggttcattgtttaatgaaatattttattcttgcatttccataaggaaagggaaagtcatgatcatcctaaaggatcacagtttttaaaaggcaaacattttccctaaggaaacagacacaagctttcctagagaatatgatgttttttaggcattaataaggtccttttttataaaggacacttttctcctagtagttttgaattcaggaacagatccaaagttagcagtatatggctgctacatttccattttcattttcgagccatcagtttatgttcagatgccatctctgtaatcgcacatttaaaacataactgtagcctcactaatggaaaagtagtatgatgaacaatcattcccaatggtgtacaatgtaagggttttagggagcaacagtatttaactggaagaaagaattgcatatttaatgtagtctaatatatacacatttgtttaacatgtaaacaaaagtgttaaattcacatatacaacattatacaatttaatcactcttggaataaaatttttatagccttttttctattgggaaaatttgtttagatgtgtgccactccatag

SEQ ID NO: 1319 - DNA, 604 bp, Homo sapiens
  source 1..604: mol_type = genomic DNA
aattgcctctcaccccccggaggggttattttgggggtggttggaggcggtggcggcggcggcgaggaggggaatttccttgtgcctccattcccgggaggggggagcggcgttggaggccaccgtttccagggttatatcctgtgttgtgacctcatggtttaagtgggaataaagatgagtataagcagtgatgaggtcaacttcttggtatatagatacttgcaagagtcaggattttctcattcagcatttacctttggtatagaaagccatatcagtcagtccaatataaatggtgccctcgtcccacccgctgcattgatttctatcatccagaaaggtctacagtatgtagaagcagaagttagtattaatgaggatggtaccttgtttgatggtcgaccaatagagtctctgtccctgatagatgccgtaatgcctgatgtagtacaaacaagacaacaagcttatagagataagcttgcacagcaacaggcagcagctgctgcagctgccgcagctgcagccagccaacaaggatctgcaaaaaatggagaaaacacagcaaatggggaggagaatggagcacatactatagcaa

SEQ ID NO: 1320 - DNA, 2143 bp, Homo sapiens
  source 1..2143: mol_type = genomic DNA
gttgccatggcgactatgtacacagccaggcagccccgcgtggggagtgcaggtggtttcggttgcggcagtcgcgtcccgggagcgtcgctgcctggtgaacgctagaatgggtactaggaaaaaagttcatgcatttgtccgtgtcaaacccaccgatgactttgctcatgaaatgatcagatacggagatgacaaaagaagcattgatattcacttaaaaaaagacattcggagaggagttgtcaataaccaacagacagactggtcgtttaagttggatggagttcttcacgatgcctcccaggacttggtttatgagacagttgcaaaggatgtggtttctcaggccctcgatggctataatggtttttaggatgatcgaagaacgccccacacatgccatcactgtgcgtgtttcctacttggaaatctataatgagagcctgtttgatctcctgtccactctgccctatgttggaccctcagtcacaccaatgaccatcgtggaaaaccctcaaggagtcttcattaagggcttgtcagttcacctcacaagtcaggaggaggatgcattcagcctcctttttgagggtgagaccaacaggattatagcctcccacactatgaacaaaaactcttccagatcacactgcattttcaccatctacttagaggcccattcccggaccttatcagaggaaaagtacatcacttccaaaattaacttggtggatctggcaggctcagagaggctggggaagtctgggtctgagggccaagtcctgaaggaagccacctacatcaacaaatcgctctcattcctggagcaggccatcattgcccttggggaccagaagcgggaccacatcccctttcggcagtgcaagctcacccacgctctgaaggactcgttagggggaaactgcaatatggtcctcgtgacaaacatctatggagaagctgcccagttagaagaaacgctatcttcactgagatttgccagcaggatgaagctagtcaccactgagcctgccatcaatgaaaagtatgatgctgagagaatggtcaagaacctggagaaggaactagcactactcaagcaggagctggctatccatgacagcctgaccaaccgcacctttgtgacctatgaccccatggatgaaatccagattgctgagatcaactcccaggtgcggaggtacctggaggggacactggacgagatcgacataatcagccttagacagatcaaggaggtgttcaaccagttccgggtggttctgagccaacaggaacaggaagtggagtccactttgcgcaggaagtacaccctcattgacaggaatgactttgcagccatttctgctatccagaaggcggggcttgtggatgttgatggccacctagtgggtgagcctgaaggacaaaactttggactcggagtcgcccctttctctaccaaacctgggaagaaagccaagtccaagaagacattcaaagagccactcaggcccgacaccccaccctccaaaccagtggcctttgaggagtttaagaatgagcaaggtagtgagatcaaccgaattttcaaagaaaacaaatccatcttgaatgaacggaggaaaagggccagcgagaccacacagcacatcaatgccatcaagcgggagattgatgtgaccaaggaggccctgaatttccagaagtcactacgggagaagcaaggcaagtacgaaaacaaggggctgatgatcatcgatgaggaagaattcctgctgatcctcaagctcaaagacctcaagaagcagtaccgcagcgagtaccaggacctgcgtgacctcagggctgagatccagtattgccagcacctagtggatcagtgtcgccaccgcctgctcatgggtgcgacagttgggaagaatttgacatctggtacaatgagtcctttgtcatccctgaggacatgcagatggcactgaagccaggcggcagcatccggccaggcatggtccctgtgaacaggattgtgtctctgggagaagatgaccaggacaaattcagccagctgcagcagagggtgcttcctgagggccctgattccatctccttctacaatgccaaagtcaagatagagcag

SEQ ID NO: 1321 - DNA, 1686 bp, Homo sapiens
  source 1..1686: mol_type = genomic DNA
attgctctaaaaggcctctgtgccctgactgatcctccctccctgtcaactcctaatctttttattgtctccatagttttgccttttccagaatgttgtaatcatacagtatgtagtctttttgaattggcttctttcacttagcaatgtgcatttaagtttcctaagctgttgatcatgagactgagtccctttttatacttcaacagacatgagaacggcctcaaggaagactaaccatctgcaatactagaagccatggctgagggatcagtgatgttcagtgatgtgtccatagacttctctcaggaggagtgggactgcctggaccctgttcagagggacttatacagagatgtgatgttggagaactacggcaatctggtttcaatgggactttacactcctaagcctcaagtgatctccttattggaacaagggaaagagccctggatggttggcagagagcttacaagaggcctgtgttcagatctggaatcgatgtgtgaaaccaagttattatctctaaagaaggaagtttatgaaatagaattatgccagagggagataatgggacttacaaagcatggccttgagtactccagttttggagatgttttggaatatagaagccaccttgcaaaacaactgggatatccaaatgggcattttagtcaagaaatattcactcctgaatacatgcccacatttattcaacagacattccttactctccatcaaataattaataatgaagacagaccctatgaatgtaagaaatgtggaaaggcctttagtcagaactcacaatttattcaacatcagagaattcatattggtgaaaaatcttatgaatgtaaagagtgtgggaaattctttagttgtggttcacatgttactcggcatctgaaaattcatactggcgaaaaaccctttgaatgtaaggaatgtggaaaggccttcagttgtagctcatacctttctcaacatcagagaatccataccggtaagaaaccctatgaatgtaaggaatgtgggaaggcctttagttattgctcaaatcttattgaccatcagcgaattcacactggtgaaaaaccttatgaatgtaaagtatgtgggaaagcctttactaagagctcacaactttttcagcatgcacgaattcatacaggtgagaaaccctatgaatgtaaggaatgtggcaaagcctttacccagagctcaaagcttgttcaacatcagagaattcatactggtgagaaaccctatgagtgcaaggaatgtggcaaagcctttagtagtggctcagcacttactaatcatcagagaattcacactggtgagaaaccctatgattgtaaggaatgtggaaaggcttttactcagagctcacagcttcgtcaacatcagagaattcacgctggtgagaaaccctttgaatgtcttgaatgtgggaaggcctttactcagaactcacaacttttccagcatcagagaattcatacagatgaaaaaccatatgaatgtaatgaatgtggaaaggcctttaataaatgctcaaaccttactcgacatctgagaattcacactggtgaaaagccctataactgtaaggaatgtgggaaggcttttagtagtggctcggatctcattcgtcatcagggaattcatactaataaataa

SEQ ID NO: 1322 - DNA, 2498 bp, Homo sapiens
  source 1..2498: mol_type = genomic DNA
attcacggcacccctgatagcgaggtcggcgtcacggtgtaggcgcgcagttggggaaaccgaggcccaacgtgggcggcagctaccagagatggcacacggaggactcaaattcgtccattcagtcattcgttcattcattccttcgggaaaccttgcagatctcccaatctgggcaactctgagctgggcgccagtagtctgggggtgctgacgggaggaggggccagagttttcaaagacgattaaccgaggctcacgtcgcggagccaacctagaagttctctggggacagaaccttggcggacaactgaattaattgttctagtctccaggcccagtacatggatgcttgttggatgaattaatgaaccttgacccacaccaagattctgagaatttggtttctgtcaagatgtgcctctccagccaggcctctcctgccaggacggtggccacagggccatctccctctcctggcgcccccaactgcctggccaaggtgactgctacacacgtggggtcgcagaatccctcgagtcacaacgtcttcaacgtcttgtcagtcccgtgatcgcactaaacgtatttaaagccccctactcctttaagagggtcacctctgtgtacaggcggcctcctcgtactaagtgtggtggcgttcaaggctccgagacacaggcgcctcccgcgccactccccgggcacaggaactcctactcatccctcagtcatcagctcgaaggtttcttctccaagaagcctgcccggcactcgagaagtagagccgcgagccttctcccgggggcccagccttccccagtaccggcagggatcaccccgggagcacgcgcccggccccgctgaggccaggggctcctcggaggcgcgggaaagccggggaaccagcgcagttacggcacacacgaggcggggcctgcacagatgccgggcgcccgatcctcagtgacaaaatagagactccgtggaagggacactgaggtgggggaggctgcggtgatcccataccgcactccaggtgccaggctccgccccgcccctgacggcgcttccggatccggcgggtgccggaagtgggcgggcggcggcggctgcgcgcggaggcggtggaggaggtgctgggagcagccgggcagccgcttcccgcccccgagcaggagccggtgcgagcggagcagagccgaggtcgggccgcgagcggagccggctgagcgggcgccgagctcccgccatggcccggaacacgctgtcctcgcgcttccgccgggtggacatcgacgaatttgacgagaacaaatttgtggacgagcaggaggaggcggcggcggcggcggcggagccaggcccggacccgagcgaggtggacgggctcctgcggcaaggggacatgcttcgggcattccatgcagccttgcggaactctcccgtcaacaccaagaatcaagctgtgaaggagcgagcccagggcgtggtgctgaaagtgctcacaaacttcaagagcagtgagattgagcaggctgtgcagtcactggacagaaacggcgttgacttgttaatgaagtacatttataaaggctttgagaagcccacagaaaatagcagcgcagtgttactccagtggcacgaaaaggccttagcagtaggaggactaggctccattataagagttcttacagcaagaaagactgtttaaaaaaaataaaaagactcatgttaccttgagaagaattctggatgcccaggctggtgaagaagggattgacaatggaccatcttcctaggaactcccaagtaaactatttcaggacatgtatctgctgaaatgtattttattttcaaggtggaggggaaaatcgtctgtttcctaaatcctgtttaggatctgatagtctatgcctttgtctccgagtactgcagaactgacattttgacggtctaccagcgtggcggctggtgttggtcagatgcacctgtgtgcactgggggagggatggtttgggcaggtgcagatccaagggctgtggtaaacgggagagcttgtgtttttgaagtggaaaaaaacccaagagtttgtacagacatcctgtcttcccagagaaggtggacactcttgggctcattgtaaagtgcctgctgcatcaataaagctcttggcttattagtctatacattgcggtgtgtttcgtgtatgtaaaaaaaaatggtaatgaatgggatggtaatgaatgagagttcagttgttgttccggaaacccgatgtggaaggagtagacctgtgtccctgttgagccacccctgggagcgagcatggcaatccacaggccctctgccacaggacgccagcctcggcctcagagctgccggctgctgcagagaggtgtttgctgaataaactatttattgtttcttattcctttgatttgtatgtaattaattttggagcttatttaattaatttaataaagtgccaaacattt

SEQ ID NO: 1323 - DNA, 7164 bp, Homo sapiens
  source 1..7164: mol_type = genomic DNA
gacgcggccggcggggcggacgggagcgggccgcgcgtggcggcggcgatgggcgagggcgggctgcccccggccttccagctgctgctgcgcgcgtgtgaccagggcgacacggagacggcgcggcggctgctggagccgggggcggcggagccagccgagcgcggcgcggagccggaggcgggcgcggagccggcgggggccgaggtggccgggcccggggccgcagcggcgggggcagtcggggctccggtgcccgtggattgctcggacgaggcgggcaacaccgcactgcagttcgccgcggccgggggccacgaaccgctggtgcgcttcctgctgcgccgcggtgcctcggtcaacagccgcaaccactacggctggagcgcgctcatgcaggcggccagatttgggcatgtgagtgtggcacacctcctgttggatcacggggctgatgtcaatgcccagaaccggctgggggccagtgtgctcactgtggcttctcggggcggccacctgggtgtggtgaagctgctcctggaagccggtgcctttgtggaccatcaccacccttcaggcgagcaactggggttgggcggcagcagggatgagcccttggacatcacagccctgatggctgccatccagcacgggcacgaggccgtggtgcgtctactgatggagtggggcgcggaccccaaccacgcagcccggaccgtgggctggagcccgctgatgctggccgcactcactgggcggcttggagtggcccagcagctggtggagaagggcgccaaccctgaccacctcagcgtgctggagaagaccgccttcgaggttgcactggactgcaagcacagggaccttgtagactacctggacccgctgaccaccgtcaggcccaaaacagatgaggagaaaaggcgacctgatattttccatgcattgaaaatgggaaacttccagctggtcaaagagattgccgatgaagaccccagccacgtgaacttggtcaatggggacggggcgacgccactgatgctagcagctgttacggggcagctggctctggtgcagctgctggtggagaggcacgcggatgttgacaagcaggacagcgtgcatggctggacggccctcatgcaggcaacctaccatgggaataaggaaattgtgaaatatctgctaaaccaaggggccgatgtcactcttcgtgcaaaaaatggatacacggcctttgacctggtgatgctgctgaatgatcccgacacggaacttgttcgactgctggcatctgtctgcatgcaggtgaataaagacaaaggccggccgagccaccagcctcccctgccccactcgaaggtccgacagccctggagcatcccagtgctgcccgatgacaagggtggactgaagtcctggtggaaccgaatgtccaatcggttccgaaagctcaaactgatgcagacgctgccccgtgggctgtccagcaaccagcctttgcctttctctgacgagcctgagccagctctggactccacaatgagggctgccccccaggacaagacaagccgctctgcactccctgatgcggcccctgtgaccaaagacaatggtcctgggagcacaagaggagaaaaggaagacacgttattgacaaccatgcttcgaaacggagctcccctcaccagactcccgagtgacaagctgaaagcagtcatccccccattcctacccccttccagttttgagctgtggagctctgatcggtcccggacgcgtcacaacgggaaggcagaccccatgaagactgcgctgccccagagagccagcaggggccaccccgtgggcggcgggggcacagacactacacccgtcaggcctgttaaatttccaagcctccccagaagcccagcctcttctgccaattctggaaacttcaaccactcgcctcattcatcgggcggctccagtggggtaggtgtgagccggcacggtggggagctgcttaaccgctcaggtggcagcatagacaatgtcttgtcccaaatcgctgcccagaggaaaaaagcagccggattattggagcagaaacccagccatcggtcaagccctgtggggccagcaccggggtccagcccgtctgagcttccagcctcccctgcaggtggcagcgctcctgttggcaagaaattggagaccagcaaaaggcctccatctggaacttccactacctccaagagcacctctccaaccctcacgccctccccctcacccaaagggcacactgcagagtcctcagtgtcttcctcgtcatcccatcggcagtccaagagcagtgggggctccagcagtggcaccatcacagatgaggatgaactgactggaatccttaagaaattatcacttgagaaatatcagcccatttttgaggaacaagaggtggacatggaagcgttcctcacactgactgacggtgacttgaaggagctgggaattaagacagatgggtccaggcagcagattctggcagcgatttctgaactgaacgcaggcaagggacgcgagagacaaattttacaggaaaccattcacaactttcactcttcctttgagagcagtgccagcaacaccagggcccctggcaacagcccctgtgcgtgatcctccttcccgcagccaccagcgtgagctctctgaatcccgggaccccttcacgtggccacagccccagccctgcccccgtcacactgctgtgccttagtcatgttgttccctttgctcgggatgcccacttcacgtcgacggcattcattggtagtacttcttgctgcaacaaacttcaacacacagagacagattcccatgtaacagtccagtgggggtgcttctgcttggcaggttggttcacacagtgatgcagggactcagctcctttcatcctgtgctctgccctccccgggagcctcagagtttgcttctggctggcggcaagggaaagggacgatggagaaggcacggctgcttcttacctgccttgctcttaactgacacacatcactcctgctcacgtcctcttggccactggtagtcatgtggccccacctggatgcagaggaggccaggatgtgcagtctccacatagtggcttcccagcaacaacttttgacttagatggggggtatgtattatggtgagaggttagccttcctggcacatcttcccttaaaacttctaacttgcccctcctagtccaagtcacctctcagatgaagtcttttttgaccccctttcagccactgggtcccttagtgctgtgtatgtgactgctgtagcattccactgcacctgctgcatacagcttacattggagatgtgtatgtcaaacgcatttttctttattgcaaagagagtctattatagaaggaaagaagtggaggcctgctgtgtggatcccttcttcttcctagctttcagtttccttatctgcaaagtggaaggtcagaccagatgatgctctggtactccacagtgctcacctgtatcactgcagggctttctgcactgaaagtggaagcagaaggctaatgggtcacattgtgtaaaggtctctggtgctcaaagtttctaggcaaagaagtgaaaatttggaattttgtctacatcctattaatgctgtgttcctcaaaagggaattggcttgtgtagtttcctaccatatcatattttattaaattagaggggccctgacttttaaaacccactggctttctgaagtgttttccagtgaatgactcattcagccagtgcttgttgcatttatgttagctaccaggtgccaagtgtgcagacacaatacagagccttcaggctctcgacaggcaagagaacacctgtaaatagatggtcccgacattgagaggcagcatggtagagtgggcagaccttgtgctctggactcaggttcaaagttcagatgaagctcaatggcctcttagttggagcttagaaccagtatgcccaaagtgctgggtctgcaggaagtacccagtcgatggtaggctgcacagaattctgatctctaccttgagccatgctgagccacaagttggtctccttgggaggtgccatctctcatctgtccctcccccagccatgaaagcccattcccctatgctggctttcagaggctgtcgttaacttactgcccagagcctcgtagttttcttcccctgccctgatggttgggtgtttttcctttaaattctctcagccttacactcacagaagccaactttccacaggactgaagacaaagtgtttcatttagctgttactgatagacacctttacaaaggttactaatgtcccagcctttttaaggagacacactcattcatcccctactatgtgctggcagctttacctttgtcatttcatcctcatggccaccctggaggtggcattgtgtaacctcatcttgcacattcgggaaacggatgcttaggagagggaagcagcttgccagttaaacagcccagaaggagcagatctggggtcagaaccggacctggtgggcttgcaagcctgtgccttttccactaactcctatagactcctggagctagaagcacttgtgattcttgttttaatttactgatggcttcaggggttaacagtaggcctagaattgtttgcctctgaaattcatggcccctgacgttatgtgctttgaggttttgtgcctgctttttgctgtggtcctgtttttttcataacaatatactggtatagcttccactcaggtaagtttgattgaacaatgatacacagctgcaccggggggtcaccttttcacaaatgtagacctccatgaactcattggatgaccctggacagagcggggctattcccattttgcagacaggacagcagaggctccagacaatgcctttcctttctttttcactggactcaagtgtccaaggcttttcatcctaggaagtttgtgtgctggttcacaagaggtccctggcaccctttctggggatgtttggatgcggctggtaggcagggaagagaaagggcaccccagcgggggcatgtgtggaggcagcacggaacatgtaggttatagatcgtcagggaggaggggtcagttgggtgcttgtttttctgatttttggtccttgatcacccccttcccttcccacacgtgtccccagcctgcctgtggctgttccccccacaagaagcacctcccttgcttggcaaccttcaccagcatttcccaaaagtatgctcctgggaaccctagttccacaggataataggtttttcataaagaaacgtagggtgtgtatgtgaaagtggggtgaggttccctggttgagtaggtttggcagacactaaagcgagctacacgatcatctttgctacaggcctctcacaaccttcagcatgccagcatgggtcaggcctcttcacagggccaagaaactcatagcatctcccacattactctcatcacttctccaaggtgcttttgcaagactggaattccttggacaccattggagaagccccgctttttctggaacagcggcaaccaagaggccttgcagccctggaagtgggtcagggcccttggtggtcacctttttctccccagcagctctgcagaggtggcctgcttggcagtgggacatcaggggaccggtcctgctttgagatggcagggtccctgttctgagagctctccagcctgagggcattgagctgaggctccaccctgagctctcctgcagggtggagggcattgtttcccagcacccaggcagtgtcttgctggtgtgtcgtgagtgctggatgtccaagtccctgctggccacggagggctcctgcctctcttcttcagcgccacaaaattacatggaggccagctggttttgtgaggagattgtttattttttaattcttttgtttaccgaacgtttactgagcatctaccctgtgccagccctactcgtacgctctgtctccaaagatgaaaaaggacttctctgccctcaagggaaccccacagtatcttagaggagacaatcatgtcggtgagatggtgtggtgatgaagcctgctgggtatacagctcagggaaagtcatcgatgatggctcaggctcagcctgggcacgccccagaggagagagatggagtggggcctcaaagggcaggtttaggcagaaaagaaaaagggcattccagctggggcatgtgcaaaggcagcacgtaatgtgtaagttctagatcgtcagggaggaagggtcagttgggtgcctgtttttctgtttttagtcctttaaaatgagtagaagcaacctgttaccctggaaagagcactggacatagacctagtgctgcgtgatgttgagcacgtttcttcttccctttgagtcccagtttcccttttggttacagggggatagtagcccccagggatcatgtgaaagtgagaaagcccttttcacactgtggagcggtgcagatgtgggaaacctcaaagatggttgcccattttaaatcctttcatctctcatctctctttcttctctcccttctgccctgacgtagccatggttgggtgggtgaggccagaagaaactgcctccggcaagaggtagcagccgctcaggtggctctgctggcatcggagcccacagaagtgaggagtggccgatggacctgccctccaaatgtgcctgactctgggtcttgctgtcactggatttcctggcatggcagacagaaagaaagatagtttgaccaagtcgtagaagctgatccagcgggtaaaaagggggcagggaactcgtcccttttattcttgcctcagagctgcctgaagacatgggccaggccggaggctggacaactttggataacgctgacctgtacttccaagtaaatgcctcctgaagagcccgggacccttcctgggagaattctgcagccagaatgaaggtgccatcagcaggaggcactgtgaagcaccatcctgtcgctgtccttgtccattcctagcaagttaatcgtgtcttgttaaccagcagttcctgttcaacgtgtaaagagacctgatgttttccctaataaagctgataacaga

SEQ ID NO: 1324 - DNA, 2624 bp, Homo sapiens
  source 1..2624: mol_type = genomic DNA
tttgttgttgacaactgtcagcttcgacctccttctcctcacaaccccgtctaaatggggtttgtaatcctccttcccacccactctcttcactccctggggcaagaatgttgactcctgctctccgtcacctgtcaggatccatcctcctgtcactggcttatatggacacgtcagcccaccgtcacgtgaccgcaggctgctaaaaacagctccagcacccactccaaaccagggcctgaaacaatgtcctccaccgagagaaacgtaaaggacacttgatcacacaatccctggaataatatccaggaaacacttgctggagccactcgcagcacccttccctggcagcacacttggggacagcgaggagatgagcgcatctctgaattacaaatctttttccaaagagcagcagaccatggataacttagagaagcaactcatctgtcccatctgcttagagatgttcacgaaacctgtggtgattctcccttgtcagcacaacctgtgtaggaaatgtgccagtgatattttccaggcctctaacccgtatttgcccacaagaggaggtaccaccatggcatcagggggccgattccgctgcccatcctgtagacatgaagtggttttggatagacatggggtatatggacttcagaggaacctgctggtggaaaatatcattgacatctacaagcaggagtccaccaggccagaaaagaaatccgaccagcccatgtgcgaggaacatgaagaggagcgcatcaacatctactgtctgaactgcgaagtacccacctgctctctgtgcaaggtgtttggtgcacacaaagactgccaggtggctcccctcactcatgtgttccagagacagaagtctgagctcagtgatggcatcgccatcctcgtgggcagcaacgatcgagtccagggagtgatcagccagctggaagacacctgcaaaactatcgaggaatgttgcagaaaacagaaacaagagctttgtgagaagtttgattacctgtatggcattttggaggagaggaagaatgaaatgacccaagtcattacccgaacccaagaggagaaactggaacatgtccgtgctctgatcaaaaagtattctgatcatttggagaacgtctcaaagttggttgagtcaggaattcagtttatggatgagccagaaatggcagtgtttctgcagaatgccaaaaccctgctaaaaaaaatctcggaagcatcaaaggcatttcagatggagaaaatagaacatggctatgagaacatgaaccacttcacagtcaacctcaatagagaagaaaagataatacgtgaaattgacttttacagagaagatgaagatgaagaagaagaagaaggcggagaaggagaaaaagaaggagaaggagaagtgggaggagaagcagtagaagtggaagaggtagaaaatgttcaaacagagtttccaggagaagatgaaaacccagaaaaagcttcagagctctctcaggtggagctgcaggctgcccctggggcacttccagtttcctctccagagccacctccagccctgccacctgctgcggatgcccctgtgacacagattggatttgaggctcctcccctccagggacaggctgcagctccagcgagtggcagtggagctgattctgagccagctcgccatatcttctccttttcctggttgaactccctaaatgaatgatattcattccaactgctgcccctctgtctgcctggctgagatgcatgtgggcagcaggaagcccaagtgaaattaatattatgcagatgatgaaagggacctctgaacaggatttctgcaaaaatagccccaaactgcaattccatatgacttatctaacatcttggggggaaagaatattttgagaaaatagttgcagaaagcactggaaataataaacttgatcttatacaaatcttctattgtgtggaaaatgttgtgaagggtgtgtaggtgtggtacatgtgtatgtcactaacaagtggcaaatggtgaaaaaagtggtcactatgcttttgtctctcataggcactgactttttgttattatattatggtagctttcatttcctttactctttaacagtgcaggtggtcagtgaaaatcagtgtcaactcagaagtgactgatttatcaatacatggacaaaaagtaaatcattgaccaaagctatgaaatgtttcacaaagttttcctcttttgcataacagatgtcactggatgtacattcagaaatgttctttgaatttggtgacactttcatggtccagaaagctgaaggcctgggcatctcttgtgacatttttctaatattagttttagattttcacgtattaggcactttagttgaatcttccagcaaaagctgtctactttctcttttattcactgtggcaccaatctggtaaattgtagaacaattgcatgtgtttaaatatatatacaaacatatcacacattaaatatatatatatttaaatcatgctttgttaatatttgtcccaccataatgcctccttcagaacataagtgtaactttatatgaactcttaaataaatgatgtttttaaaa

SEQ ID NO: 1325 - DNA, 2018 bp, Homo sapiens
  source 1..2018: mol_type = genomic DNA
agcccagccgcgatgtgacgccgcgcgccccggggtcctcggcgcctgcgccctctcctataaagcagacgccgcgccgcgctgcgacgctgtagtggcttcgtcttcggtttttctcttccttcgctaacgcctcccggctctcgtcagcctcccgccggccgtctccttaacaccgaacaccatgccttcaattaagttgcagagttctgatggagagatatttgaagttgatgtggaaattgccaaacaatctgtgactattaagaccatgttggaagatttgggaatggatgatgaaggagatgatgacccagttcctctaccaaatgtgaatgcagcaatattaaaaaaggtcattcagtggtgcacccaccacaaggatgaccctcctcctcctgaagatgatgagaacaaagaaaagcgaacagatgatatccctgtttgggaccaagaattcctgaaagttgaccaaggaacactttttgaactcattctggctgcaaactacttagacatcaaaggtttgcttgatgttacatgcaagactgttgccaatatgatcaaggggaaaactcctgaggagattcgcaagaccttcaatatcaaaaatgactttactgaagaggaggaagcccaggtacgcaaagagaaccagtggtgtgaagagaagtgaaatgttgtgcctgacactgtaacactgtaaggattgttccaaatactagttgcactgctctgtttataattgttaatattagacaaacagtagacaaatgcagcagcaagtcaattgtattagcagaatattgtcctcattgcatgtgtagtttgagcacagatcccaaaccttacggccaagtttcttctagtatgatggaaagtttcttttttctttgctctgaataaaactgaactgtgggttctctataagtggcattttgggctttccctcttttttgtaaagcaatgtctgcctagtttattgtccagttaactttagtgaccttttaaaagttggcattgtaaataaaacaacttgcaaaaaagttttctggaatagaattaacaaaatattatctttattcatgagttggaaactggaaaaaggcttcttgaagtaaatgttctgagtggagctactaggatgtcttccagcctcctgcagtcaaggagtaccactgtattgattagcctgtatgtagcagggctcccttcattgcatctgaggacttgttttctttttctttatttttaatcctcttagttttaaatatattgcctagagactcagttactacccagtttgtggttttttgggagaaatgtaactggacagttagcttttcaattaaaaagacacttaacccatgtgggatgtcatctttttataattagtgttcccatgtggagaaaattattcacactacttgcatgtaaagaataatttaacttttaacattaaaatatgtggtaaaacccagaaagcatccatcatgaatgcaagatactttcaataaaaagtaagttatatagtaggtagttaagtttgcttttgtggacttaaatgtgtctcttcacttaaatgggttgaatgtgtatatatttgttcagcttgaaaagacttagtttatatcctagctcactggaggctgctgacataaccataacttctgtcccttctaattgtcatttatatgcctaactggagctagtactttaattcttaacacaaaattactctgccattgtttccagcttccctcctacaatagaatgaagtttttttgatggcttgagatggctcacaaattttgatttttttttcttccttgtgctccctttttttctccttgcttttccagttaacatctatattcacatgtaatcttgttttctcttcacattcactgagttgttcaggctcagatcatcccttgacagtagtttgccttcatctcacctttcatttgtcccaaattcaccttatttaataaagtcccatatgttgtctcacttaa

SEQ ID NO: 1326 - DNA, 3742 bp, Homo sapiens
  source 1..3742: mol_type = genomic DNA
ggccgtgcgagaggccgagcttgctgcattgcagccgccgcggcgccgctcggctcttcactcccaacaatggcggctccgagcccgagcggcggcggcggctccgggggcggcagcggcagcggcacccccggccccgtagggtccccggcgccaggccacccggccgtcagcagcatgcagggtaaacgcaaagcactgaagttgaattttgcaaatccacctttcaaatctacagcaaggtttactctgaatcccaatcctacaggagttcaaaacccacacatagagagactgagaacacacagcattgagtcatcaggaaaactgaagatctcccctgaacaacactgggatttcactgcagaggacttgaaagaccttggagaaattggacgaggagcttatggttctgtcaacaaaatggtccacaaaccaagtgggcaaataatggcagttaaaagaattcggtcaacagtggatgaaaaagaacaaaaacaacttcttatggatttggatgtagtaatgcggagtagtgattgcccatacattgttcagttttatggtgcactcttcagagagggtgactgttggatctgtatggaactcatgtctacctcgtttgataagttttacaaatatgtatatagtgtattagatgatgttattccagaagaaattttaggcaaaatcactttagcaactgtgaaagcactaaaccacttaaaagaaaacttgaaaattattcacagagatatcaaaccttccaatattcttctggacagaagtggaaatattaagctctgtgacttcggcatcagtggacagcttgtggactctattgccaagacaagagatgctggctgtaggccatacatggcacctgaaagaatagacccaagcgcatcacgacaaggatatgatgtccgctctgatgtctggagtttggggatcacattgtatgagttggccacaggccgatttccttatccaaagtggaatagtgtatttgatcaactaacacaagtcgtgaaaggagatcctccgcagctgagtaattctgaggaaagggaattctccccgagtttcatcaactttgtcaacttgtgccttacgaaggatgaatccaaaaggccaaagtataaagagcttctgaaacatccctttattttgatgtatgaagaacgtgccgttgaggtcgcatgctatgtttgtaaaatcctggatcaaatgccagctactcccagctctcccatgtatgtcgattgatatcgctgctacatcagactctagaaaaaagggctgagaggaagcaagacgtaaagaattttcatcccgtatcacagtgtttttattgctcgcccagacaccatgtgcaataagattggtgttcgtttccatcatgtctgtatactcctgtcacctagaacgtgcatccttgtaatacctgattgatcacacagtgttagtgctggtcagagagacctcatcctgctcttttgtgatgaacatattcatgaaatgtggaagtcagtacgatcaagttgttgactgtgattagatcacatcttaaattcatttctagactcaaaacctggagatgcagctactggaatggtgttttgtcagacttccaaatcctggaaggacacagtgatgaatgtactatgtctgaacatagaaactcgggcttgagtgagaagagcttgcacagccaacgagacacattgccttctggagctgggagacaaaggaggaatttactttcttcaccaagtgcaatagattactgatgtgatattctgttgctttacagttacagttgatgtttggggatcgatgtgctcagccaaatttcctgtttgaaatatcatgttaaattagaatgaatttatctttaccaaaaaccatgttgcgttcaaagaggtgaacattaaaatatagagacaggacagaatgtgttcttttctcctttaccagtcctatttttcaatgggaagactcaggagtctgccacttgtcaaagaaggtgctgatcctaagaatttttcattctcagaattcggtgtgctgccaacttgatgttccacctgccacaaaccaccaggactgaaagaagaaaacagtacagaaggcaaagtttacagatgtttttaattctagtattttatctggaacaacttgtagcagctatatatttccccttggtcccaagcctgatactttagccatcataactcactaacagggagaagtagctagtagcaatgtgccttgattgattagataaagatttctagtaggcagcaaaagaccaaatctcagttgtttgcttcttgccatcactggtccaggtcttcagtttccgaatctctttcccttcccctgtggtctattgtcgctatgtgacttgcgcttaatccaatattttgccttttttctatatcaaaaaacctttacagttagcagggatgttccttaccaaggatttttagccccaaatctctcatattcgctagtgtttaaaaggctaagaatagtggggcccagccgatgtggtaggtgataaagaggcatcttttctagagacacattggaccagatgaggatccgaaacggcagcctttacgttcatcacctgctagaacctctcgtagtccatcaccatttcttggcattggaattctactggaaaaaaatacaaaaagcaaaacaaaaccctcagcactgttacaagaggccatttaagtatcttgtgcttcttcacttacccattagccaggttctcattaggttttgcttgggcctccctggcactgaaccttaggctttgtatgacagtgaagcagcactgtgagtggttcaagcacactggaatataaaacagtcatggcctgagatgcaggtgatgccattacagaaccaaatcgtggcacgtattgctgtgtctcctctcagagtgacagtcataaatactgtcaaacaataaagggagaatggtgctgtttaaagtcacatccctgtaaattgcagaattcaaaagtgattatctctttgatctacttgcctcatttccctatcttctcccccacggtatcctaaactttagacttcccactgttctgaaaggagacattgctctatgtctgccttcgaccacagcaagccatcatcctccattgctcccggggactcaagaggaatctgtttctctgctgtcaacttcccatctggctcagcatagggtcactttgccattatgcaaatggagataaaagcaattctgactgtccaggagctaatctgaccgttctattgtgtggatgaccacataagaaggcaattttagtgtattaatcatagattattataaactataaacttaagggcaaggagtttattacaatgtatctttattaaaacaaaagggtgtatagtgttcacaaactgtgaaaatagtgtaagaactgtacattgtgagctctggttatttttctcttgtaccatagaaaaatgtataaaaattatcaaaaagctaatgtgcagggatattgccttatttgtctgtaaaaaatggagctcagtaacataactgcttcttggagctttggaatattttatcctgtattcttgtttgaattcctcctctatttaagatatatacatggaatcgaagtgtttatgtaatagttctatccttttgcctgcaggtcagttgtaataaatctaggatgtgatgatg

SEQ ID NO: 1327 - DNA, 3091 bp, Homo sapiens
  source 1..3091: mol_type = genomic DNA
acttccggcttcgctgctcttggttctggttctggaggctgggttgagaggtcgccggtccgactgtcctcggcggttggtcagtgtgaatttgtgacagctgcagttgctccccgcccccgagcagccgaggtgcgtgggggaaggggaagaaggaaaaggtccgggtcgcgtttccgctcagtttttgccagggttgaggcgattccagagagcggcggaaaggataagcctcgacttagaagctaccgagttaccctaagaaaggagtctaccatggctcaagaatctcccaaaaattcagcagcagaaattccagtgactagtaatggagaagttgatgactctcgtgaacatagctttaatagggatttgaagcattcattaccatctggacttggtctctcagaaacccaaattacatctcatggctttgacaataccaaagagggtgttattgaagcaggagcatttcaaggttccccagcaccgccactgccatctgttatgtctcctagcagggttgcagctagtcgactggctcagcaaggaagtgatttaattgttcctgcaggtggccagagaacacagacaaaaagtggaccagttattctagcagatgaaattaaaaatcctgcaatggaaaagttagaacttgttagaaaatggagtctaaacacctataagtgtactcgacagattatctctgagaagctaggccgtggctcaagaactgtggaccttgaacttgaagctcagattgatatattaagggataacaagaaaaaatatgaaaatattttaaaactggctcaaacattgtcgacccagcttttccagatggtacatacccaaaggcaacttggagatgcatttgctgacctgagtttgaagtcactagaacttcatgaagaatttggctataatgccgatacccagaaactgctggctaaaaatggagagactcttcttggggccattaattttttcattgctagtgtgaacactttggtgaataaaaccattgaagatacattaatgactgtgaaacagtatgaaagtgccaggattgaatatgatgcatatcgcactgatttggaagaactgaatcttggaccacgtgacgcaaacactctgccaaagattgagcagtcacagcatctcttccaagcacataaggaaaaatatgataaaatgcgcaatgatgtttctgtcaaattgaaatttctagaagaaaataaggttaaagtattgcacaatcagctggtccttttccacaatgccattgccgcttactttgctgggaatcagaagcagcttgaacagacacttaaacagttccatatcaaattgaaaacccctggagtggatgccccatcttggcttgaagaacagtaaaatcacagcggaaaataaaaagaaagtcgcgttgttatatttctaaaccaacctaacaagaattaagcagagttgggggaagtgggaggggtgacaagcattatagtgattcttgcacaaacagctttaatttttccctttttcatactttaacaattgaactgttaagggtggttttaatgtaaacatagtttctataatctgaacacaataattttcctttttgagaaatccttttgtattgtgagggttgatggctatttctgtagtttgaaaacatctaatagagatttgcactgacaagataaaaattcaaggtttttggtcctggaaatgagggccgattgtaacttttccaaagggaggtttacatgatttgtatcaacatcagatattttatatgtgaatatattaaacatctttaagagattcattttcatgtattaaagaaaaaagaaactattttgcagagtaaagttatatggtgttcctgcagcgtccacacagaggcagcagctctaatgaatgattagcttgtggagttgtggcaaatacctttttaaaaatgaatctgtaccactgtaattttatttagacttttttttaaagacacagaaatcacactgtcatttctgtgaggcttttaagcttatgaatttgcttcacccgaagtcattggacagttacatttgcaatttcttttggttcataacaaaacctgcttaagagaatttttttttttgacaggtggacgtgggaatggaaattcttaatggtttctggagtagaaatctgtacttagaaaactagtttttgggtcagttccattttgatagaagtgaatacatagacagcttttattgacttccatatgtaacaataccgtttaagccttaaatcacagatatgtgccttctcagatacagtaattcttgttcaaccaatgtacaaaatccataaagaaacccctgttggataatgtttgatgtgtctattccttccatggaatggagcactatgtatgaatgttgggtttctttgtacttgttaagccacatttgaggtttatggtaaaaatcatcttttgagtttgctctttggtttttcttcattccttttgaggattgggaaaacagaaagattctttgatttgggtaatgaagaggtaatttgggacagtgtggtggtaccaggaagaaagaggattggaaaggccagtactgttttagttgctcggcactgttggttttgttttaatgtggttgccctgtccactacatggttctatcagtagtgtaatccattttcaatgtaaagctcttttagtttttgtcatagacataaattaatattttgagaggcatccctcacctgttcatttcttctgtgttgaaatgaagtacttaaaattaccgttatacatgaactttgtggactgtaagatttgttatatatgttcaaatgccttttagctggctttttaattaatatgcctgttttgagtgcttaatacaatgtaatgtgattgtaaatcatacctattttaaatcattccttcctgtatatttgtactcagagagccttattttattcttccagcagaattactacttgtgatagttcatttacattccccagaatgtgcctctagtgtgaattttgtattcttattaaacgtgtttgctgcagtaaa

SEQ ID NO: 1328 - DNA, 5176 bp, Homo sapiens
  source 1..5176: mol_type = genomic DNA
tgggataaacggagctggacgactcagtctcttggtctgtggctgctgcggttacctggatgggcgagcacctctgaggctggctttgttacctgggcaataagggactagcagttcagccgttttctatgcctgctggatttgtttgtatttgttcccagccactgctcatgtaatgtactcccttaaccaggaaattaaagcattctcccggaataatctcaggaagcaatgcaccagggtgacaacgctaactggaaagaaaattatagaaacatggaaagatgccagaattcatgttgtggaagaagtagagccgagcagtgggggtggttgtggttatgtgcaggaccttagctcggacctgcaagttggcgttattaagccatggttgctcctagggtcacaagatgctgctcatgatttggatacactgaaaaagaataaggtgactcatattcttaatgttgcatatggagttgaaaatgctttcctcagtgactttacatataagagcatttctatattggatctgcctgaaaccaacatcctgtcttattttccagaatgttttgaatttattgaagaagcaaaaagaaaagatggagtggttcttgttcattgtaatgcaggcgtttccagggctgctgcaattgtaataggtttcctgatgaattctgaacaaacctcatttaccagtgctttttctttggtgaaaaatgcaagaccttccatatgtccaaattctggcttcatggagcagcttcgtacatatcaagagggcaaagaaagcaataagtgtgacagaatacaggagaacagttcatgagttgcattgtagcagacaatggacaactgtagtttctgaattgacttctatagccatcttttcccttttttggagagtagactagcaaaactcccttttttctcttgccttttttatgcataaatggaggtcaatttgattgtcctgacctactgtataagtaaatttcaaatgtcattactttctctttgttattataatgtgtgattaaatgcttttttaaattgctaagggaaaataacaaagtgttagtaatcattgctttctgtagaagaaaaaggtttaaatttaaaatgtgtatttagagcatggagagaatcatttaatgaagcctatttttctgttccagcaactgtttttatgaaagaaaaacttgaaatgctacttaacttactatttcaaagggaagtatatttctttttaaagaatctttttaagattaaaaatgaataccttaaatctcccaaaagagataaccagtatctgaaggtttatacaatatttacacagtggctacaatattcacaaaattcttatgttctcttatgaaaaatatacacttttcattttgtcttcttctttttttttctttttttagatggagtttggctcttgtcacccaggctggagtgcaatggcgcaatctcagctcactgcaacctctgcctcccgggttcaagcgattctcctgccccagcctcccatatagctgggattataggtgcctgccaccatgcccagctaatttttgtgtttttagtagagatggagtctcaccacataggccaggcagtctcgaactcctgacctcaggtgatccacccaccttggcctctctaaatactgggattacaggcgtgagccactgcatccgacctcattttgtttttttcaattctgttatcggcatttctttctttttttttttaatgtataggtgttctgtcatacgttattgtgagctttggttctttgaacaggtgatctattctcttacattttgtgctttttatcttgggtgcctagcattctgtttttttgatcctatgtcataattttttgagaaaatgtttgatactgcaagatcattgtttagtggtctgttttctacttcagtattctaccagagaacatattttttaggggagaagggttatggttttgtaagaaactttaaatatacttttaggagacccacaatcatttacagttttatctttggcctttgaataggttcttttttctttaatgtctccgtatttgaagaactgagctctgtacattataaatttgcttaaagattttgattttttcttcagaatatggtatacttaaaattaattaattaagacagtttcttttttcttttcttttttttttttttcgagacagggtcttgctctgtcacctaggctagagtggagtggcatgaacacaacgcactgcagcctctacctcctgggctcaagcagtcctcccacctcagtctcctgagtagctgagactacagctgtgcgccaccacatctggctaattttatttttatttttgtagagacaggagtcttgccatgttgcccaggctgatctcaaactcctaggcttaagtgatcctcccgccttagcctcccaagtgctaggattacaggcatcagccaccacgcctggcctgatagtttccacatagtttttcatgacttagaagatatcattgccatgtaggttttatttttaaaagtcttgagctcttcttaaatatacattataaagagcaagcatagatggaaagtgcatattgaacacatctgtgcatttgagaaggcaggctttcatatgctgtcatgagcaaaaagtagaagtgataaatgcaagttatgttttgagattgcttacaccgtgacaagatgccatcacttgtgatgttatgaactgttataaactctttgcttctgctaagaagcagtctaaatataatcaacgtacagtgagctctttgaagccaaccaaggcaggcagaaccctcttaaatatgagactgatgtataggttctctctatggtcagtatcactggataagccttctcctttcataagaaaggatgtatttaaatacattttattttgctaaatcctgtttagttttcagccattaaatgtcacatgaagccttgatagaatttgttcataatggctcatgtattattattatttttgagatggagttttgctcttaatgatattattattatttgagacagagttttgctcttattgcccaggctggagtgcagtggcgtgatcttggctcactgcaacctctgcctcccagcttcaagcgattctcctgtatcagcctcccaagtagctgggattataggcatgtgccaccatgcccagcaaattttgtatttttttttggtagagacagggttcaaccatgttggtcaggctggtctcgaactcctgaccgcaagtgatccacacgccttggtctcccaaagtgctgggattacggtgttagccactacacctggcctggattgtgtattatttatgtctgtagtttatatgcttagttgttgcctatagtgatctgggtaagattcaaacatttatcttttgtatcttctacagaagtgctttgagcatcaaatttgttttaacgttaaattgtagtttgctgtattaaaatagatcaatgaatataattcagtcttttaggggcaccaagtaaagcataaggtcatatatactatacaatatgtttattgcacttcccatggggataaatcactctgtcattcctagttattttaaaaaaagaactttatgattacggtcctctttctcacatactgcaaacttaaaagatacatacaccaaatataggtctgttttaaaggagaggaaaaatagttcaaggagtttttgcctctttgtttttcaatagattattctgccattttttaaaggaaagggaaaatgaaaacagcatgtctttttaaacattgaaaagaaatatggaggctttaaaccgcaaactgaaaaagctgagtagaacaaaggcagtggagcatacaatacaattctatttatttgaggttaattgaagttaataatttttaaatttttttctaattttatgccttaaaataggtttctgattacataaaatttgaatagaacactcaagaagtatgtagatttttgaaaaacccaaacaatattcttcttagatttttggaggcaaaatttagaccagtatactaattcaaaagacaaatatttcagaggaagtggagtacagtatttaacattttgtttgcaattttactttttcttcccttcttccctattgaaccttgattaaaatgtatgaatacaatacttggatttttttttttcagcttagactctgataatttcagtggtagtggggaaacctgaatttgtcagcatgattatttgtaactcagattgttcaaatgtatatagaaggtccccttcaagtgttgtttctccaagtagtcataaatgtagcaagtataaatcagaatatcatcttataatcttacagagttaacctaatgagtcaatacctttataagcaaaaccatgataaatttaaaaacaacagaaatgtggcatgattacttatttatttgttccaggtgactctaaatagttgatttttctgcctgaaggatcctgaacatatttagttaccctgtagttatttaggaatttaaaccagaagactttgaagttgtatattcttgcaatgcataaaatgacattataatcaacaaacttatggtttgtttcaattgatgcacacaaaaaataacttatagttagacttttctatttcaagtaaagctttgagttacttgtttttatacatattcatcatgtaccctttattgtttctaggtgttgatatactttaataaaaatgatatgtttaatattttcccattaatatatttctttgaagctatttgttttaaaagatgtaacacttatttgctgtcaaattctgaattaaaaaatctgttggtggccaggcgcagtggctcatgcctgtaatcccaacattttgggaggccaaggagatggatcacttgaggccaggagttcaagaccagcctggccaacatggcaaaaccccatcactaaaaatacaaaaattacccgggcatggtggtgggtgcctgtaatcccagcttcttaggaggctgaggtaggagaattgcttgaccctgggaggtggaggtggcagtgagccgagatagcaccactgcacttctagttgacagagtgagactctgactcaaaaaaaaaaaaa

SEQ ID NO: 1329 - DNA, 3345 bp, Homo sapiens
  source 1..3345: mol_type = genomic DNA
attggtgagtggggcagggcaggagggaactgaagagtgagaaagcattatttcagcaaaaggtctttcctcccttgctctctcctccaaccactggctcagcctctccgcccgctgcctgtgaatgatgcaatggaaggtgtgctggggtcgccctgtgtcccgtgcataggagcatctcagcctccaggtcctctcctttggggctcacggcacccccatgctacgaaccgcaggcagggacggcctctgtcgcctgtccacctacttggaagaactcgaggctgtggaactgaagaagttcaagttatacctggggaccgcgacagagctgggagaaggcaagatcccctggggaagcatggagaaggccggtcccctggaaatggcccagctgctcatcacccacttcgggccagaggaggcctggaggttggctctcagcacctttgagcggataaacaggaaggacctgtgggagagaggacagagagaggacctggtgagggataccccacctggtggcccgtcctcacttgggaaccagtcaacatgccttctggaagtctctcttgtcactccaagaaaagatccccaggaaacctacagggactatgtccgcaggaaattccggctcatggaagaccgcaatgcgcgcctaggggaatgtgtcaacctcagccaccggtacacccggctcctgctggtgaaggagcactcaaaccccatgcaggtccagcagcagcttctggacacaggccggggacacgcgaggaccgtgggacaccaggctagccccatcaagatagagaccctctttgagccagacgaggagcgccccgagccaccgcgcaccgtggtcatgcaaggcgcggcagggataggcaagtccatgctggcacacaaggtgatgctggactgggcggacgggaagctcttccaaggcagatttgattatctcttctacatcaactgcagggagatgaaccagagtgccacggaatgcagcatgcaagacctcatcttcagctgctggcctgagcccagcgcgcctctccaggagctcatccgagttcccgagcgcctccttttcatcatcgacggcttcgatgagctcaagccttctttccacgatcctcagggaccctggtgcctctgctgggaggagaaacggcccacggagctgcttcttaacagcttaattcggaagaagctgctccctgagctatctttgctcatcaccacacggcccacggctttggagaagctccaccgtctgctggagcaccccaggcatgtggagatcctgggcttctctgaggcagaaaggaaggaatacttctacaagtatttccacaatgcagagcaggcgggccaagtcttcaattacgtgagggacaacgagcctctcttcaccatgtgcttcgtccccctggtgtgctgggtggtgtgtacctgcctccagcagcagctggagggtggggggctgttgagacagacgtccaggaccaccactgcagtgtacatgctctacctgctgagtctgatgcaacccaagccgggggccccgcgcctccagcccccacccaaccagagagggttgtgctccttggcggcagatgggctctggaatcagaaaatcctatttgaggagcaggacctccggaagcacggcctagacggggaagacgtctctgccttcctcaacatgaacatcttccagaaggacatcaactgtgagaggtactacagcttcatccacttgagtttccaggaattctttgcagctatgtactatatcctggacgagggggagggcggggcaggcccagaccaggacgtgaccaggctgttgaccgagtacgcgttttctgaaaggagcttcctggcactcaccagccgcttcctgtttggactcctgaacgaggagaccaggagccacctggagaagagtctctgctggaaggtctcgccgcacatcaagatggacctgttgcagtggatccaaagcaaagctcagagcgacggctccaccctgcagcagggctccttggagttcttcagctgcttgtacgagatccaggaggaggagtttatccagcaggccctgagccacttccaggtgatcgtggtcagcaacattgcctccaagatggagcacatggtctcctcgttctgtctgaagcgctgcaggagcgcccaggtgctgcacttgtatggcgccacctacagcgcggacggggaagaccgcgcgaggtgctccgcaggagcgcacacgctgttggtgcagctaccagagaggaccgttctgctggacgcctacagtgaacatctggcagcggccctgtgcaccaatccaaacctgatagagctgtctctgtaccgaaatgccctgggcagccggggggtgaagctgctctgtcaaggactcagacaccccaactgcaaacttcagaacctgaggctgaagaggtgccgcatctccagctcagcctgcgaggacctctctgcagctctcatagccaataagaatttgacaaggatggatctcagtggcaacggcgttggattcccaggcatgatgctgctttgcgagggcctgcggcatccccagtgcaggctgcagatgattcagttgaggaagtgtcagctggagtccggggcttgtcaggagatggcttctgtgctcggcaccaacccacatctggttgagttggacctgacaggaaatgcactggaggatttgggcctgaggttactatgccagggactgaggcacccagtctgcagactacggactttgtgctggatgttatttgggatggacctgaataaaatgacccacagtaggttggcagcgcttcgagtaacaaaaccttatttggacattggctgctgaatggtcctatctgctggctctcccctgagatctggacagaggaagatgggagggtgctcatcacccccccagcataatgatcagcctccttcctagagacagactcatgcagattgagatcaaaagtccctctgcttgggatcaaattaatgtttgacagagctggccaggcgtggtggctcatgtatgtaatcctagcacttcgagaggccgaggcaggtggatcacgaggtcaggagtttgagattagcctggccaagatggtgaaaccctgtctctactaaaaataaaaaaaaattagccaggcatggtggcgggcacctgtagtcccagctactcaggaggctgaggcaggagaatcgcttgaacccgggaggtggaggttgcagtgagccgagatcgcgccactgcactccagcctgggcgacagagtgggactccatctc

SEQ ID NO: 1330 - DNA, 2803 bp, Homo sapiens
  source 1..2803: mol_type = genomic DNA
cgccgccgcgggctcaagcggggcggccgggccagcgcggggcggcggcgggcaggggcggcgagtgcgcgggcgctcgccgccgcccttctcggcgggcagcgcgcgaggaccaggccgaggaggaagtggcggcggcggcggcgggactgcgcgccccagctccgatccccgttccgcgtccccgccgccgggaggaggtgcccactcgctcgcggcgcgcgccggccgccagactcggcctgtgggcgatttcctccggacccaggctccccgcccgaggaggaagatgcagacctttctgaaagggaagagagttggctactggctgagcgagaagaaaatcaagaagctgaatttccaggccttcgccgagctgtgcaggaagcgagggatggaggttgtgcagctgaaccttagccggccgatcgaggagcagggccccctggacgtcatcatccacaagctgactgacgtcatccttgaagccgaccagaatgatagccagtccctggagctggtgcacaggttccaggagtacatcgatgcccaccctgagaccatcgtcctggacccgctccctgccatcagaaccctgcttgaccgctccaagtcctatgagctcatccggaagattgaggcctacatggaagacgacaggatctgctcgccacccttcatggagctcacgagcctgtgcggggatgacaccatgcggctgctggagaagaacggcttgactttcccattcatttgcaaaaccagagtggctcatggcaccaactctcacgagatggctatcgtgttcaaccaggagggcctgaacgccatccagccaccctgcgtggtccagaatttcatcaaccacaacgccgtcctgtacaaggtgttcgtggttggcgagtcctacaccgtggtccagaggccctcactcaagaacttctccgcaggcacatcagaccgtgagtccatcttcttcaacagccacaacgtgtcaaagccggagtcgtcatcggtcctgacggagctggacaagatcgagggcgtgttcgagcggccgagcgacgaggtcatccgggagctctcccgggccctgcggcaggcactgggcgtgtcactcttcggcatcgacatcatcatcaacaaccagacagggcagcacgccgtcattgacatcaatgccttcccaggggactgccaagtgtgctttatagaaggctggaagaccgactgaagtaggaagctgtcacatgtttgagccaactgagcaaagcagctgttgcctgccagacagccaccccaagaccaagggagccagcctgtcgtttgtccttctagcctggaagaccagttcttggctcttgggcactcacattggccactggccacaactgctgaatggcttcactaatgtccctggggtctgtatctgccctctcttctattccctagaaactctggccgggcatggcggctcacgcctgtcatcccagcacttagggaggctgaggcaggtggatcacaaggtcaagagatcgacaccatcctggccaacatggtgaaaccccatctctactaaaaatacaaaaattagctggacatggtggtgggcgcctgtagtcccagctacttgggaggctgaggcaggagaattgcttgaactcgggaggcgtaggttgcagtgagccaagatcgcaccactgcactccagcctggcaacagagcaagactcctcaaaaaacaaacaaacaaacaaacaaactctgatcattcacccggtgggatccccggcagctccttctccttcccgagctgtggctcatgggccattggattcagagaccttgagctgggtgctggctgccctaaaggagcacgacccctccagcctggtgaccgggaggcagagaagtgcagctgtccttgacaaaggcccagcctctgctgcctcaggccagcctggccacaccccgatgccacagtcatctgccccgcccaggcataagcctgactcaggtgatacaggcgaggcttctcccatgggtcctccccttgtgagaaagggtctgtgctgtgtaccttctctctgcacagccattgtcagtgtggtttggagtgagtgagcctcccgcactgctcaggggagagctggtgagcatgactccatggcctcctgctggttggggtcttcttctgattctcacccgcaggagcacccagacccccccttttcagaaatgattacattttcccttcaagagtcatctgtgacctggtggtgtggagggactgtcccctcctgcagcctggccgacccccttcctccagggctgtgtggaatcacctctcagaagctcactctgaaaagccactcacagggatttcaccaggatgttgctgttcctgccgacacctgggctttgtgacaaatgctgtttgcttcaagctgttcacaagcaacttcaccagaatcccaagctggttcgtacttaatttgtgtacatacatatgcataatatacatgaccatgtatgagatacagacaccatggcttctgtccattggctcattcgcctggtcgcatgttcactccatgaggttaggacactgcgggtggctttgggatgggtggtttcagggacaaggtgtcgctatgatctctgtatttgctaactagtcttgttttgatttctaacggtctagtggagtacagttaatgttgtgtttatttctgtaactgtaggggtggagtataaacctaacttttggaaacatgaagaaataaacaatagcgccagccgtt

SEQ ID NO: 1331 - DNA, 4007 bp, Homo sapiens
  source 1..4007: mol_type = genomic DNA
attccctctggctgcggttccgagaatagcctggaaggaggcaggggtcccggctggagaagcgtggctccggggtggggcgtgcagggctagcccgggcgggggacgctgcccaacaagcaggtttgcggagactcacaccttagattctgagtttttaagcttgtttcctcagagcagggaactcacgaacgtttcgtgagcacctacggtatgcagggtacggtgcggagccctagcgtcactgacgaccgggacagccgagcagctgcaggatccgtcgtgttccccagcaattttaatatttaaaaattcgttactgttgctgttacttgttttctatgtattggatgtcttcgtgaagaaccctcaaaagtgcaacgaactcctccctgccagagggcggccgcgcgctctgagtacagcttcccgcggagccggccaggtcctccagggcaccgagaaagccggccagaacggcggcgccctatcccggccgcagcgatgtctgacggcgccccggaactgacggtctggtacgcaggggcgctcggcggcaacggcggctttaaacgtcatcgcgggcgcgacgcctgagggacagtctggggtttggctgtccggacggtgcagcggcgaggccggccgcgaagatgccagtggcggtgatggcggaaagcgcctttagtttcaaaaagttgctggatcagtgcgagaaccaggagctcgaggcccctggaggaattgctacacccccagtgtatggtcagcttctagctttatatttgctccataatgacatgaataatgcaagatatctttggaaaagaataccacctgctataaaatctgcaaattctgaacttgggggaatttggtcagtaggacaaagaatctggcagagagatttccctgggatctatacaaccatcaacgctcaccagtggtctgagacggtccagccaattatggaagcacttagagatgcaacaaggagacgcgcctttgccctggtctctcaagcgtatacttcaatcatcgccgatgattttgcagcctttgttggacttcctgtagaagaggctgtgaaaggcatattagaacaaggatggcaagctgattccaccacaagaatggttctgcccagaaagccagttgcaggggccctggatgtttcctttaacaagtttattcccttatcagagcctgctccagttcccccaatacccaatgaacagcagttagccagactgacggattatgtggctttccttgaaaactgatttatcactctgagttcaagattcatcttcagaatcctgtatactgacaaacgtagaaatgtaaagtttgtattttcaatttattggatggcttaagcacctcagcattccttactatgtgataaaatacatatagaatataagatatactatatacattttgtccataaacgttatgctgaatagttgttgaaacagttctcattttgtagtatttaataatctggatggagcctgtcagtattacagttagttttctagtgactcataaaataagatttcctgtttcatgtagaatagtgtttgtcaactgtcttttctctgtcccagcacatgccgtactcttatatgtaccattggttgataattataatgattcatttggacttgaagaaagattgtccccaggcacagtatctgaatcactggggattatgattcaccctctttggagaacatgctctcttttcaccccccacctcctgagagccactaatgtaagatacagaaacatagctgaggaacaaatagaccatttccatactaaaccagtttgttaactttagattttttccaatagtgtgagtatatccattgctggcagtggagggcttgccatgaaaatgcaacttatttaagacatttatgagacatattaacttgtgctgtcgccttttagaaggagaaacttaagtgtggaatgcattatatgggcaaagaagctatgaagatacatgatacactttgtacaactatcctgcagcccattggttgcttatatttatcgcttggctcaagttctgccctttggagaaatactgagcaagtctttcattctctgtgtgacagccctctgaatatttgaagttgtttgttgtaacttaaggttataacagcccttagttcatttactctgcatttgttcaataaatatttaactgaattcttcaattatttcatctaagatagtttctggaaatttcactctcgatctttctgtggacacaatctattttgtcattgtgtctatatgaatctcttaagtagaaatgagttgtatggtgaatctgtgtagtgataattatataatttatttattttgaatgcattttagtggctatttcagtttttcttaacatatatgggaatactttttgaattgcaattttatttaacccggataggtaagtcatattaaaattccttgttttacagttgaggaaatgggaattcaagaagtcagaggatcaggagagtgatcaagagaatgacagtgccagtttttttaacttccaggtattaagtacaaattgtatccatggttattttttaaaagcagattagagtcaatccaaatattcattaataggggattgtttgaataaacagcagtgtagactacgcaggtgtaaaaggagtgaagatctctatactaaactggaatgatctccagagtgagaacatagaaagcacatgtagtttatatggttattttgagggtaacaaaaggagaatgattacaattatatatatgtacatatttccttatatttcaaaactaagcaattgggggatatatacaaaatgaatataatagttccctaaagaggaaggagaggacagtgaactactacatagagaaaaaataatctcaagtgatcaaacacaatatttcaattttacattgtcagtgggatatacactaaggacagaaaaaaatcttagactaatgaatgtggtttttcatgattaatttcacaaaatcttgatatcttttttattattaaaagtatagattaaattaataatcatgtaacattagaccccagtaatcttaaatttgacatggaaacctcattatatgctttatttttctttgtaaacagtaaatatttcccactcctgtctacatgaaaaggtctagagtaattacagttcagtaacaatgagcaccactagtacccagatggtgttctttcattttcatttgcaattaaaaggaatcagaacttatttgcaaaacagctaatagttccagggcagtaagtgtacaagttcatatctggtacaagatgtccaggattcaaggaggctcttaaagacttgggattctgtcaaagggttatacaagccaacttgaagggatttctacaggccatgtaaaaatgagacagtttgagcatgaaatatttgtatatgtgtctgtttttaactcttaataacctcatcactgtacaagaaaggcagggtaagtgcttgatttcacttccctttattatcagttctcaggacaaattgatatgctgccaatctctaaagcaacaaaatcgaacctgtagggtagtcaaaaagctcatgctggaaaattccaccgaataaagataaaagttagaaaaacggtacttgcagcccttaatgaaacaaagaagggatcatggaaatatatatcaatgctgttgagaccacagggtaagaaattgagattgagcatgaaatatgtccagtacatccatcagcctgtctttgtgctctggctatttctgagccagccatctgtgtacaagtgtagcctgacagcaccctgtttcagatccattggatatctctaaaatttgctctgggacttaccctggcactactatcaggatgcccacacaaacctgattgggcagcccatcagcagttgtgaacatgacatggtgaataaacactctcttccttgtc

SEQ ID NO: 1332 - DNA, 5226 bp, Homo sapiens
  source 1..5226: mol_type = genomic DNA
aatttacctaatcccacgtccctaacggtcttcggaagcgaagcagtgtcaacagtccctggtaaacacaagtagtattacaagtcgggagctcttcaagtcttggatgagactgtagagcggtcttgtgcggcaatgtgctaccttaaaataaataaataaataaacccctgttatgtccggagtttgtttccacccggagaggaatggaagagcaccagagagcgcttagctttctggttggatgttttggtgtgggacttgttttgtgaccaacaatatgaaaggctctgaggtcagcttggagaagaaaaaaaagattaagatgccagtgaagagacttcgtgaggtagtttctcaaaatcatggagatcatttggttttgctgaaagatgagttgccctgtgttcctccggcattgtctgcaaataaacgtcttcctgttggaacggggactagtttgaatggaacatcacgtggttcatcagacttaacttctgctagaaattgttaccagcctctattagaaaatcccatggtgtcagaaagtgatttttctaaagacgttgcagtgcaagtgttgcctttggataaaatagaagagaacaacaagcaaaaagcaaatgacatcttcatttctcagtatacaatgggacagaaagatgctctaagaacagttttaaagcaaaatgtctcactttgtctcacaggctggagtgatcacagtggggtgatcacaactcactgcagtctctacctcctcaggctcatgagatcctcccacctcagcctcccgagtagctgggactacagagctcaaagcatgcctgtttttaaggaagtaaaggtacatctgttagaagatgcaggcatagagaaggatgctgttactcaggagactagaatttcacccagtggaattgattcagctacaaccgtggctgcagcaactgctgctgccattgcaaccgcagctccgttgataaaggtgcagagtgatttggaagcaaaagtcaattctgttacagaattacttagtaaattacaggagactgataaacacctgcaacgtgttacagagcagcaaacaagcattcagaggaaacaagagaaattacattgtcatgatcacgaaaagcaaatgaatgtgtttatggagcagcacataaggcatcttgaaaagttacaacaacaacaaatagatattcagactcattttattagtgctgcactcaagactagtagttttcagcctgttagtatgccctcctccagagcagtggaaaagtattccgtaaaaccagaacaccctaatcttggtagctgtaatccatctttatataacacatttgcttccaaacaagcacctttaaaagaagttgaagatacgagttttgataaacagaaatctcctttggagacaccagcacctcgcagatttgctcctgtacctgtttcaagggatgatgaactatcaaagagggaaaatcttttggaagaaaaagaaaatatggaagtgtcgtgtcacagaggaaatgtaagactattggaacaaattttgaataataatgattctttgacaagaaaaagtgaatcatcaaacaccacctcactaactaggtcaaaaataggatggactcctgagaaaacaaacagatttccttcctgtgaagagctagaaacaactaaagtgactatgcagaagtctgatgatgttcttcatgaccttggccaaaaagagaaagaaacaaatagcatggtccagccaaaagaatctctgagtatgttgaagcttccagatcttccacagaattctgttaagcttcaaacaaccaatacaacaagatctgtattgaaagatgctgagaagattttgagaggagtacaaaacaataaaaaagtacttgaagaaaacctggaagctattattcgtgcaaaagatggagctgccatgtattcgcttatcaatgctttatctaccaacagagagatgtcagagaaaattaggatcagaaagacagtggatgaatggattaaaactatttctgcagaaattcaggatgaactgtcaagaacagattatgaacaaaaaagatttgatcagaagaatcagagaaccaagaaaggtcagaatatgactaaagatattagaaccaacacacaagataaaactgtcaacaaatctgtaattccaagaaaacattctcaaaagcaaatagaagagcattttagaaatctacctatgaggggcatgcctgcttcaagtttacagaaagagagaaaggaagggcttttgaaagcaaccacagtaatacaagatgaagattatatgttacaagtctatggaaagccagtttatcagggccatcgaagcactcttaaaaaaggaccatatctcagatttaattctccatctcctaagtccagaccacagagaccaaaagtaatagaacgagttaaaggcactaaggtaaagtcaataagaacacagactgacttctatgcaacaaaacctaagaagatggattctaaaatgaaacattctgttcctgtgttacctcatggcgatcagcaatatttgttcagcccaagtagagaaatgcctactttttcaggtacattggaaggtcatctgattcctatggcaattcttttaggacaaacccaaagtaatagtgataccatgccacctgctggagtgattgtcagcaagccacaccctgtaactgtgactacttctattcctccatcatctcgaaaagtagaaactggagtaaagaaacctaacatagccattgtagaaatgaagtcagaaaaaaaggatcctcctcagcttactgtgcaggtattacccagtgtagatattgacagcatttcaaatagtagtgctgatgtcctttcacctctgtctagccccaaagaagcatctcttcctcctgtgcaaacttggataaagactccagaaattatgaaggtagatgaagaagaggtgaagtttccaggaactaactttgatgaaataatcgatgtcatacaggaagaagaaaaatgtgatgaaattccagactctgaaccaattctggagtttaacagaagtgttaaagctgattctacaaaatataatggtcctccatttccgccagttgcttctacttttcagcccactgctgatattctggataaagtaattgagagaaaagaaacactggaaaatagcttaattcaatgggtagagcaagaaataatgtcaagaattatctctgggctctttccagtccagcaacagattgcacctagtatcagtgtttcagtcagtgagacaagtgaaccactgacttctgacattgtggaaggaacaagcagtggcgccctccagctttttgttgatgctggtgttcctgtgaactcaaatgtgattaaacattttgttaacgaagctcttgctgagaccattgctgtcatgctgggtgacagagaagcaaagaagcaaggtcctgttgctacaggtgtttctggggatgcttcaacaaatgaaacatatttgccggcaagagtgtgcaccccactgcctaccccacagcctacgcctccttgctcaccttcatcacctgctaaggagtgtgttttggtaaagactccagattcttctccctgtgattcggatcatgatatggcttttcctgtgaaagaaatatgtgctgaaaaaggagatgatatgcctgccatcatgcttgttaatactccaacagttacccctactactacacctcctccagcggcggcagtttttaccccaactttgtcagatatttccattgataaattgaaggtatcaagcccagagcttcccaagccatggggtgatggagacctgccactggaagaagagaaccctaactcacctcaagaagaacttcatccaagagctattgtaatgtctgtggctaaggatgaagaaccagagagtatggatttccctgctcagcctccacctccagagccagttccctttatgccatttcctgccggcaccaaggccccttccccctcacagatgccaggttctgattcatcaacactggagagcacattgagtgttactgtcactgaaactgaaactttagataaacccatctctgaaggagagattttatttagctgtggtcaaaaattggcccccaagattttagaagatataggactgtacctgacaaaccttaatgatagcttatccagcactctgcatgatgccgttgaaatggaggatgatcctcctagtgaagggcaagtgattaggatgtcccataaaaaatttcatgcagatgcaattctttcttttgctaaacaaaaccaggagtcagcagtttcccagcaagcagtctatcattcagaggacttggaaaacagtgtgggtgaacttagtgaaggacaaagaccccagctaacagcggcagcagagaacatcttaatgggacattctctctatatgcagccacctgtcactaatacacagtctttggatcaacaatgtgatcctaaaccattatctcggcaatttgacacagtttcaggtagtatttatgaagattcatgtgctagtcatggtccaatgagtttgggagaattggagttggagccaaattctaagctggttcttcccacaacacttctgacagcacaagaaaatgatgttaatttaccagtagccgctgaagatttttcccagtaccaactaaagcaaaatcaggatgttaagcaagttgaacacaaaccatcacaaagttacctacgtgttagaaataaatctgatattgcaccttcacagcaacaagtttcaccaggtgatatggatcggacacaaattgagcttaatccgtacctcacatgtgtattttcaggtttgggggtacatgtgaagaaggtttcctgtataggtaaactcgggctgtggaggtttgtcatacagattatttcatcacccaggtgggaaagcagtgccactctccgcttcacagatgccccctgccaagatgtcagtgatgctgccgtcagtgaacctcgaggactgctctcagtctctgagtctcagcacaatgcaggaggacatggagtcttcgggggcagataccttctgaacgggaagagacagccagcacagtgtttatgccactggttttaaagtcattttaccttggcttaaaaccctctctcagactgtttggtttt

SEQ ID NO: 1333 - DNA, 4596 bp, Homo sapiens
  source 1..4596: mol_type = genomic DNA
atataggaatggtgcttctcctgagacagaggttttgtttagttttttcatctgatactggatatgtcaagatgaatctatgaacttcaagcaaaacttattgaagctttggtatatgtgagtaatttgttttagagaactggagcctatagcgatataaaaaaatagcaaatgcaaacattttatatgaatctactagcatggaaattctcccatgcttaccgtccaagtgaagacttcctctgccatagaacttccagattccttggcattcctgtggatcatcccaatgtggtactgtgaaggcaaggagcttgaaaattccccagatattcacatcgtccaggcaggaaatctgcactcactgaccattgcggaagcctttgaagaggacacaggacgctattcctgctttgcttctaacatctatgggacagattcgacttctgctgagatttatatagaaggggtttcttcttctgactcagaaggcgaccctaacaaggaagagatgaatcgaatccagaagccaaatgaggtgtcatctcctcccactacctctgcagtcattcctccagcagtaccccaagcccagcatttggtggcccaacctcgtgtggcaaccatccagcagtgtcagagccccaccaattacttgcagggattggatggaaaacctatcattgcagctcctgtgtttacaaagatgctacaaaatttgtcagcttctgagggtcagctggttgtctttgaatgcagagtaaaaggagctccatctcctaaggttgagtggtatagagaagggactttaatagaagattctccagattttaggattttacagaaaaaacctcgatccatggcagagccagaggagatttgcaccttggtcattgctgaggtgtttgcagaagattctgggtgcttcacatgtactgcaagcaacaaatacggcacagtgtcaagcattgcacagctgcacgtgagaggaaatgaggacctcagcaacaacgggtctcttcactcagccaactctaccaccaacctggcagctattgagccacagccctccccaccccactcagagcctccatctgtggaacaaccccccaaacccaaactcgagggggttctggtgaaccacaatgagccccggtccagctccaggattgggcttcgtgtgcacttcaacctgcctgaagatgacaaaggaagtgaagcatcctccgaggctggtgtggtgaccaccagacagaccaggcccgattctttccaggagaggttcaacggacaggcaacaaaaaccccagagccttcttcccccgtgaaagagccccctccagttctggccaaacccaaacttgattccactcagttacaacagcttcataaccaagtcttactggaacaacaccaattgcaaaacccacctccttcatctcctaaggagtttcctttcagcatgactgttttgaactccaatgctcccccagcggtgacaacatccagtaagcaggtgaaggctccttcatcacagacgttcagcttggcccggccgaagtatttcttcccctccacgaacaccaccgcagcaactgtggccccttccagctctccggtgttcactttgagcagcactcctcaaactattcagaggacagtgagcaaagaaagcctcttagtgtctcacccctctgtgcaaaccaaatctccaggagggctttccatccaaaatgagccactcccaccaggcccaacagaaccaacaccaccaccattcacattttccatccccagcggaaaccagtttcagccccgctgtgtgtccccaattcctgtctctcctaccagccggattcagaacccagtggctttcctcagctctgttctgccttctctccctgccatcccacccacaaatgccatggggctgcctagaagtgcaccatccatgccatcccagggattagcgaagaaaaatacaaagtctcctcaaccagtgaatgatgataacattcgtgaaactaagaacgcagtgattcgagacttggggaaaaaaataactttcagtgatgtcagaccaaaccagcaggagtacaaaatttcaagctttgagcagaggctgatgaatgaaatagagtttcgcttggaacgtactcctgttgatgaatcagatgatgaaattcaacatgatgagatccccacgggcaagtgtattgctcccatctttgacaagagactcaagcacttccgggtcacagaaggctctccagttacattcacctgcaaaattgttgggatacctgttccaaaggtttactggttcaaagatgggaagcagatttctaagagaaatgagcactgcaaaatgaggcgagaaggagatgggacatgctctctgcacattgaatccactaccagtgatgacgatggcaactacaccatcatggcagccaacccccaggggagaatcagctgttctggccacttgatggtacaaagtttgcccattcgcagtcggctaacctctgctggtcagtctcacaggggaagatcccgagtgcaagaaagagacaaagagcccctacaggaacgctttttccgaccacatttcctgcaggctcctggggatatggtagctcatgaggggcgcctctgtcggctggactgtaaggtgagtggtttaccgcccccggagctgacatggctactcaatggccaacctgtgctaccagatgcctcccacaagatgctggtcagggagaccggagtccactctctgctcattgacccactcactcagcgcgacgcagggacctataagtgcatcgctaccaacaaaaccgggcagaattcttttagtctggagctctctgtagtagccaaagaggtgaagaaagcacctgtgatcctggagaaactacagaactgcggtgttcccgaaggccaccccgtgagactggagtgccgcgtgataggcatgcccccacctgtgttctactggaagaaagacaatgagaccatcccttgcaccagagagaggatcagtatgcaccaggacacaacagggtatgcctgccttctcattcagccagccaagaaatcagacgctggatggtacacgttgtcagccaagaatgaagccggcatcgtgtcgtgcactgccaggctggatatatacgctcagtggcaccatcagatcccaccgcccatgtctgtccggcccagtggcagtcgctacggatctctcaccagtaaaggacttgacatattttctgccttttcctccatggaaagcacgatggtgtattcatgctcttctcggagtgtagtggagagtgatgaactttaagaatgtctaggtacctgctgtgtaagagagcggactgtggagggggaatgagaacaagccagacttggtggtttccaagcaaccgaagttgagtaagttcccacactgctggacctgtggcaaagagtgctttgaataagtcagctagggattcttgcagtctcagctgagggagaaaggtagggctgtgccttctaaagattccaacagagatgtgagaagataatacagatgaaccaaagatgtcacacagttgccatccactgctttgggaaaaaactagcatgctcccctgctccctgttgtgttagggatgtttaggtcatactaggagcaattaggagccatatgcctgggctgagaagagctaggcagtagtgaccttaggatatgactaactcaccaaacaatgccaaggagaaaggcggacaggtcaccatcacctttcatcgattacatgtatagcagtagttttggtgaattcaccaaatcagcttccacttagcattaggaggtcatgccatacaactcacgtatgcgggcaaacacttttgatttgcatatcctgggtgtactgagccacataataaggtgtcaaaatgtgcttgagattccaaaaacttgctgaaacacttgatattgcacagtgcacttattttgtggccaaagcatggccttaccagcttgtctgcactattttcttttgggtggtgactgtttttttctgactttgcatatccctagacactagaactaaaggattggtaataaaccaatcagaaagaaatcctctgtggggtcactttaaaaactactagcttcaactaccacttacaaaatgtgcaagagtcatcatttgcccataaaatacacctcatgggctcctacccctttccccaaaagtctgaaagtgtaggaggaaggaagagatacaaacaaggagaggaaatgatgggagagtgttgtttttgtcacttgccccagcagagcaggggttttggaaggagaggtctttaatagctttgaaatgctttgagatcattggtcaaattgcattttctatgtagagaatattctgctaggtggaaaagttgggagaaaggggaatatgcatctttattctaatcaccaattcaaaccctgcctcttaaggaatttttagacttaagttcactgtgatatccctagtacctagaagagtacctagcacaaagtagacattcaataaatatttgctggttgaa

SEQ ID NO: 1334 - DNA, 1304 bp, Homo sapiens
  source 1..1304: mol_type = genomic DNA
actaagttcctcctgcgcggtctatggcggactatgttaggtcttaatggtgggaggacgcccgagtgctcggcccgtttcaccccgaggaggaaggacactgggtcatgacgccatcagagggcgccagagcagggaccggacgcgagttggagatgttggactcgctgttggccttgggcggcctggtgctgcttcgggattccgtggagtgggaggggcgcagtctcttgaaggcgcttgtcaagaaatctgcactgtgtggggagcaagtgcatatcctgggctgtgaagtgagcgaggaagagtttcgtgaaggttttgactctgatatcaacaatcggctggtttaccatgacttcttcagagaccctctcaactggtcaaaaactgaggaggcctttcctggggggccgctgggagccttgagagccatgtgcaagaggacagatcctgttcctgtcaccattgctctcgattcactcagctggctgctacttcgccttccctgcaccacactctgccaggtcctgcatgctgtgagccatcaggactcttgtcctggtgacagctcctcagtggggaaagtgagtgtgctgggcttgctacatgaagagcttcatggaccaggccctgtgggagctctcagcagccttgctcagactgaggtgaccctgggcggtaccatgggccaggcctcggcccacatcctgtgtcggaggccccgacagcgcccaactgaccagactcagtggttctccatccttccggacttcagcctggatctccaagaggggccctctgtagagtcccagccctactccgatcctcatatacccccggtggatcccacaactcatttgacctttaaccttcacctgtccaagaaagagagagaagccagagatagcctgatcctgcccttccagttcagttctgaaaaacagcaggctctcctgcggcctaggccagggcaggctaccagccacatcttctatgagccagatgcttatgatgacctggaccaagaagacccagatgacgacctggatatttgactggccagatttgattagattgtaattggagggggcgcgggaagactttgggcccagaaccatctttctattgtttgtgttagccttaccctgtccctgccccaccttggttccccttgtctatggagccccgccttgtgagccaggaagcagcgtctcatcaggacagaaggtaggatgaagacatggggtaatgtgagagagtagaacacccccgtacctaataaaaatctttatttttttatt

SEQ ID NO: 1335 - DNA, 7121 bp, Homo sapiens
  source 1..7121: mol_type = genomic DNA
aaaagggcggtggggcggggggcggggcagggagagggagagaaatccagcagacatctagctctgcctttctttcccagccacagccagggtagggctgataaggcgctgatgcgttgatggcagccttgcagagctagacctgcacttaacttgcagctgcctcccgagcctccaagatgtccacgccctgggtgacaggcggcagggcgctgccccgtgctcccccggctctgctcgacagcagcacgcagtgagagcctcgccgccgccgaggagcaactcatgtaacggcacagccaacaagatgaacggagctttggatcactcagaccaaccagacccagatgccattaagatgtttgtcggacagatcccccggtcatggtcggaaaaggagctgaaagaactttttgagccttacggagccgtctaccagatcaacgtcctccgggaccggagtcagaaccctccgcagagtaaaggttgttgtttcgtaacattttatacaagaaaagctgcacttgaggcccagaatgcactgcacaatattaaaactttacctgggatgcatcatcccattcagatgaaacctgcagatagtgaaaagtccaacgctgtggaagacagaaaattgttcataggaatggtatcgaagaaatgtaatgagaacgacatcagggtgatgttctctccatttggccagatagaagaatgccggatcctccggggacctgatgggctgagtcgaggctgtgcgtttgtcacattttctacaagggcaatggcacagaatgcaatcaaagccatgcatcagtctcagaccatggagggctgctcttcacctatcgtggtgaagtttgctgacactcagaaggacaaagagcaaaggcgcctccagcagcagctcgctcagcagatgcagcagctcaacactgccacctgggggaacctgacagggctgggcggactgaccccacagtatctggcgctcctgcagcaggccacctcctccagcaacctgggtgcgttcagcggcattcaacaaatggcaggcatgaatgctttacagttgcagaacctggcgacgctggctgctgctgcagctgcggcccagacctcagccaccagcaccaatgcaaaccctctctctaccacgagcagcgccctgggagccctcacgagtcccgtggctgcttcaacccccaactccactgctggtgcagccatgaactccttgacctctctcgggactctgcaaggactggctggagccactgttggactgaataatattaatgcactagcagttgctcaaatgctctcaggtatggcggctctgaatggaggacttggcgccacaggcttgacgaatggcacggctggcaccatggacgccctcacccaggcctactcaggaattcaacagtacgcagccgccgcgctgcccactctgtacagccagagcctgctgcagcagcagagcgctgcaggcagccagaaggaaggtccagagggggcaaacctctttatttaccaccttccacaggaatttggagaccaggacattctgcagatgttcatgccttttggaaatgttatctctgctaaagtcttcattgacaaacagaccaatctgagcaagtgctttggttttgttagctacgacaatccagtctctgcacaagctgctatccaagctatgaatggctttcagatcggcatgaaacgcttgaaggtgcagctgaagcgttccaaaaacgacagcaaaccttactgatcctaaccccagaggctccctgctctcattttagctttcttagggtaagtcccacgagccagcctgtctcaacagggaaggcagaggaggaccacattgccaacttttaccaagagagacggttatttttacaataaggcctccatgtccccacccacttcccctacccagtttgccataattaaaacttgggctactttgtttctattgagtaattcctcctccagttgtgccactgtattctcctttgttttgcgatttgaatctccttttacctttttttttaatttttttcatttttgcttttttttaaagagaagcatatacacaaataaatggcatcttgagaatttaaaaggcaaacaaacaaacgctaatgtgcaattctaactctgaaaccactggtgccccgagagcactgcctggagaattcacccctccttgcccggcgcccgcccccggagggagggcccggtgcttagaggttaacttggtggcctaggagagggagaagccaggagaagcacttactccaaccacacgtctttccactacatcggcttgttttactaagtaggattttattttagggttcaaagaaacatgacatttattggtcaaaatattacactggttgtctattttgttattgttttattttagtttttagaaaggattaatgtacaaaaagatttagagatctgtttcttaaagctacagggtttaaaaaataaaaatgagtgaaaatacttgatgtttcttgaaagataaatttaataataataaataaatacataaatacataaataaaaaagaaagccacaggcctgtaaattttatttgtaaaaaagcatttctatttttatacaaaatttttactgcctcagaaataatggaagttatttattgcctattgttaacttattgggtacctaaagagcagttctctgtctagctagaaccttctgaagtagtctctagaggaattgttctaggaatgggctttttttcaccgttgaaccctagacctgaagttcatgctttatcctctcgttgtttgtatctgtctgattattttgtttgtaacttccattatctagtttacagttcagtcgtctgactttccccgtatgtcacatttgttgaaactggaccttctccccctgtccctcaccccaaaacacccggaatccatcccgtttcgctctctccagatggattctcttggggtttcattgtgctgtggataaggagtgtaagaaatgcaaattatgtgaatggctcggagactccctaatgacctaagatttgcattagtttttctcctgcacccttaaaagtgattttgttgccgctgcatagattctgtgtaactttttactcttccttgttttttccctagacatcttcatgcccgttagttcatcgtttgcctagcatgtccctgtggcgtctcaaaaaaaagtttcatcgtcccgtcattgtttctgatgtctttctgacctcacatcatatttggttctcctactgacctttgatctagtttgacctttgaaatttgcatgtgacctcatctagctatgaattctgggaagtcaatgtgaaaaacattgctgcattcatgcaagactgaaatttattattagacaaattcattatagaaaaaacctgtggcaaaaacgtttctttcttattttttttcttttcctaaaacagacttgaaagtattatacagggattggcattcttcccggtcactggtaacaatagcaatatgtgtccagggacacagaatgttggtttctaacagactacttccaaaaacagtttgagaaaaaaactgtctgattttaagtctctagaggtctgtaatagtttttacatttttcaggcagtgtaaagttttttgataaggccattttaggtggctcactttctcattaagatatatatatagaaccactttttgtagattagtataagaaaaatatttaccctgttttggggcaaatgctacctatttgtgtcaccttttgctgaactcacagttagacaatccatggtttaatgcacatgaaattacctatattttatactgtttcaatgtacaggagaaaggttactgtaaactgtgttatgttggtgcttctgtgaattaagttgtggtttcatcatgagtcttaatgttctttgttgataagacaagtttagaattggtttacttaatacaaaaaaaaaaaaaagaatttcaaaaaaaaaagttgtttgcttaaaaaaaatttcatgtgagggaaaaaaaaaaaacctattccagaataagttttgtgttggcttgtgaagcattgatgtcattttttttaattgtggactatttagatgtgtttgtgttcagcaaaatgtgatgtttttttcttttaaagaaaaaaagtgaaaatatatagtgccaaattccaaaggtacttccttcctagagcttcagtgtgtttcttgtgagaagtaatttgataacatgggtattttattatgtgttttgtataaatccctaatatttaaaaaaaaaaacaaaacaaaaaaaggttacaaagtttgttaacttgctatcctgtggtcttgttgcctgaaattgttattgtttgttatttctctctgatgttttttgtaagacattgtataagtgcccatgtcccacttttttaaccactccgcacatcagtgctgtgaaggcaacctcaccatgtattttcttcataatctatggaaacctctaaggtgagaaagttttgaacttttaaccctttctacccagagctatctggaatgttgatgactttttatactgtcatgatttgagtttgttttggggtgtttccaatttggatttttttccctgcatctatcctctaagttgtttcggtttgactactttgttctttggttaagatccaaaagaaaacagaaaacaattccacgaggccaatctaaagggaaaaaatcctacactacttttactacttttgattatttctcatttttgggaaaagaattcctaatgtgctactagaattccttcttcagttttaacgagtaattggataaaccctgagggaaaacggaggtagattcagcacctaacaatcctgtatgcttttgagatcacgtttagtgctatgtcctagtctagaatattttcatataccttgcagtaaaacgactttgtggcaggacagtctcttgaggggttttgtttctgtttcctaaatactcctaaataatatttctaatcagccattatgctggggcatctctgatcccagtaggtacctctgaatataccaggtgtctggagttagaagcccatagccctttcccagcctttttggtttttttaattgaacacatttcatctaagtaaagctcagttctttatcacaatttactgaccaaatacctagcaccagttcctgctgccactttttaaagtgccatatgactttctacgaacaggtaccttgctgtcttgacaaatcctaatgtcacgcctacagccccaacacaagctccagtcttcctcttcggcatgccctggaagcttcttccagtcttcctcttcggcatgccctggaagcttcttggcctcagctccccttccccgctcagcaccctgttaggatcagtgtgtgtggatgggatagccctgggatggaaaggactagcctctactgatgcaaaaaaacaaaaagcaacacaaacgtttccttcttatagcacatgcacttccttacaatgacatgatttgtattatcctcacatgtgtttactactgctggggccttccttcatcctctgagggctattttgtactttctgcagcaatcagcttaataacaacacttattgcacctgtctctctctgagaacacggtgtgtctcgacacgtaccacgtacgtggaaacacaagagcccaccacttgaatttctaagaccatttcattctgaaacttcttatcaattacctaaatctcaacgaaaaacaatttactgaagccgactcccctccccatctccctctcaacctcaacccacctgcatgcatctcccccagaggaaacactgagggtaggggacaggaggctcaggacgcgccctctgaatcgagtgtttcttcttcacaagtcaccaagagaggacatgagggggaaagtcctttttgcccttctccaaaaaataaccttccacagagacaaactgtccttctatccacttttatcttttaataaatatcaaaaggaaaaagctgcaagggtgcaaagggcctgtgccagaagaaaacacacacagggaaaccgctttttttaatcaattgtagagaatagtcatttttaatctaaattagagaattgtgatacaatggcagtcctcaaaggcgtaacgagttcatctttctttcaccataggggttatagttggcttgtgctactctggaatcattttactgtttgtttttattatcttaagtgctaattaaaaaaaaaataaaattttaaaaaaacctgtagtttcattacctttttgaataatgtcatacaaaaaatgtatttgtttttttgtgctgtgagaattgatgtttgtagattaataatcattttgtttagaattacaaaatagtttttaaatattgtctgagaaaagccaaagttaatgcaacctagtggaaactgtaagaccatttgagtattgtttgttttattgatgcatttggattttgttgtttgatggaatttgagccaaaaaaaaaatacgcaggctttcctatttctacaactgattgtacttatgcattttgtaccagtggaactttttatactggagattaaaaaaaaaatggaaatttttgtggcttgctctggtgggcccctgacaatgactgatttcaagtttgatttcgggttgattgattgattgattgatagaaagaaagttgcttttcttttgagaattaaaaactttggcttgatttcttttttccctttgcttatatctagcattagaattttgtcttaaaataacagcggtaagtttcactttttattctgtattgtgcagttacacaataaggtaattagatttagaagtactcagtcactttaagtggataaatgtattagttaaaactttagggtttgcttttttgctgtttagatcaaagttttttctgattcttctgtcctcattgtgaacataaccgtgtagttgaaacagtcaaacttatttttgtaatgtatgttattgtgtgatgcagttttttgcttctgtctccaatattaaaccattttcctaata

SEQ ID NO: 1336 - DNA, 1835 bp, Homo sapiens
  source 1..1835: mol_type = genomic DNA
acgcaagtccctttcctcccgacacgagtgcagtaaagaaaaacggttatgagcgtaaagtgacagcctcggccgatgggaatagggggaagtccgacactgagcaacgaacgcattcccgcgcctccaaaacctaggccgggggcgctggaaacccttaccggcacccggccaccgcggcagacgcttgctcctgccacgccccccccccctcccccgcatcacgtgtctgcactcgctttcctcggattcccggatgtggttgccaaaacaaaggggatttggtgatggaggctttgttagaaggaatacaaaatcgagggcatggtgggggatttttgacatcttgtgaagcagaactacaggagctcatgaaacagattgacataatggtggctcataaaaaatctgaatgggaaggacgtacacatgctctagaaacttgcttgaaaatccgtgaacaggaacttaagagtcttaggagtcagttggatgtgacacataaggaggttggaatgttgcatcagcaggtagaagaacatgaaaaaatcaagcaagagatgaccatggaatataagcaggagttgaagaaactacatgaagaattatgcatactgaagagaagctatgaaaagcttcagaaaaagcaaatgagggaattcagaggaaataccaaaaatcacagggaagatcggtctgaaattgagaggttaactgcaaaaatagaggaattccgtcagaaatcgctggactgggagaagcaacgcttgatttatcagcaacaggtatcttcactggaggcacaaaggaaggctctggctgaacaatcagagataattcaggctcagcttgtcaatcggaaacagaaattagagtctgtggaactttctagccaatcagaaattcaacacttaagcagtaaactggagcgggctaatgacactatctgtgccaatgagttggaaatagagcgcctcaccatgagggtcaatgacttggttggaaccagtatgactgtcctacaggagcagcagcaaaaagaagaaaaattgagggaatctgaaaaactattagaggctctgcaggaagaaaagagagaattgaaggcagctcttcagtctcaagaaaatctcatacatgaggccagaatacaaaaggagaagttacaagaaaaagtaaaggcaactaacactcaacatgctgtagaagctataagtttggaatctgtgagtgcaacgtgtaaacagctgagccaagaactaatggaaaaatatgaagaactgaagaggatggaagcacataacaatgaatacaaagcagagattaagaagttgaaagaacagattttacagggtgaacaaagttacagttctgcactagaaggaatgaagatggaaatctcccatctaactcaggagttacatcagcgagatatcactattgcttccaccaaaggttcttcctcagacatggaaaagcgactcagagcagagatgcaaaaggcagaagacaaagcagtagagcataaggagattttggatcagctggagtcactcaaattagaaaatcgtcatctttctgaaatggtgatgaaattggaattgggtttacatgagagatggggttttaccatgttgtccagtctggttttgaacttcgggattcaagcaatccgccagcctcagcgtcccaaagtgctggaattacaagtgtgagctaccaccactggcagttaagaattttaacaatttgtcaatgaaacaagaatctcaattagagtctttatatacaatctgtactgttggaattttcaaataaatattgtaaagaaaatt

SEQ ID NO: 1337 - DNA, 8076 bp, Homo sapiens
  source 1..8076: mol_type = genomic DNA
atgaggatagaagagaggaaatcccaacatttaacaggtttgacagatgaaaaagtgaaggcatatctttctcttcacccccaggtattagatgaatttgtatctgaaagtgttagtgcagagacagtagagaaatggctgaagaggaagaacaacaaatcagaagatgaatcagctcctaaggaagtcagcaggtaccaagatacgaatatgcagggagttgtatatgaactaaacagctatatagaacaacggttggacacaggaggagacaaccagctactcctctatgaactgagcagcatcattaaaatagccacaaaagccgatggatttgcactgtatttccttggagagtgcaataatagcctgtgtatattcacgccacctgggataaaggaaggaaaaccccgcctcatccctgctgggcccatcactcagggcaccaccgtctctgcttatgtggccaagtccaggaaaacactgctagtagaagacatccttggagatgaacgatttccaagaggtactggactggaatcagggactcgtatccagtctgttctttgcttaccaattgtcactgcaattggtgacttgattggtattctcgagctgtatcggcactggggcaaagaagccttctgtcttagtcaccaggaggttgcaacagcaaatcttgcctgggcttcagtagcaatacatcaggtgcaggtatgcagaggccttgccaaacagacagaattgaatgacttcctactcgacgtatcaaaaacatattttgataacatagttgcaatagattctctacttgaacacataatgatatatgcaaaaaacctggtgaatgccgatcgttgtgcgcttttccaggtggaccataagaacaaggagttatattcagacctttttgatattggagaggaaaaggaaggaaaacctgtcttcaagaagaccaaagagataagattttcaattgagaaaggaattgctggccaagtagcaagaacaggggaagtcctgaacattccagatgcctatgcagacccacgctttaacagagaagtagacttgtacacaggctacaccacgcggaacatcctgtgcatgcccatcgtcagccgaggcagcgtgataggtgtggtgcagatggtcaacaaaatcagtggcagtgccttctctaaaacagatgaaaacaacttcaaaatgtttgccgtcttttgtgctttagccttacactgtgctaatatgtatcatagaattcgccactcagagtgcatttaccgggtaacgatggaaaagctgtcctaccatagcatttgtacttcagaagagtggcaaggtctcatgcaattcacccttcccgtgcgtctctgcaaagaaattgaattattccactttgacattggtccttttgaaaacatgtggcctggaatttttgtctacatggttcatcggtcctgtgggacatcctgctttgagcttgaaaagttgtgtcgttttattatgtctgtgaagaagaactatcggcgggttccttatcacaactggaagcatgcggtcactgtagcacactgcatgtatgccatacttcagaacaatcacacgcttttcacagaccttgagcgcaaaggactgctgattgcgtgtctgtgtcatgacctggaccacaggggcttcagtaacagctacctgcagaagttcgaccaccctctggccgctctctactccacttccaccatggagcagcaccacttctcccagactgtgtccatcctccagttggaagggcacaatatcttctccactctgagctccagtgaatatgagcaggtgcttgagatcatccgcaaagccatcattgccacagaccttgctttatactttggaaacaggaagcagttggaagagatgtaccagaccggatcactaaaccttaataatcaatcacatagagaccgtgtaattggtttgatgatgactgcctgtgacctttgttctgtgacaaaactgtggcccgttacaaaattgacggcaaatgatatatatgcagaattctgggctgagggtgatgaaatgaagaaattgggaatacagcctattcctatgatggacagagacaagaaggatgaagtcccccaaggccagcttgggttctacaatgccgtggccattccctgctatacaacccttacccagatcctccctcccacggagcctcttctgaaagcatgcagggataatctcagtcagtgggagaaggtgattcgaggggaggagactgcaacctggatttcatccccatccgtggctcagaaggcagctgcatctgaagattgagcactggtcaccctgacacgctgtcccacctacagatcctcatcttgcttctttgacattcttttcctttttttggggggggtggggggaacctgcacctggtaactggggtgcaaacctcttcaagaaggtaacatcaaataaataagtcaagcagaggacttcctgccaatctcttctgtgaggcatcatagacactgagcaaccaggaccacccccacgttcagaaatcagctggccaagtgactccatttgacttgcaaaccagccttttctaataggctaatattgctgaggccttaaaggaaatggacaaaaattatccagaaggggtacttttccattgtatctttctaataagggtttaaaatggtactattatggtattgtacttgggctttaacatcaatgttgctttgatgttgttggatataaataggaatttttacacattactattgtgaatggtgaatgttcatgtatgacctacttgtaattaacttgagttgtagtccacagcctcaggacaaatgtcgttgaggttacagagtaagaaatgatggcaaaacgtcaaactcttatttcagagcttcatgaatttagttagactaaacataattctttaagttcaacctaaagggctgagatcaataaatttaacactagacgaagtagacttcctgtctttttgagaagagatgaggtatatgttacaataaatctcagaacttcaagtagcagttcaaaagatgtcagtttttaaaattgtttttgttgttgtcttggcagttttactgaaccctttgcataaagaacaaaataaaagctcggcattgtaatttttttaatggacaagtcttatggatacgaagggtacatttttcataatgattcctttatattttcactttgtgtcattgcagaattttagactctcattcacaatgaaaagtttattttaaacattgtttaattaaaataccatacagttctcttttaaacatcaaaccataaaaagtgtattttgtaattttactctgacctgccgcagtcacctctcacttatctcttccacgtactgcacggtcgtatttcatgagctttctgtccatagcacagaaacagagcagaaagtagtacaatcatgttggaccttctttctgttctctttactcttctcacagatcagatcactccatagaagcctgtgggtttcgatggtttcttctatacacctttttggttgaccagtattactatacaatgtaagtgttttaaaaaatacgaaagtaatactctgcaccccttcctacaaagatgataaagcagtcacttctggcgcattttaataatttaaagatttttagtgcaatggcacggtaacctccaaacctgaattagacagagactcactcaggaagtgacaggcccatcatatcaaataacttattcacttttcatgtggcaggaaactggaatatcgcttttaataaaatggaaaaatatgcttctacatatttaccaccataggcgttttgttcatatgagcctggtttgtgcaaaattaaatcagaggcttctacaacatggtttatttatgttgtagcaaagttggctctacataaacattgttcttattttaaaattaacactatgtgttcagttttcttgtgggcttctgaaagttgccatcttccctccgtggagctccatttgctattttcattatacactatgaggtaaaatgtaataacaaaagagagagaagtaccactgtggctagatatatacacacacatatatatatggatggatgtaatatatgtagaacacacacatagatgtatataggatacacactcatgtatgtaaacgtatacatatgtgtatatatgatacatacacatacacacacacgagagacagaaggaaagagaggaagagagaagcaaacatgtaggaaaaaatataaatcagccccattctcccattctttaagaacaatgatttttcttgatggaaaatgcatatcacttgacagttgacaagaaagtgtcatttttgtgttagtgtatcatataattgaatttgaacaagatacatatttttctgcatacaaatttatgaagctggagtctaccaaacacagctttagtcacaaaagttagtttagttatctcatttcgcttggagatggaatttcaggaagggatatattatttaagattattgtttaattacaagaattttaaaagaatgtatgaattctgttttttaatatagaaaataattatggagttaggaatctcatggctacatttacatttttaggttattacagaaaattctcttaatttattatagtcaagtgtattatgtaatctctatttagaacagtttcccaaaggaatgtgattggatttactggttggttaatttcttgtgaaatattgtcataatagaagcacagcttgaacaaaagactgaattctgatataaactgtcaatattgcttttaccatgtgtaagatttacttagtaatcacagatttacctaaaataaaaggacccgggttgcagtgatatttagttaatgatttgttttggaaaacatgcagttaggagtatttttgtattttgtcagatgtttaggagacagactttcgggtcatgtttcttgtcttgttcccagatcttttcttaaaagaacagtgtgacaccagaagccaagagatggtttttactaacaacagctttgatgagttcctattaaggtcgtattgtgtattgtgccaaattttccacccagtataaatttagtaacccgctatgagcatatgtaggatattcaatttgcagatacttttgttggttatgttggtttataatagacaagttttatggtcatatgcaattattccattatctttttggacacagtgaatatgttttttagctaaaaatgtccttggaaacataaatgcctgccaataacatggaatattgaattcgggcaatgtgaattgattaattagaaaagggtcaaaagaaatacaatggatgtggaaactaattctaaaaaatagccctattaatagggcagagactctggtccatttcccagctgtacttctctctaagaggtgtatgaaaaacccatcttgcaaaagagaccaaaatattagacacaatcgttcccattcctgactcttcaatggaaaaggaaggtacagatgtttacagtggtgccccaggtgactcgttctcaccacaacaaaagcaactaattggaaactagatgtgttcaataatagatttcctcttttttggcatgctttttagattttttttcattttgtaaaatctcagttaatttttctttattggtatatttgtgtatgcgagacaaatcctgtattgtacaggatataaatagatgcataaatccttagatacctgggttttttaataggtttaggtttgggtattgtgtttctggtcttttaactcaaaattaaggtttgagctttaataggactaaattattcacctgccttggcctgtgcctttattttaaatactgcaattttacttcttcattcatgtatttattattttgcttttcttgcttaagtataattgaaaatatttgcaggaacgcacaattcattttatcaagttgaatgaataggaccattctctcctcatcagatttctgttctttatttgacttcattgacatataccctggtgactataaccagtgaactgttcagagtcagtcttttcggcaagaacttcagagaactgtgacactggttatgatgtgattttggggggtttcaggtacctaagcatgatttttaaaatcacttctctctttacatatttcgaacatatgtttgctttctacactttgcagattttatttaggatttaattctttaaagactatattcatttagtcactatagtggatctcttctactgcaagtattcatctgatttttaaattatgtaaaatgtaaatcagccaagtatgtcatccgttatagtttccccatgctttcagcgcatggccatgagatttttacatgtgcataagtatttagccaatacacattttgctgacttctttaaccatttatattgtttaaattagtaatatccaatgcagtgcacacttttttgtcttttttccaacggaatattttggttgtctgtagcgttggaagcattttatatgataaaaatagcaagaaaaaattaaaaagtgtcaacggtgtgctggttctaaattaagaagatagaacaaagagaaagacattaatgttacctaagaaacacatttaacatccgaagaagcaatgctgtcctcacttgatgtttctcttctcaacccagcaatggagagcagggcttgcaaagccgtacagagcctacgtgctctttcctgcaagtgggagaaaactaatcaatggcacacagggccaggtgtggccctgtgaggcaaaggataatgtcacctcaggaccaaggtggaaacttacagctgaatccagggcttactaagtagggaagtcagtttacatatttcagttttcctctgatgtttttgaggtactgtgtatttgcagaagtttaagcagaagggttttgtttctattgtaagttaggttctaaaagtgtataatctgatactctagcccaactgaaatattatatcttgggcgttacagcctttgtctttttctttagtcaccttaatacccagtcctatgctgtatctctgatagcctatataaatgacatataggaatattattttccatatgatctgttgtatggtgtatatgctatgtgttcatttcgtgtgcaagttcagagtgtaatagatttacccagagaaggtgtttctatacaatgcccctacctatttgaaattacatgcttgcccaacacactgtgaaatagttaccaaaatttgtacaaatgcagcatcttcattctttctgagaagacaagatggttttctttacatgaacaaatgaacaaaagagatcctagatccataacgtagctaaggcatctaagagtttgctgttgataatcttgctgaccaaaaactactggagagtaacacaggttatatgccatcacaaatacaatgctcatgaagaactgatttgtagagtcaatgaacctgtgtccagaattttaataggctctctattggaaggagaaagaatttcaagttaacagtatctaactttatcatagttgatgttagtaaattttaaaaaatgattttatatgtatgacaaaaatctttgtaaaatgcgcaagtgcaataatttaaagaggtcttaactttgcatttataaattataaatattgtacatgtgtgtaattttttcatgtattcatttgcagtctttgtatttaaaaaacatttactgttatgtttgtataatagaacagtaatcatttattataatctaggcaagttgtaaataaattcataattcaaacagccagtatatatgcatatatgagtgttatattgcaaaatctttgttttacttacatggttaaagcagcaagaattcttttgttgatatgtaattatacacataaaatatatatatgtatgatacatgaaatatatttagaaatgttcataattttaatggatatcctttggtgtgaataattgaatacagagtttttaaaata

SEQ ID NO: 1338 - DNA, 4959 bp, Homo sapiens
  source 1..4959: mol_type = genomic DNA
ggaagttgagcggcggcaagaaataatggcggcagctacgggggatcctggactctctaaactgcagtttgccccttttagtagtgccttggatgttgggttttggcatgagttgacccagaagaagctgaacgagtatcggctggatgaagctcccaaggacattaagggttattactacaatggtgactctgctgggctgccagctcgcttaacattggagttcagtgcttttgacatgagtgctcccaccccagcccgttgctgcccagctattggaacactgtataacaccaacacactcgagtctttcaagactgcagataagaagctccttttggaacaagcagcaaatgagatatgggaatccataaaatcaggcactgctcttgaaaaccctgtactcctcaacaagttcctcctcttgacatttgcagatctaaagaagtaccacttctactattggttttgctatcctgccctctgtcttccagagagtttacctctcattcaggggccagtgggtttggatcaaaggttttcactaaaacagattgaagcactagagtgtgcatatgataatctttgtcaaacagaaggagtcacagctcttccttacttcttaatcaagtatgatgagaacatggtgctggtttccttgcttaaacactacagtgatttcttccaaggtcaaaggacgaagataacaattggtgtatatgatccctgtaacttagcccagtaccctggatggcctttgaggaattttttggtcctagcagcccacagatggagtagcagtttccagtctgttgaagttgtttgcttccgtgaccgtaccatgcagggggcgagagacgttgcccacagcatcatcttcgaagtgaagcttccagaaatggcatttagcccagattgtcctaaagcagttggatgggaaaagaaccagaaaggaggcatgggaccaaggatggtgaacctcagtgaatgtatggaccctaaaaggttagctgagtcatcagtggatctaaatctcaaactgatgtgttggagattggttcctactttagacttggacaaggttgtgtctgtcaaatgtctgctgcttggagccggcaccttgggttgcaatgtagctaggacgttgatgggttggggcgtgagacacatcacatttgtggacaatgccaagatctcctactccaatcctgtgaggcagcctctctatgagtttgaagattgcctagggggtggtaagcccaaggctctggcagcagcggaccggctccagaaaatattccccggtgtgaatgccagaggattcaacatgagcatacctatgcctgggcatccagtgaacttctccagtgtcactctggagcaagcccgcagagatgtggagcaactggagcagctcatcgaaagccatgatgtcgtcttcctattgatggacaccagggagagccggtggcttcctgccgtcattgctgcaagcaagagaaagctggtcatcaatgctgctttgggatttgacacatttgttgtcatgagacatggtctgaagaaaccaaagcagcaaggagctggggacttgtgtccaaaccaccctgtggcatctgctgacctcctgggctcatcgctttttgccaacatccctggttacaagcttggctgctacttctgcaatgatgtggtggccccaggagattcaaccagagaccggaccttggaccagcagtgcactgtgagtcgtccaggactggccgtgattgcaggagccctggccgtggaattgatggtatctgttttgcagcatccagaagggggctatgccattgccagcagcagtgacgatcggatgaatgagcctccaacctctcttgggcttgtgcctcaccagatccggggatttctttcacggtttgataatgtccttcccgtcagcctggcatttgacaaatgtacagcttgttcttccaaagttcttgatcaatatgaacgagaaggatttaacttcctagccaaggtgtttaattcttcacattccttcttagaagacttgactggtcttacattgctgcatcaagaaacccaagctgctgagatctgggacatgagcgatgatgagaccatctgagatggccccgctgtggggctgacttctccccggccgcctgctgaggagctctccatcgccagagcaggactgctgaccccaggcctggtgattctgggcccctcctccataccccgaggtctgggattcccccctctgctgcccaggagtggccagtgttcggcgttgctcgggattcaagataccaccagttcagagctaaataataaccttggccttggccttgctattgacctgggacttggtcctccatgcagtttttatttcttgtcacagtgactgatagccatcccccaggatcctttccccttggccctgagggggtgacccaacacagaccaaatggggaaatgagcaaccagctcctgcccagagccactgcgggaggtggcaccctcatccccggaatgtgctgcccaccgcaccgcaggctcctcctgtgggggccctgggcatgggtgagggtgggaccccgtgagcgcactgcaccctggccctggtggagcgggaggaggaggagagccgagctgggtacgagactaaagggcccacatgacccagtgacgccagatttccaccaaggactgagtgagctgctcagacatggctttctgcctcccagcctgtcctccactgtgggcatagcatctgtgcctgcctgcctgcttgagggagaggagtttctgctgctgccttgagctggggggaagagcccaggggcagatcctggcagctgcctggatggggctcctccctgcccttatgagcaggccaggcccagaaaggccgagcctgggctgccttcctgccccagccgagggaggggtcagacggctctaccatgggtaactcaggcaagagctggttttcctctttattctgggtgtgtgcagctgtgaggccccaacccaggagaggccatggcctaggtacctgtgaccaccctgcccccgtgtagagggcatcgtctttcctgctattttattctttcagcttttgtcttaggcccagaatcaaagtgaaaattgagtcgagctgacccttacaacagtaggatttagtagggtagatttcaaatgaggcttcgcttctcccaaagtagccagtccaagttccagtggctgtcgttcagctcatgggagcttcatggggacacagccggcacaggtgcagggcccgagtccgcccacccagcctggcgctgaaactgcacacgtacactatgtggtttaagagcactttattattgttcttaaggctacttttaagtacaaaaaaagatggcctgccaaacctttttttttcttcttccaggaaaaacaggccacagagaatggtatattacagatttacacacatgaagagaaggtcagagcgcactgcaggcagcgcggctctgggaagaacttcacggagccccttcttagagcagggagggggctttctcagtgaaatgtttggttttctgctgcctcctctgccccaggcccccctccagggtactgcctatcccagataggtcagtgcaccagggacccggccgccagcaccgccgacccctcccagagtgacgcccttgttcactgacaaagagacctgtcccaggagtgtcctccaccgagccggtcagctgtgggtggttttcctgttacgacgctcagtagcctgtagcaataacaaactcgtggctatgaatgcagatgcagtgttctcatagaataactgttcctgcacttttacagacaaatctacgacaaaaaaaaagatcaactttttttttccgaacaacaaaaaaaatgaatgattacaataggaaagggaaaaattaaatagctacatatcattaacaaattaatgttcttcaaaaaatacctacaaatttctctgtacattctttacgcacagcgtaacgatggtctcaaaatcacccatatagaaaagtgttctcaacgatttttcctacagaaaatataggggcctgaatgccaaagcttggaagcccagtacagtgggagtgaaatgtgtgcggggcaaggagaagggcttttctttcctccacttttcaaaggcctgcagccactctgtgactacaagagccagtcctccgaccttttcacccagtgccaatttccaaaattcaacagctaaaaactgtaaaaccgggggtcatacggtgtgcagagtccacaaagccttgcaggtgaggtgaccacgcccacgtcacctggtcaggtgccatcgtcgtgagcctctggtgggccaggtgggacacagcacaccccagggggaggggatagaaacgctcattgaccaaaaaggagcagctgtgacctccacagctgtgtctgtcatgcttgcttcatctaatttctagttagtagctattaatatagcaaataataaatgcagtaataacagtataaagtcagaggaatgtatactgccttggccccagcgtacgaggaagcgtataaaacaccatatcacagattgtctgtcagtaatctgctgttcagccaagagagttcaaagggagcagtttctgcatgtagggaagttggaagacacaaaccccacctcccctgggagcttgtaacaaagcagacagggatgcaaaaataaatgatgtcagcctgcagccaaactccagcatcccacaccgcagctgacccactgctcatcgcgagggcctgccaggagctggcctcccgcactacttgtgagtaaagtgaatatcaaataccaatcttagagtacaactgtaccagcagtaagtatatctaggactgtaactgacaaaaataaactaattctgaaaagaa

SEQ ID NO: 1339 - DNA, 3646 bp, Homo sapiens
  source 1..3646: mol_type = genomic DNA
gctcagcctaacggaagtggaggagccggacctctttgtgggaagcgaattgaatcaccttggcaacccgcggggcgtgcagcaacgccctttcctccggaagtgggtgtcagaacctccacgtgctgtccctccccctccccttttcggcccagtagcggcggctcagttgctgccatggagtcagccgggctagagcagctcctacgggagctgctgctaccggacaccgagcgcatccgtcgggccacggaacagctccagatcgttcttcgggcccccgccgctttgccggctctctgcgacctgctagcctcggcggccgacccccagatccgccagtttgcggccgtgctgacccgcagacgactgaacacccgctggcgacggctggcggcggagcaacgggagagcctcaagtccctgatcctgacggccctgcagagagaaacagagcactgtgtgagcctcagcctggcccagctctcagccaccatttttcgaaaggaaggcttggaggcctggccacagcttttgcagctgcttcagcacagtacccacagcccccacagcccagagagagagatggggcttttgctgctaagtgtggtggtgacctcccggcccgaggccttccaaccccaccaccgggagcttcttcggcttctgaatgagactcttggtgaggtgggctctcctgggctgctcttctactccctgcgcactctgaccaccatggctccctacctcagcactgaagatgtgcctctcgctcggatgttggtgcccaagctgatcatggccatgcagactctgatccccatagatgaggcaaaggcctgtgaggcccttgaggctttggatgaactgttggagtcagaggtgccggtcatcaccccctacctctctgaagtcctcacattctgcctggaggtagctagaaatgtggccctgggcaatgcgatacgcatacgtattctctgctgcctcactttcttggtcaaagtcaagagcaaggccttactgaagaatcgtctcctgccacccttgctgcacacccttttccccattgtggctgctgagcccccaccaggccagttggatcccgaggaccaggattcagaagaggaagagttggagattgagctgatgggggagactcccaagcatttcgctgtacaagttgtggacatgctggcactacacctgccccccgagaagctctgtccccagctgatgcccatgttggaagaggctttgcggagcgagagcccataccagcgcaaagctggactcctggtgctggccgtgctgtctgacggagctggcgaccacatcaggcagagactgctgcccccactgctgcagattgtgtgcaagggcctggaggacccctcgcaagttgtacgcaatgctgcgctgtttgccctgggccagttctcagaaaacctacagccccatatcagcagctattcaagggaggtaatgccactgctcctcgcctacttgaagtcggtgcctcttggacacacacaccacctagccaaggcctgctatgccctggagaattttgtggagaacctagggcccaaggtgcagccctaccttccggagcttatggaatgcatgctgcagcttctgaggaaccccagcagtccccgggccaaggagctggctgtgagcgccctgggagccattgctacggctgcccaggcctcgctgctgccctacttccctgccatcatggagcacctgcgggaattcctgttaacaggccgtgaggaccttcagcctgtgcagatccagagcctggagacactgggggtgctggcacgagcagtgggggagcccatgaggccgctggctgaggaatgctgccagctgggtctgggcctctgcgaccaggtagacgaccctgacttgcggcgctgcacgtacagcctatttgcagccttatcgggtctgatgggtgagggcctggcgccccacttggaacagatcaccacgctcatgctgctgtcactgcgttccaccgagggcattgtgcctcagtatgacgggagcagctccttccttctgtttgacgatgagagtgatggggaagaagaggaggagctcatggatgaggatgtggaagaagaggatgactcagagatctcagggtacagcgtggagaatgccttcttcgatgagaaggaagacacctgtgctgccgtgggggagatctctgtgaacaccagtgtggccttccttccatacatggaaagtgtctttgaagaagtatttaaactgctggagtgccctcacctgaatgtgcggaaggcagcccatgaggctctgggtcagttttgctgtgcactgcacaaggcctgtcaaagctgcccctcggaacccaacactgctgctttgcaggctgccctggcccgagtcgtgccatcctacatgcaggcagtgaacagggagcgggaacgccaggtggtgatggccgtgctggaggccctgacaggggtgctccgcagctgtgggaccctcacactgaagccccctgggcgcctcgctgagctctgtggcgtgctcaaggctgtgctgcagaggaagacagcctgtcaggatactgacgaggaggaggaagaggaagatgatgatcaggctgaatacgacgccatgttgctggagcacgctggagaggccatccctgccctggcagccgcggctgggggagactcctttgccccattctttgccggtttcctgccattattggtgtgcaagacaaaacagggctgcacagtggcagagaagtcctttgcagtggggaccttggcagagactattcagggcctgggtgctgcctcagcccagtttgtgtctcggctgctccctgtgctgttgagcaccgcccaagaggcagaccccgaggtgcgaagcaatgccatcttcgggatgggcgtgctggcagagcatgggggccaccctgcccaggaacacttccccaagctgctggggctcctttttcccctcctggcgcgggagcgacatgatcgtgtccgtgacaacatctgtggggcacttgcccgcctgttgatggccagtcccaccaggaaaccagagccccaggtgctggctgccctactgcatgccctgccactgaaggaggacttggaggagtgggtcaccattgggcgcctcttcagcttcctgtaccagagcagccctgaccaggttatagatgtggctcccgagcttctgcgtatctgcagcctcattctggctgacaacaagatcccaccagacaccaaggccgcactgttgctgctcctgacgttcctggccaaacagcacaccgacagctttcaagcagctctgggctcactgcctgttgacaaggctcaggagctccaggctgtactgggcctctcctagactgcaggctgcagccagtccagagagaatagagcctgcccaggccttaagaccacctctcagcccagttcagttctgccttaccaaagattctgagactcatacccatttggagccagccccacttgctgccttacagggctgtccctgaggctggatctgttacaaatgagtcatgacatcatactgtaataaaagcagcttgttttctgcttgaacaata

SEQ ID NO: 1340 - DNA, 7441 bp, Homo sapiens
  source 1..7441: mol_type = genomic DNA
gaggcggggccaggacggcgggaccggccgctgggtcccagcgagggctgagccgggcggtgggaggaggtcaggatggtgggggaacggcatgctggggacctcatggtgcccttagggcctcggctgcaggcatatcctgaagaactcattcgacagaggcctgggcatgacgggcatcctgaatacctgatccgatggagtgtcctgaagtgtggggaagtgggcaaagtgggtgtggaagaaggcaaagcagagcacatcctcatgtggctgtcggctcctgaggtctacgccaactgccctgggctgttaggtgagcgggcactatctaagggacttcagcacgaaccagctggggtttcaggaagctttcctcgagatccaggaggcctggatgaagtggcaatgggagagatggaggctgatgttcaggcgctggtacgcagggcggccaggcagctggcagaaagtgggaccccaagcctcacggccgctgtgcttcacaccatccacgtgctcagtgcctacgccagcatcgggcccctcactggtgtcttcagggagacaggagccctggacctgctcatgcacatgttatgcaatcctgagcctcagatccgccggagtgcaggcaaaatgctgcaggctctggcagcccacgatgctgggagtcgggctcacgtccttctatcactgagccagcaagatggcatcgagcagcacatggattttgacagtcgctatacattgctggagctgtttgcagaaaccacatcctctgaagaacactgcatggcctttgagggcattcatctgcctcagatcccaggaaagctgcttttctccttggtgaagcgctacctttgtgtcacgtccctcctggatcagctgaatagcagtccagagctgggagctggagaccaaagctccccatgtgccacaagagagaaaagccggggacagcgggaactggagttcagcatggctgtgggcaacctcatctctgagcttgtgcggagcatgggctgggcccggaacctcagcgaacagggcatgtcacctccccggccaacccggtccatctttcagccctacatttcaggccccagccttttactccccaccattgtcaccacccccagaagacaagggtgggtcttccgccagcgctctgaattctccagccgtagtggctatggagaatatgtgcagcagacactccagccagggatgcgagtgcggatgctggatgattatgaggagatcagtgctggggacgagggcgagttccggcagagcaacaacggcattccccctgtgcagaccctgggtgaaaaggccctaggtgagatctctgtgtccgtggaaatggccgagagtctgctgcaggttctcagtagtcgatttgagggcagcactctcaatgacctgctcaactcccagatctacaccaagtatgggctgctgtctaatgaaccaagcagctcgtctacttcacgaaatcactcctgtaccccagatccagaagaggagtccaagtcggaggccagcttctcagaggaagagactgagtccctcaaagcaaaggccgaggcccctaagacagaggccgagcccaccaagacaaggaccgagacccccatggcacagagtgattctcagctgtttaaccagcttctggtgactgaggggatgaccctgcccactgagatgaaggaggcagccagtgaaatggccagagccttgcggggtcccggtcctcgcagctccctggatcagcatgtggcagcggtcgtggccactgtgcagatatccagcttggacacaaacctgcagctttcagggctctctgccctctctcaggctgtggaggaggtcactgagcgggaccaccctctggtccgtcctgacagatcgctgagagagaagctagtgaagatgctggtggagctgctgaccaaccaggtgggagagaagatggtggtcgtgcaggccctgcgcctcctttacctgctcatgaccaagcacgagtggcggccgctctttgccagggagggtggcatctatgctgtgctggtctgcatgcaagaatataagacttctgtcttggtgcagcaggctgggctggcggcactgaagatgctggccgtcgccagctcctcggagatccccacttttgttactggccgagattctatccactctttgtttgatgctcagatgaccagagagatcttcgccagcatcgactcagccacacgcccgggctctgagagcctgctcctcactgtccctgcagccgtgatcctgatgctgaatactgaggggtgctcttctgcagcgagaaatggcttactcctgctcaacctacttttgtgcaaccaccacactctgggagaccagattataacccaagagctgagagacacgttgtttaggcactcagggatagcaccaagaacagaacctatgcctaccacacgcaccatcctcatgatgcttctcaatcgctactcagagccgccgggcagccctgagcgtgcagcactagagacccccatcatccagggtcaggatgggtcccctgagctactgattcgatccctggttgggggcccatctgcagaactactcctggacttggagcgtgtgctgtgccgtgagggcagccccggaggtgccgtgaggcccctcctcaagcgcctccagcaggagacccagcctttcctcctgttgctgcggactctggatgctccggggcccaacaagactctgctgctgtctgtgctgagggtcataacccgactgctggatttccctgaggcaatggtcctcccctggcacgaggtcttggagccctgcctcaactgcctgagtggccctagcagtgactccgagattgttcaggagctgacctgcttcctacatcgcctggcctcgatgcataaggactatgctgtggtgctctgctgcctgggagcaaaagagatcctctccaaagtcctggacaagcactcagctcagctgctgctgggctgtgagcttcgggacctggtgacagagtgtgagaagtacgcacagctctatagcaacctcacctccagcatcctggccggctgcattcagatggtgctgggccagatcgaagaccacagacgaacccaccaacccatcaatatccccttctttgatgtgttcctcaggcatctctgccagggctccagtgtggaagtgaaggaggacaagtgctgggagaaggtggaggtgtcctccaacccgcaccgagccagcaagctgacggaccacaaccccaagacctactgggagtccaacggcagcaccggctcccactacatcaccctgcacatgcaccgtggtgttcttgttaggcagctcactttgctggtggccagtgaggactcaagctacatgccagccagggtggtggtgtttgggggtgacagcaccagctgcatcggcactgagctcaacacggtgaatgtgatgccctctgccagccgggtgatcctcttggagaacctgaaccgcttctggcccatcatccagatccgcataaagcgctgccagcagggcggcattgacacccgggttcggggtgtggaggtcctgggccctaagcccacattctggccactgttccgggagcagctgtgtcgccgaacatgtctcttctacacaattcgggcacaagcctggagccgggacatagcagaggaccaccggcgcctcctccagctctgtcccagactgaacagggttttgcgccacgagcagaattttgctgaccgcttcctccctgatgatgaggccgcccaggcactgggcaagacctgctgggaggccctggtcagccccctggtgcagaacatcacctctcccgatgcggaaggcgtgagtgccctgggatggctgctggatcagtacttagaacagagagagacctctcggaaccccttgagtcgagcagcgtcctttgcttctcgagttcgtcgcctttgccacttgctggtgcatgtggaacctcctcctgggccttctcctgagccatccactcggcccttcagcaagaacagcaagggtcgggaccggagcccggcgccttcgccagtgcttccaagcagcagcctgaggaacataacccagtgctggctgagcgtggtgcaggagcaggtcagcagattcctggctgcagcttggagggccccagactttgtgcctcgttactgtaaactctatgagcacttgcagagagcaggctccgagctgtttgggcctcgggcagccttcatgctggctctgcgcagtggcttctctggcgccttgctgcagcagtccttcctcactgctgctcacatgagtgagcagtttgccaggtacattgaccaacagatccagggtggcctgattggtggagcccctggagtggaaatgctggggcagcttcagcggcacctggaacccattatggtcctttctggtctggaactggccacaacttttgagcacttctatcagcattatatggcggaccgtctcctgagctttggttcgagctggctggagggggctgtgctagagcagattggcctctgttttcccaaccgcctcccacagctgatgctgcagagcctgagcacctctgaggagctgcagcgccagttccacctcttccagctccagcggctcgacaagttgttcttggagcaggaagatgaggaggaaaagagactagaggaagaggaggaggaagaggaggaagaggaagctgagaaagaattatttatcgaagatccaagtccagccatttctatactggtcctgtcaccacgctgctggcccgtctccccactctgctacctgtaccatcccagaaagtgccttcccacagaattctgtgatgcccttgaccgtttctccagtttctacagccagagtcagaaccatccagtcctggacatgggaccacatcggcgactgcagtggacgtggctgggccgggctgagctgcagtttgggaagcagatactgcatgtgtccaccgtgcagatgtggctgctgctgaaattcaatcagacagaggaggtgtcagtagagaccttgctgaaggattctgacctctccccagagctgctgctccaggcactcgtgcccctcacctcagggaatggccctttgaccctgcatgagggccaggactttccacacgggggtgtgctgcggcttcatgagcctgggccccagcgcagtggggaggccctgtggctgatacctccccaggcatacctgaacgtagagaaggatgaaggccgaaccctggaacagaagaggaatctcttgagctgtcttcttgttcgtattctcaaagcccatggggaaaagggcctccacattgatcagctggtttgtctggtgctggaggcctggcagaagggtccaaatcctcctggaaccctgggccacactgttgctgggggtgtggcctgtaccagtacagatgtcctctcttgcatcctgcacctcttaggccagggctacgtgaaacggcgtgatgaccggccccagatcctgatgtatgccgctccagagcccatggggccctgccggggtcaggcagatgtccctttctgtggcagccagagcgaaacctccaagcccagcccagaagctgtggctaccctggcatctctacagctgcctgcaggccgcaccatgagcccccaggaagtagaagggttgatgaagcagacggtgcgtcaggtgcaggagacgctgaacttagagccagatgtcgctcagcaccttttggctcattcccactggggcgctgaacagctgctgcagagctacagtgaggaccctgagccactgctgctggcagctgggctgtgcgtacaccaggctcaggctgtacccgtacggcctgaccactgccccgtctgtgtgagccccctggggtgtgacgacgacctgccctctctctgctgcatgcactattgctgtaagtcttgctggaatgagtacctgacaactcggatcgagcagaaccttgttttgaattgcacctgccccattgccgactgccccgcccagcccaccggagccttcattcgtgccatcgtctcctcgccagaggtcatctccaagtatgagaaggcgctcctgcgtggctatgtggagagctgctccaacctgacctggtgcaccaacccccagggctgcgaccgcatcctgtgccgccagggcctgggctgtgggaccacctgctccaagtgtggctgggcctcttgcttcaactgtagcttccctgaggcacactaccctgctagctgtggccatatgtctcagtgggtcgacgacggtggctactatgacggcatgagcgtggaggcgcagagcaagcacctggccaagctcatctccaagcgctgtcccagctgtcaggctcccatcgagaagaacgaggggtgcctgcacatgacctgtgccaaatgtaaccatggattctgctggcgctgcctcaagtcctggaagccaaatcacaaagactattacaactgctctgccatggtaagcaaggcagctcgccaggagaagcggtttcaggactataatgagaggtgcactttccatcaccaggcgcgggagtttgctgtgaacttgcggaaccgggtgtctgccatccatgaagtgcccccgcccagatccttcaccttcctcaatgatgcctgccagggactggagcaggctcggaaggtgctggcctacgcctgcgtgtacagcttctacagccaggacgcagagtacatggatgtggtggagcagcagacagagaacctggagctgcacaccaatgccctgcagatcctcctggaggaaaccctgctgcggtgcagagacctggcctcctccctgcgcctcctgcgggccgactgcctcagcacgggcatggagctgctccggcggatccaggagaggctgcttgccatcctgcagcattctgcccaggatttccgggttggtcttcagagtccatcagtagaggcctgggaggcaaaaggacccaacatgcctggcagtcagccccaggcctcctcagggccagaggcagaagaggaggaggaagacgatgaggatgatgtgcccgagtggcagcaggatgagtttgatgaggagctggacaatgacagcttctcctacgatgagtctgagaacctggaccaagagactttcttctttggtgatgaggaagaggatgaagatgaggcctatgactgagggggcagatgcaggaaacacctagagcagccccagagtcacggggctgagggggcgggagctgcccctgtcatagggagggggattcccagcgtctgtagtgcttcctgtttgctgaataaaggtctctttctcacacaca

SEQ ID NO: 1341 - DNA, 4857 bp, Homo sapiens
  source 1..4857: mol_type = genomic DNA
cctgtgctggatcctgggcggcctgaggggtacggagactctgggggagggagacggcagcggcatggcggccgggtgtaagacgcccgaccctcctcttccctgtcttcgccgccgccgctgctggagtcactgggaccctgtagtctgcgtgtgttagttgtaatcccgccgccctcctgtcagccctccgctccgccggccctccttccttccgccgccgcagccagcccgagggtcggccggctgtgtaacactctcccaccccacccaccagcccgcgggccagcaccatggaggacgtgaagctggagttcccttcccttccacagtgcaaggaagacgccgaggagtggacctaccctatgagacgagagatgcaggaaattttacctggattgttcttaggcccatattcatctgctatgaaaagcaagctacctgtactacagaaacatggaataacccatataatatgcatacgacaaaatattgaagcaaactttattaaaccaaactttcagcagttatttagatatttagtcctggatattgcagataatccagttgaaaatataatacgttttttccctatgactaaggaatttattgatgggagcttacaaatgggaggaaaagttcttgtgcatggaaatgcagggatctccagaagtgcagcctttgttattgcatacattatggaaacatttggaatgaagtacagagatgcttttgcttatgttcaagaaagaagattttgtattaatcctaatgctggatttgtccatcaacttcaggaatatgaagccatctacctagcaaaattaacaatacagatgatgtcaccactccagatagaaaggtcattatctgttcattctggtaccacaggcagtttgaagagaacacatgaagaagaggatgattttggaaccatgcaagtggcgactgcacagaatggctgacttgaagagcaacatcatagagtgtgaatttctatttgggaaggagaaaatacaagagaaaattataatgtaaaatggtaaaaacataagtagtttttttttcaattacatgttgcttccagacatacttctctgcaacttgttgagcaacattttaagatgttggacttctgcaatagatgacactgatggttttactcctttttttaaaaacacatgcgcgcgcacacacacatgctttacaagttttattataaaccaagaattttggacttgcaaagaggtattattgcaataatgcacttttcatacttgaaatttatttgtatgatataaagttattactttaaacaaaatgcaagtatggggggattgtttataaagtttgggtaatttataacaaaatttgctaaggtttgctaaaaattcatttttctgttctatatattacatttttaacataattttacagttcaattttatgatggagcctcttacagaaacattaacaaaatgcaggaatctgccacatttcttttttagtataacttaatagcttaattaccattttattttttatacttcttccattattaatctttaaatcatgatcctaattagctgtccttactttaacttgatctaattattgcttcctttcttattactttcctaatttttctatattttaaaaactacagtttccatgataaaaggaaaacgttttgatttatagtaccaagtgcttaaacacaaggatagtgttagattttcgagtgactttcctttttgcattttttggcagtaaaagccaaacgttgtatttgttcttttcagagttgtccagcccttttttcctttgtccaaaatgattctaaatagaatctaataaaccaatgtagcattatttttttctaaatgaagccccaaaaaagaaaagtgccttgcatcatttaaaaaaaataattaaatcctcatggcctctaaattagtatgtagaacactgaaaagttcttaacatttttgtgtaatttcctttctttttaaaccataaattagtttaaactgaaagtacgaggctggaagaaatattagtaaattatttggaatatagaatgtttactctttctttttatgttgtcttaatgattctgtgagattgttccggctcaaacagaagcttttctttggggaaggtgatttgtgggagactagtgtattttaaattagcattttaatccattcttgacattcagttagtccagatctgccccataatttgctttagtaaagtcactttatggatttttggctatgttttagtttgtgtgtataaaagttctaagaaaacatttttgctattttaagtatgtaagggaagagaggagtgtttttaactttttatagttgatgactttagggtagcacaaacaaaactcctttgtatctaacttttctcaatcctctcttgaggtgctttactaatgggaatgatttctgtatgttcccttggtaccaagaggtactatgcaaagtaacctattacaccaagttacttgctttgctttcctctctatgatgtgataatacagtaaaagctttcttacccagcatagtgggagagtggagattaattaaaattgttaattaagagttaattcctattgacccaggtgatatttctcttctgatttccctccccttcccttctcttatcttaccactgtgaaaacagcatattgttaatctcgttgtcgtccagtattctgctttgtgattaggtcttttgatgtacagtggtctagtggagtcaagattcgcattgggttttctaaaattccagttgataaaagttccagataacacagctttcctgtatatagatcactattgggcaggtcagcaaagatctcttacagtgtaataataatctatgatgcttcatttagcagaaactctgcttaaaagaatcttcataatagtaagtttaggttttaaaaacttgtttcataaatatacatatatcctctctagtagtctggccaaaagaacagattttgttattgataatttgtagctggtaattttccacattttctatccactgtaatttttatgttgtcactgaagtgcctgcccagtactgtatattacagtctctcacaaacactgggaaaagggactgtcatcatcttgagtactctgtgtgtatatatatatatatagatagatagatttttttttttttttgagacagagtctctaatgtcacccaggctggagtacagtggcacaatcttggctcactgcaacctccacctcctgggttcaagtgattttcctgcctcagcctcccaagtagctggggttagaggcacatgccaccatgcctggctaatttttgtagttttagtagagatggggtttcaccatgttggccaggctggtctcaaactcctgacctcaagtgatccacccacctcggcctcccaaagtgctgggattacaggcgtgagccactgcgcctggctgagtacaatattaatgtagacaaaccatgaagtttattatttcatataagaacattacaggtttgttttttcttgcatgtctgtccacctaatgtttaagtagttctggtagctcttcctattctttattctatttgattccatttctgtgattcttttattaccactgatgttttgtgatagttaactatgataaatttaactgatcatgatttatcttctagagtatttaaataatgtatgagtgaccacccaattccaacattaaaagtgtaatctgggcccataatttatagtgaaattgtatcaaaacatagggaaactgtattactgtccattttgaaaatatgaaacttgagtattgaaaatattcaaacatggaatggcagtattctaatttcagttagttggttcatgttaatttcttacctgttagatgtttaaactgcagtgacctttacttgtatctactctgtggtggaaatgttaaaccatgatagcttttgctaccaactcaaccacttaacttttagagcagttttggggagagtttatgcttcatctgagtttagaagtaatgtcagaaaatgttaagcatgtctgtattaagaaaatataaggtttctaattgtcttattaatatggtaattcaagtgaattagaaatatttaactgcaatcttgaattataaagttgagatatatatatatatgtatcaagatctcaacttgatgtaaagtaaatgagcagttacctggcggatttttttttttttaaataactgatttaatccataatcccataacaaacatagcttcacctcagtattttctttctttctttgttcaacagtgctccgataagggaatgctagaaaatagatgagaagtactgaaagacctttttttttaattgattagaaaagtaagtctctagggtctttgaatgctggaatttttttttttttttttgtctttcccatctgtggcagctaaaacaaaaatcactcaaaatattcaggtttacatgttagctctctctcatagggagctgccatacctcacagttcaaagtgtattctatagatcagtaacattatactgacatgtaattgcaatttactatgcagcaaaaatgattcaagaagaaaaataacctacagtgtctgtatacctttgtatacacaattgcttaagttactctgcttttaacatttgtacttggataaaatgcttatgtctgtataggaatgtcacagtgcaagatgctgctagcccaggcacaaagtattaaaattattttgtgaagattggtggttgtattaaaactgctgtgccattatacctccaaaatattgaaaa

SEQ ID NO: 1342 - DNA, 2707 bp, Homo sapiens
  source 1..2707: mol_type = genomic DNA
ggaaatggctgcgagaccctagaggcctgcggcctgcggagcttactccacgggaacagcctctagataatctgagttgttgaaaatacgaagcctgttactcgtgaacagtggctgacaacagtgttgttgtgagcctggctgtctgcttggacccagaggtttcgtctgccagggtttttggttgtatttaggatttcagggaaaagtgtccaagctttcagtgttggagcaggtatggacgacaaaggcgacccgagcaatgaggaggcacctaaggccatcaaacccaccagcaaagagttcaggaaaacatggggttttcgaaggaccactatcgccaagcgagagggcgcaggggacgcggaggctgacccactggagccgccacccccacagcagcagctgggcctgtccctgcggcgcagtgggaggcagcccaagcgcactgagcgcgtggagcagttcctgaccattgcgcggcgccgcggcaggaggagcatgcctgtctccctggaggattctggtgagcccacgtcctgccccgccacagacgccgagacagcctccgagggcagcgtggaaagcgcttctgagaccagaagcggcccccagtctgcttccacagctgtgaaggaacgaccagcctcttctgaaaaggtgaaaggaggggatgaccacgatgacacctccgatagtgacagcgatggcctgaccttgaaagagcttcagaatcgccttcgcaggaagcgggaacaggagcccactgagaggcccctgaaagggatccagagtcgcctgcggaagaagcgccgggaggagggtcccgccgagactgtgggctccgaggccagtgacactgtggagggcgtcctgcccagtaagcaggagcccgagaacgatcagggggttgtgtcccaggctgggaaagatgacagagagagtaagttggagggaaaggcggctcaggacatcaaagatgaggagcctggagacttgggccgaccgaagcctgaatgtgagggttacgaccccaacgccctgtattgcatttgccgccagcctcacaacaacaggtttatgatttgctgtgaccgctgtgaagaatggtttcatggcgattgtgtgggcatttctgaggctcgagggaggcttttggaaaggaatggggaagactatatctgcccaaactgcaccattctgcaagtgcaggatgagactcattcagaaacggcagatcagcaggaagctaaatggagacctggagatgctgatggcaccgattgtacaagtataggaacaatagagcagaagtctagcgaagaccaagggataaagggtagaattgagaaagctgcaaatccaagtggcaagaagaaactcaagatcttccagcctgtgatagaggcgcctggtgcctcaaaatgtattggccccgggtgctgtcacgtggcgcagcccgactcggtgtactgcagtaatgactgtatcctcaaacacgccgcagcgacaatgaagtttctaagctcaggtaaagaacagaagccaaagcctaaagaaaagatgaagatgaagccagagaagcccagtcttccgaaatgcggtgctcaggcaggtattaaaatctcttctgtgcacaagagaccagctccagaaaaaaaagagaccacagtgaagaaggcagtggtggtccctgcgcggagtgaagcactcgggaaggaagcagcttgtgagagcagcacgccgtcgtgggcgagcgatcacaattacaatgcagtaaagccagaaaagactgctgctccctcgccgtcactgttgtataaatgtatgtatcacctaggggttggcctcctggacccctcccgttctttctggatagccatcccctgggcctgtccaggactgggagttgcagctttgtgttaagctgatcacagacaccggctgcaccatcagcgggaagcagagcccatgtccaggatgcctcctgctgccctgtgtccatccctagtctgtcaggacttcctgtcactgttttccaaagctgtaaacctcactggtgaacgttcaccttaatgattgattctttaatctctgttttcactctcaggctctggtaagtattcgtattctcttcatcccagtctgattgcatagccacactgcccggcacgccacatccacccctgtctgcacatgagttgttctgacaacagcgctgtatacgcttcagtttttccacattgtccacggccagcacatgaaagcatcacttcttttttatgttgtgggaatctttgcaagttagtgttgcatctgattttcaggtgtacatttatttttgactgggcagataggggatttttttttttccatgtccgattcacacgctacacacccacatgaacacattcgaacttcgaaggccacacactcctgcttcataggccccacggtaagtgagttcacacctagaacactgtcctgaccgcaggacgcgtgccttggacttggtattctacatgtgactggctttcttgccctcgtctcttgaatgtttagactcttaagatcatatcctgccccaaatttcaaattaatgaaatgaagatatttcaaacagatctttgaaacctcagattctgtggtgcaattttaatgttttcttgtttctcagttttctgctataaaactattttcaattcag

SEQ ID NO: 1343 - DNA, 943 bp, Homo sapiens
  source 1..943: mol_type = genomic DNA
aacctcacgaggccttacgtgcctagagcggttcctctccgtggcgccctaccgccttcggcgcgaaggtggctggtgcgtaccgtcccgaaccctaggagccgaggtgagcgccgcgaagacccccgacattaagaagtggtgtccaccgcagcccccttaagccggataccctcccccaccccgaggagcaagcctgccttccgccacgcgccgcccgtcttccgcgcccgcgcagaacctcgcggctgtgcccgcctaaagccacgcccatcctctcttggccacgccctcagagactcctcccctgtcgcccagatcccacccgcaggaccccaaaacccaatgatcctgcagcagcccttgcagcgaggcccccagggaggggcccagcgcctcccgcgggccgccttgggggtgacttggggcctggacgccagggagcctctgcgcaagcagtttctgtctgaggagaacatggccacccacttctctcaactcagcctgcacaatgaccacccctactgcagcccccccatgaccttctccccagccctgcccccactcaggagcccttgctctgagctgcttctctggcgctatcctggcagcctcatccctgaggccctccgtctgctgaggctgggggacacccccagtcccccctaccctgcaaccccagctggggacataatggagctctgagtgctggtggacagtgcccctcccaccttccttcttccccacaacagaagagaccagcgactcccgcaaagggacaaggttcctccctctcctgcagagtaggcatctgggcaccaagaccttccctcaacagaggacactgagcccaacggagttctgggatgggaggggtgggagcatgggaagggaggcatcccacccccaagaagaactgaataaagattgctgagcaaaggaa

SEQ ID NO: 1344 - DNA, 3205 bp, Homo sapiens
  source 1..3205: mol_type = genomic DNA
ttctaacagctgggtgcgggtggagctgcgggcgatcgccagctcgagtgcagattccttgctgtgaccgaggttcagagtgagctctgtcggtgtgtcagtttgcctcttcaggtgattgcacgtctgtgtgcgagtctctccgtgtatgggtggctatgattagggtgagcctcagactggaactcaagtctaagttcattcactgctccagcaggcactcttcaatgaaacctcatcagcagatcgggctctcttcccttgccttgcctcctaacccccctaggccaggtgagggggacagggtactgggaggtaagaaggaactcttctgcaaggagggctctcacgtctgtcttaggcctgctccttaccagagtctttggggaagcagtagggagggcctgagggtctcaggaaaggctctctgctggtctggctctgctctgtagctccatctatttccctgtcccaggtcctttcttcctcctaaccccattgactctgaccatcccctgcccagagcctgaggtcccttctctggcccctctgctgggctggcccatgcaggtgaggccccgcatctggcatcctggaactggcagttggagcctgagctatgggcaaggtcacttcgacagcagttgaatgcccagctcctcatggtcccggaggagaggagggtaggtttgtcttctgatgagacatcatctgattcccttaagtcttggcactccatatgtgtcttggacagcaaagaacagcccttggcctgccagcagaaacagaggcagttcgtgaagccagtgactgagtcagagcagcccacagtgctggaactcctgctagctgagctccgaactctgttctcagctgtgttgcaggacagtagccctgcagcttggcgctatcttcatgcagtactgggtctactgcctccatatcgtgagttgctagttggccaccttgatttgctgcccttcctggagcagctgtactgctgggcaccctgggtccaaacccacctccatctggacctgctaggtgccattgtccaggcctttcctccagacagctctttgttagacagtgcttcccatgctgactgctgtccccagaagcggaggctccatcacaggcccccatgcccagcttgcccttttgtgcaggcccagtggagcaggcagcaagtaaaggaggagctggccacctggctgcgaccattgacactgcctgagctacagcgctgcctgggcattgttggtgctcaggtggccctagaagaggctgtgtggctggatggacttagtctccttcccttggcactggcagcggacatccctgtacggtatgaaagcagtgacactgacaatgcagaggtggagcctgttggaagaaaagagaccaggtctcagcttgactatgaagttcccagggaaaaggccttccaaaagagcagcaccggcttttcacctgagacttccttcctggatagccaggtgatgactgctctgaagatggagagatacctgaagaagatccacttcctctatctcaatgtggctcccagccggtactttaggccttacagcctgatggtggtgccacccgacaaggtgaatcccgagcactacatcttctctccctttgggatcttgcatgtacatcctgtggaaggtagcgagacgatgacactgggtacctggcaccatcactgtgttctctggcagcagctccagttcattccattctttaagtattgcctcttacgcaagtcctttacctgttggaagaagaatgtgagattacaggggctgcatcgactccagaaattcctagagaatcatctgctcttggctgtgccccactttggagctgggctactccatattagcaggcttctgcaggagctacactctgtgtcctggctaccccaggaactggatcggtgctatgagctgctggacctgcagacggctctagccgaggagaagcataaggctctacggctgctccatcgttgcctaaacctctgcacatccattcttcgactggttcacgaggacacataccacatgcaacagtgcctacaggagcgagtacaaaactgtgacaggatcaggacaggccaaggctccatataccttcagagggtacagcacaagcaactggagcagaagctgaagcaagcagaggcctggtggctgcagctgggaaagtttgcccgcctggttgactacatgatttgtcagagcctcatttctgtcttggaagagcagataacctcttttgtggccaacatccttcaagccccaaggcagaaaccctttctctcatcacagctggtctttgatgatcatggtcaactgtctcatgtgccctgtgttgaaaatatgatccagactctaactggaggcctacagtctgtcaagacctctgccttgcaggtattctgaattgggcagagagctggctgtgggaattcccagttcctatcctctgagtaatcagaagctcacaacctggtttgaatccctcattgctttcccatttctgccccttctccatatcctggcatgaaggtagtgcagtctgcagacctgaagacctcctcggattccctgtattctgaaggtatttagggagacctaggcagggggtaggaaggctgaaggagggaaagggcacaagtactaatggcatgggaagaaggcaggaggtccaggctatagagtcaggcactgggtgtggatggagcagctctaacctgggtactgcacatatgtgttgtgggtagaaaggtcagggaatgtttttgctcacaaattcacgtggttatgtgtatgtgcgtgcaatgagagggtgtatgaaagagtgtgagtacattgtccttccaaacctgattcatcccaaactctgtgaggtttttctccagtgccataattgcatttcatttactactgaattttattgctaagtaaatttgtacttgtttgaagagctctgcttgctcaacacttgctttatgtcatatagctctttttcatttcatatggattaattcattgtattgaaatattttatggttaccaattattattggttatcagtcttcacacttattaaccatcagcgtggaaacacatcttcacatttcccttatttaggatactaatgctgtcacaaataaaatcattaaatgcaa

SEQ ID NO: 1345 - DNA, 2498 bp, Homo sapiens
  source 1..2498: mol_type = genomic DNA
gagaaggcttgggctcgcgccgctgaagtcggcttacccgctggccgcctcctgacaagcgggagggatccgcggtggacccagggaagcggaggagcctggcggccaccccctcttcctcacttccctgtactctcatcgctctcggcctccgacacgaaaaggaagcaaatgagctgatggaagatctgtttgaaactttccaagatgagatgggattctccaacatggaagatgatggcccagaagaggaggagcgtgtggctgagcctcaagctaactttaacacccctcaagctctacggtttgaggaactactggccaacctactaaatgaacaacatcagatagcgaaggaactatttgaacagctgaagatgaagaaaccttcagccaaacagcagaaggaggtagagaaggttaaaccccagtgtaaggaagttcatcagaccctgattctggacccagcacaaaggaagagactccagcagcagatgcagcagcatgttcagctcttgacacaaatccaccttcttgccacctgcaaccccaatctcaatccggaggccagtagcaccaggatatgtcttaaagagctgggaacctttgctcaaagctccatcgcccttcaccatcagtacaaccccaagtttcagaccctgttccaaccctgtaacttgatgggagctatgcagctgattgaagacttcagcacacatgtcagcattgactgcagccctcataaaactgtcaagaagactgtttgttagctttaggactgaagcattttgaagggactgagtttcttaaccctctaatcagcaagtaccttctaacctgcaagactgcccgccaactgacagtgagaatcaagaacctcaacatgaacagagctcctgacaacatcattaaattttataagaagaccaaacagctgccagtcctaggaaaatgctgtgaagagatccagccacatcagtggaagccacctatagagagagaagaacaccggctcccattctggttaaaggccagtctgccatccatccaggaagaactgcggcacatggctgatggtgctagagaggtaggaaatatgactggaaccactgagatcaactcagatcaaggcctagaaaaagacaactcagagttggggagtgaaactcggtacccactgctattgcctaagggtgtagtcctgaaactgaagccagttgccgaccgtttccccaagaaggcttggagacagaagcgttcatcagtcctgaaacccctccttatccaacccagcccctctctccagcccagcttcaaccctgggaaaacaccagcccaatcaactcattcagaagcccctccgagcaaaatggtgctccggattcctcacccaatacagccagccactgttttacagacagttccaggtgtccctccactgggggtcagtggaggtgagagttttgagtctcctgcagcactgcctgctatgccccctgaggccaggacaagcttccctctgtctgagtcccagactttgctctcttctgcccctgtgcccaaggtaatgatgccctcccctgcctcttccatgtttcgaaagccatatgtgagacggagaccctcaaaaagaaggggagccagggcctttcgctgtatcaaacctgcccctgttatccaccctgcatctgttatcttcactgttcctgctaccactgtgaagattgtgagccttggcggtggctgtaacatgatccagcctgtcaatgcggctgtggcccagagtccccagactattcccatcgccaccctcttggttaaccctacttccttcccctgtccattgaaccagccccttgtggcctcctctgtctcacccttaattgtttctggcaattctgtgaatcttcctataccatccacccctgaagataaggcccacatgaatgtggacattgcttgtgctgtggctgatggggaaaatgcctttcagggcctagaacccaaattagagccccaggaactatctcctctctctgctactgttttccccaaagtggaacatagcccagggcctccaccagtcgataaacagtgccaagaaggattgtcagagaacagtgcctatcgctggaccgttgtgaaaacagaggagggaaggcaagctctggagccgctccctcagggcatccaggagtctctaaacaactcttcccctggggatttagaggaagttgtcaagatggaacctgaagatgctacagaggaaatcagtggatttctttgagctaggagaataagagtctggagactgggagccttcacttcggcctccgattggtggcgcatagggtgtaaccaataggaaacccctaaagggtacttaaaccccagattttgcaactggggctcttgagcagcttgctttagcctgctcccactctgtggaatatacttttgcttcaataaatctgtgcttttattgcttcattgtttca

SEQ ID NO: 1346 - DNA, 2195 bp, Homo sapiens
  source 1..2195: mol_type = genomic DNA
gcggtgcccggggcatctccgcggcggaactcagggaaggagctagctggggcgggggtgatgatccaggctgggttccagcatagggctcttggtgggcacgctggggtcgggtggaatgcaggagagagaggaggtgggacaggtgggtacctgggctggaggcagggcctgaggtgggcaggtgcagagggctgcacttctcggctgaagccgggaatgaggaccccgctctcgggtgggattggaggggacccgcggctgaggcgctgggctgcgacagggacatcaccgttctcctcctcagggagatggtgctcgtcgtgcacggcttcccgtcctccgtggccgcccttcggtttgagtgggcttggcagcacccgcacgcctcgcgccgcctggcgcacgtggggcctcgcctgcgaggagagacagccttcgctttccacctgcgcgtgctggcgcacatgctgcgcgcaccgccctgggctcgcctcccgctcacgctgcgctgggtgcgcccagacctccgccaggacctctgcctcccgccgccgccgcacgtgcctctggccttcgggcctccaccgccccaggccccggccccaaggcgccgcgcaggtccctttgatgacgcggagcctgagccagaccagggggatccaggggcctgctgctccctgtgcgcccagaccatccaggatgaagaggggcccttgtgttgcccccaccctggctgcctgctaagggcccatgtgatctgcctggcagaggagtttcttcaggaagaaccagggcagcttctgcccctagagggccaatgcccttgctgtgagaagtcactgctttggggagacctgatctggctgtgccagatggacactgagaaagaagtagaagactcagaattagaagaggaacatggagctgatccaggacacctcccgcccgccactggagtacgtgaagggggtcccgctcatcaagtactttgcagaggcactggggcccctgcagagcttccaagcccgacctgatgacctgctcatcaacacctaccccaagtctggcaccacctgggtgagccagatactggacatgatctaccagggcggcgacctagagaagtgtaaccgggctcccatctacgtacgggtgcccttccttgaggtcaatgatccaggggaaccctcagggctggagactctgaaagacacaccgcccccacggctcatcaagtcacacctgcccctggctctgctccctcagactctgttggatcagaaggtcaaggtggtctatgttgcccgaaacccaaaggacgtggcggtctcctactaccatttccaccgtatggaaaaggcgcaccctgagcctgggacctgggacagcttcctggaaaagttcatggctggagaagtgtcctacgggtcctggtaccagcacgtgcaggagtggtgggagctgagccgcacccaccctgttctctacctcttctatgaagacatgaaggagaaccccaaaagggagattcaaaagatcctggagtttgtggggcgctccctgccagaggagaccatggacttcatggttcagcacacgtcgttcaaggagatgaagaagaaccctatgaccaactacaccaccgtcccccaggagctcatggaccacagcatctcccccttcatgaggaaaggcatggctggggactggaagaccaccttcaccgtggcgcagaatgagcgcttcgatgcggactatgcggagaagatggcaggctgcagcctcagcttccgctctgagctgtgagaggggctcctggagtcactgcagagggagtgtgcgaatctaccctgaccaatgggctcaagaataaagtatgatttttgagtcaggcacagtggctcatgtctgcaatcccagcgatttgggaggttgagctggtaggatcacaataggccacgaatttgagaccagcctggtaaaatagtgagacctcatctctacaaagatgtaaaaaaattagccacatgtgctggcacttacctgtagtcccagctacttgggaagcagaggctggaggatcatttcagcccaggaggttgtggatacagtgagttatgacatgcccattcactacagcctggatgacaagcaagaccctccctccaaagaaaataaagctcaattaaaat

SEQ ID NO: 1347 - DNA, 2293 bp, Homo sapiens
  source 1..2293: mol_type = genomic DNA
ttccccactcccccgccctccccagggccctgggaaggggctcagcgtgggaaaggatggttgagttttaaccagaggcaaagcgtgagcgggatcagtgtgtgcggaacgcaagcagccgagagcggagaggcgccgctgtagttaactcctccctgcccgccgcgccgaccctccccaggaacccccagggagccagcatgaagcgagctcaccccgagtacagctcctcggacagcgagctggacgagaccatcgaggtggagaaggagagtgcggacgagaatggaaacttgagttcggctctaggttccatgtccccaactacatcttcccagattttggccagaaaaagacggagaggaataattgagaagcgccgacgagaccggatcaataacagtttgtctgagctgagaaggctggtacccagtgcttttgagaagcagggatctgctaagctagaaaaagccgagatcctgcagatgaccgtggatcacctgaaaatgctgcatacggcaggagggaaaggttactttgacgcgcacgcccttgctatggactatcggagtttgggatttcgggaatgcctggcagaagttgcgcgttatctgagcatcattgaaggactagatgcctctgacccgcttcgagttcgactggtttcgcatctcaacaactacgcttcccagcgggaagccgcgagcggcgcccacgcgggcctcggacacattccctgggggaccgtcttcggacatcacccgcacatcgcgcacccgctgttgctgccccagaacggccacgggaacgcgggcaccacggcctcacccacggaaccgcaccaccagggcaggctgggctcggcacatccggaggcgcctgctttgcgagcgccccctagcggcagcctcggaccggtgctccctgtggtcacctccgcctccaaactgtcgccgcctctgctctcctcagtggcctccctgtcggccttccccttctctttcggctccttccacttactgtctcccaatgcactgagcccttcagcacccacgcaggctgcaaaccttggcaagccctatagaccttgggggacggagatcggagctttttaaagaactgatgtagaatgagggaggggaaagtttaaaatcccagctgggctggactgttgccaacatcaccttaaagtcgtcagtaaaagtaaaaaggaaaaaggtacactttcagataattttttttttaaagactaaaggtttgttggtttacttttatcttttttaatgtttttttcatcatgtcatgtattagcagtttttaaaaactagttgttaaattttgttcaagacattaaattgaaatagtgagtataagccaacactttgtgataggtttgtactgtgcctaatttactttgtaaaccagaatgattccgtttttgcctcaaaatttggggaatcttaacatttagtatttttggtctgtttttctccttgtatagttatggtctgtttttagaattaattttccaaaccactatgcttaatgttaacatgattctgtttgttaatattttgacagattaaggtgttgtataaataatattcttttggggggaggggaactatattgaattttatatttctgagcaaagcgttgacaaatcagatgatcagctttatccaagaaagaagactagtaaattgtctgcctcctatagcagaaaggtgaatgtacaaactgttggtggccctgaatccatctgaccagctgctggtatctgccaggactggcagttctgatttagttaggagagagccgctgataggttaggtctcatttggagtgttggtggaaaggaaactgaaggtaattgaatagaatacgcctgcatttaccagccccagcaacacaaagaatttttaatcacacggatctcaaattcacaaatgttaacatggataagtgatcatggtgtgcgagtggtcaattgagtagtacagtggaaactgttaaatgcataacctaattttcctgggactgccatattttcttttaactggaaatttttatgtgagttttccttttggtgcatggaactgtggttgccaaggtatttaaaagggctttcctgcctccttctctttgatttatttaatttgatttgggctataaaatatcatttttcaggtttattcttttagcaggtgtagttaaacgacctccactgaactgggtttgacctctgttgtactgatgtgttgtgactaaataaaaaagaaagaacaaagta

SEQ ID NO: 1348 - DNA, 3391 bp, Homo sapiens
  source 1..3391: mol_type = genomic DNA
ctgcctttctcggaacggaacggagcagagtcgtgcgtggttgagtttagataaaagccgagtgagcgcgctctgttccttaagattagtttaaggtgccttggattgctctgaagagctttgaccacctgatattgcttacatctggaacttcttggcttctcattccccagatgtgcgggtcagagaggattctacaggcaggaaacatcttagaaatcagggttgggcaggcaggagccaggagagtagctacaatgacttcaccagtactggtggacatacgagaagaggtgacctgccctatctgcctggagctcctaacagaacccctgagcatagactgtggccacagcttctgccaagcctgcatcacaccaaatggcagggaatcagtgattggtcaagaaggggaaagaagctgccctgtgtgccagaccagctaccagccagggaacctgcggcctaatcggcatctggccaacatagtgaggcggctcagagaggtagtgttgggccctgggaagcagctgaaagcagttctttgtgcagaccatggagaaaaactgcagctcttctgtcaggaggatgggaaggtcatttgctggctttgtgagcggtctcaggagcaccgtggtcaccacacgttcctcgtggaggaggttgcccaggagtaccaggagaagtttcaggagtctctaaagaagctgaagaacgaggagcaggaagctgagaagctaacagcttttatcagagagaagaaaacatcctggaagaatcagatggagcctgagagatgcaggatccagacagagtttaatcagctgcgaaatatcctagacagagtggagcaacgggagctgaaaaagctggaacaggaagagaagaaggggctacgaattatagaagaggctgagaatgatctggtccaccagacccagtcgctgcgagagctcatctcggatctggagcgtcgatgtcaggggtcaacaatggagctgctgcaggatgtgagtgatgtcacagaaaggagtgagttctggaccctgaggaagccagaagctctccctacaaagctgagaagtatgttccgagccccagatctgaaaaggatgctgcgagtgtgtagagagctgacagatgtccaaagctactgggccatccaggggtctttaaccagaagagagaggagagcctcaggagttaggaccagaagaagccagggaagcagtgcaatggcttcaaaaatcttgcttaacgtacaagaggaggtgacctgtcccatctgcctggagctgttgacagaacccttgagtctagactgtggccacagcctctgccgagcctgcatcactgtgagcaacaaggaggcagtgaccagcatgggaggaaaaagcagctgtcctgtgtgtggtatcagttactcatttgaacatctacaggctaatcagcatctggccaacatagtggagagactcaaggaggtcaagttgagcccagacaatgggaagaagagagatctctgtgatcatcatggagagaaactcctactcttctgtaaggaggataggaaagtcatttgctggctttgtgagcggtctcaggagcaccgtggtcaccacacagtcctcacggaggaagtattcaaggaatgtcaggagaaactccaggcagtcctcaagaggctgaagaaggaagaggaggaagctgagaagctggaagctgacatcagagaagagaaaacttcctggaagtatcaggtacaaactgagagacaaaggatacaaacagaatttgatcagcttagaagcatcctaaataatgaggagcagagagagctgcaaagattggaagaagaagaaaagaagacgctggataagtttgcagaggctgaggatgagctagttcagcagaagcagttggtgagagagctcatctcagatgtggagtgtcggagtcagtggtcaacaatggagctgctgcaggacatgagtggaatcatgaaatggagtgagatctggaggctgaaaaagccaaaaatggtttccaagaaactgaagactgtattccatgctccagatctgagtaggatgctgcaaatgtttagagaactgacagctgtccggtgctactgggtggatgtcacactgaattcagtcaacctaaatttgaatcttgtcctttcagaagatcagagacaagtgatatctgtgccaatttggccttttcagtgttataattatggtgtcttgggatcccaatatttctcctctgggaaacattactgggaagtggacgtgtccaagaaaactgcctggatcctgggggtatactgtagaacatattcccgccatatgaagtatgttgttagaagatgtgcaaatcgtcaaaatctttacaccaaatacagacctctatttggctactgggttatagggttacagaataaatgtaagtatggtgtctttgaagagtctttgtcctctgatcccgaggttttgactctctccatggctgtgcctccctgccgtgttggggttttcctcgactatgaagcaggcattgtctcatttttcaatgtcacaagccatggctccctcatttacaagttctctaaatgttgcttttctcagcctgtttatccatatttcaatccttggaactgtccagctcccatgactctatgcccaccaagctcttgaattttctcatttcttcacctacaaccctttgtcttgacttatctcctgcaactgactcatctgcaacattcacaccattgcttccttgtggtttcccttctttagaacttttactcatccttgagatgtatggtgtatttggcttgagttatgagagatgcttatttattcatttactctttttcatattttcagagaaagttacctaatccctcctaaagacacagcagtatgggtataacatccttgccttcccatttatccatgtttcactttatcactgatatgaagaggcccaaagcctgttagccaccatccatgctacctaggtagtccataggaaccacccccatgaccaccaccaacatcaactaaaggttcttggagggtatgtcagtgtgttgctcaggataccccaggtacatcaaggaatcaaggagaggaaaatatgagcaatatgtgtattcagagtgaagattttatgtccagagtatttgagctcaaaccttgcctgttgttttctaatcatgatgaatactttctcagtttctttttcctgaaatataaattgggatttaagactgtacctaactattaagatcactgtgtaaaactaagtgtctctaaatgtaatgcatcgatttagtgtctggaacataataaatatttgctctcatgattgctaaaaa

SEQ ID NO: 1349 - DNA, 5787 bp, Homo sapiens
  source 1..5787: mol_type = genomic DNA
aaaagggcggtggggcggggggcggggcagggagagggagagaaatccagcagacatctagctctgcctttctttcccagccacagccagggtagggctgataaggcgctgatgcgttgatggcagccttgcagagctagacctgcacttaacttgcagctgcctcccgagcctccaagatgtccacgccctgggtgacaggcggcagggcgctgccccgtgctcccccggctctgctcgacagcagcacgcagtgagagcctcgccgccgccgaggagcaactcatgtaacggcacagccaacaagatgaacggagctttggatcactcagaccaaccagacccagatgccattaagatgtttgtcggacagatcccccggtcatggtcggaaaaggagctgaaagaactttttgagccttacggagccgtctaccagatcaacgtcctccgggaccggagtcagaaccctccgcagagtaaaggttgttgtttcgtaacattttatacaagaaaagctgcacttgaggcccagaatgcactgcacaatattaaaactttacctgggatgcatcatcccattcagatgaaacctgcagatagtgaaaagtccaacgctgtggaagacagaaaattgttcataggaatggtatcgaagaaatgtaatgagaacgacatcagggtgatgttctctccatttggccagatagaagaatgccggatcctccggggacctgatgggctgagtcgaggctgtgcgtttgtcacattttctacaagggcaatggcacagaatgcaatcaaagccatgcatcagtctcagaccatggagggctgctcttcacctatcgtggtgaagtttgctgacactcagaaggacaaagagcaaaggcgcctccagcagcagctcgctcagcagatgcagcagctcaacactgccacctgggggaacctgacagggctgggcggactgaccccacagtatctggcgctcctgcagcaggccacctcctccagcaacctgggtgcgttcagcggcattcaacaaatggcaggcatgaatgctttacagttgcagaacctggcgacgctggctgctgctgcagctgcggcccagacctcagccaccagcaccaatgcaaaccctctctctaccacgagcagcgccctgggagccctcacgagtcccgtggctgcttcaacccccaactccactgctggtgcagccatgaactccttgacctctctcgggactctgcaaggactggctggagccactgttggactgaataatattaatgcactagcagctcccagaagcaaaaggcttttacttccaaaagataacaacggtatggcggctctgaatggaggacttggcgccacaggcttgacgaatggcacggctggcaccatggacgccctcacccaggcctactcaggaattcaacagtacgcagccgccgcgctgcccactctgtacagccagagcctgctgcagcagcagagcgctgcaggcagccagaaggaaggtccagagggggcaaacctctttatttaccaccttccacaggaatttggagaccaggacattctgcagatgttcatgccttttggaaatgttatctctgctaaagtcttcattgacaaacagaccaatctgagcaagtgctttggttttgttagctacgacaatccagtctctgcacaagctgctatccaagctatgaatggctttcagatcggcatgaaacgcttgaaggtgcagctgaagcgttccaaaaacgacagcaaaccttactgatcctaaccccagaggctccctgctctcattttagctttcttaggacatcttcatgcccgttagttcatcgtttgcctagcatgtccctgtggcgtctcaaaaaaaagtttcatcgtcccgtcattgtttctgatgtctttctgacctcacatcatatttggttctcctactgacctttgatctagtttgacctttgaaatttgcatgtgacctcatctagctatgaattctgggaagtcaatgtgaaaaacattgctgcattcatgcaagactgaaatttattattagacaaattcattatagaaaaaacctgtggcaaaaacgtttctttcttattttttttcttttcctaaaacagacttgaaagtattatacagggattggcattcttcccggtcactggtaacaatagcaatatgtgtccagggacacagaatgttggtttctaacagactacttccaaaaacagtttgagaaaaaaactgtctgattttaagtctctagaggtctgtaatagtttttacatttttcaggcagtgtaaagttttttgataaggccattttaggtggctcactttctcattaagatatatatatagaaccactttttgtagattagtataagaaaaatatttaccctgttttggggcaaatgctacctatttgtgtcaccttttgctgaactcacagttagacaatccatggtttaatgcacatgaaattacctatattttatactgtttcaatgtacaggagaaaggttactgtaaactgtgttatgttggtgcttctgtgaattaagttgtggtttcatcatgagtcttaatgttctttgttgataagacaagtttagaattggtttacttaatacaaaaaaaaaaaaaagaatttcaaaaaaaaaagttgtttgcttaaaaaaaatttcatgtgagggaaaaaaaaaaaacctattccagaataagttttgtgttggcttgtgaagcattgatgtcattttttttaattgtggactatttagatgtgtttgtgttcagcaaaatgtgatgtttttttcttttaaagaaaaaaagtgaaaatatatagtgccaaattccaaaggtacttccttcctagagcttcagtgtgtttcttgtgagaagtaatttgataacatgggtattttattatgtgttttgtataaatccctaatatttaaaaaaaaaaacaaaacaaaaaaaggttacaaagtttgttaacttgctatcctgtggtcttgttgcctgaaattgttattgtttgttatttctctctgatgttttttgtaagacattgtataagtgcccatgtcccacttttttaaccactccgcacatcagtgctgtgaaggcaacctcaccatgtattttcttcataatctatggaaacctctaaggtgagaaagttttgaacttttaaccctttctacccagagctatctggaatgttgatgactttttatactgtcatgatttgagtttgttttggggtgtttccaatttggatttttttccctgcatctatcctctaagttgtttcggtttgactactttgttctttggttaagatccaaaagaaaacagaaaacaattccacgaggccaatctaaagggaaaaaatcctacactacttttactacttttgattatttctcatttttgggaaaagaattcctaatgtgctactagaattccttcttcagttttaacgagtaattggataaaccctgagggaaaacggaggtagattcagcacctaacaatcctgtatgcttttgagatcacgtttagtgctatgtcctagtctagaatattttcatataccttgcagtaaaacgactttgtggcaggacagtctcttgaggggttttgtttctgtttcctaaatactcctaaataatatttctaatcagccattatgctggggcatctctgatcccagtaggtacctctgaatataccaggtgtctggagttagaagcccatagccctttcccagcctttttggtttttttaattgaacacatttcatctaagtaaagctcagttctttatcacaatttactgaccaaatacctagcaccagttcctgctgccactttttaaagtgccatatgactttctacgaacaggtaccttgctgtcttgacaaatcctaatgtcacgcctacagccccaacacaagctccagtcttcctcttcggcatgccctggaagcttcttccagtcttcctcttcggcatgccctggaagcttcttggcctcagctccccttccccgctcagcaccctgttaggatcagtgtgtgtggatgggatagccctgggatggaaaggactagcctctactgatgcaaaaaaacaaaaagcaacacaaacgtttccttcttatagcacatgcacttccttacaatgacatgatttgtattatcctcacatgtgtttactactgctggggccttccttcatcctctgagggctattttgtactttctgcagcaatcagcttaataacaacacttattgcacctgtctctctctgagaacacggtgtgtctcgacacgtaccacgtacgtggaaacacaagagcccaccacttgaatttctaagaccatttcattctgaaacttcttatcaattacctaaatctcaacgaaaaacaatttactgaagccgactcccctccccatctccctctcaacctcaacccacctgcatgcatctcccccagaggaaacactgagggtaggggacaggaggctcaggacgcgccctctgaatcgagtgtttcttcttcacaagtcaccaagagaggacatgagggggaaagtcctttttgcccttctccaaaaaataaccttccacagagacaaactgtccttctatccacttttatcttttaataaatatcaaaaggaaaaagctgcaagggtgcaaagggcctgtgccagaagaaaacacacacagggaaaccgctttttttaatcaattgtagagaatagtcatttttaatctaaattagagaattgtgatacaatggcagtcctcaaaggcgtaacgagttcatctttctttcaccataggggttatagttggcttgtgctactctggaatcattttactgtttgtttttattatcttaagtgctaattaaaaaaaaaataaaattttaaaaaaacctgtagtttcattacctttttgaataatgtcatacaaaaaatgtatttgtttttttgtgctgtgagaattgatgtttgtagattaataatcattttgtttagaattacaaaatagtttttaaatattgtctgagaaaagccaaagttaatgcaacctagtggaaactgtaagaccatttgagtattgtttgttttattgatgcatttggattttgttgtttgatggaatttgagccaaaaaaaaaatacgcaggctttcctatttctacaactgattgtacttatgcattttgtaccagtggaactttttatactggagattaaaaaaaaaatggaaatttttgtggcttgctctggtgggcccctgacaatgactgatttcaagtttgatttcgggttgattgattgattgattgatagaaagaaagttgcttttcttttgagaattaaaaactttggcttgatttcttttttccctttgcttatatctagcattagaattttgtcttaaaataacagcggtaagtttcactttttattctgtattgtgcagttacacaataaggtaattagatttagaagtactcagtcactttaagtggataaatgtattagttaaaactttagggtttgcttttttgctgtttagatcaaagttttttctgattcttctgtcctcattgtgaacataaccgtgtagttgaaacagtcaaacttatttttgtaatgtatgttattgtgtgatgcagttttttgcttctgtctccaatattaaaccattttcctaata

SEQ ID NO: 1350 - DNA, 2981 bp, Homo sapiens
  source 1..2981: mol_type = genomic DNA
agtgtaatgctagaagtcctagaagaaatttggagtgtgcgtgcgcgccgagcgcaccggccttgcccaggccccagcctggccgatgacaccgatgccaacagcaatggttcaagtggcaatgagtccaacgggcatgagtctagaggcgcatctcagcggagctcacacagctcctcctcaggcaacggcaaggactcagccctgctggagaccactgagagcagcaagagcacaaactctcagagcccatccccacccagcagttccattgcctacagcctcctgagtgccagctcagagcaggacaacccgtccaccagtggctgcagcagtgaacagtcagcccgggcaaggactcagaaggaactcatgacagcacttcgagagctcaagcttcgactgccgccagagcgccggggcaagggccgctctgggaccctggccacgctgcagtacgcactggcctgtgtcaagcaggtgcaggccaaccaggaatactaccagcagtggagcctggaggagggcgagccttgctccatggacatgtccacctataccctggaggagctggagcacatcacgtctgagtacacacttcagaaccaggataccttctcagtggctgtctccttcctgacgggccgaatcgtctacatttcggagcaggcagccgtcctgctgcgttgcaagcgggacgtgttccggggtacccgcttctctgagctcctggctccccaggatgtgggagtcttctatggttccactgctccatctcgcctgcccacctggggcacaggggcctcagcaggttcaggcctcagggactttacccaggagaagtccgtcttctgccgtatcagaggaggtcctgaccgggatccagggcctcggtaccagccattccgcctaaccccgtatgtgaccaagatccgggtctcagatggggcccctgcacagccgtgctgcctgctgattgcagagcgcatccattcgggttacgaagctccccggataccccctgacaagaggattttcactacgcggcacacacccagctgcctcttccaggatgtggatgaaagggctgcccccctgctgggctacctgccccaggacctcctgggggccccagtgctcctgttcctgcatcctgaggaccgacccctcatgctggctatccacaagaagattctgcagttggcgggccagccctttgaccactcccctatccgcttctgtgcccgcaacggggagtatgtcaccatggacaccagctgggctggctttgtgcacccctggagccgcaaggtagccttcgtgttgggccgccacaaagtacgcacggcccccctgaatgaggacgtgttcactcccccggcccccagcccagctccctccctggacactgatatccaggagctgtcagagcagatccaccggctgctgctgcagcccgtccacagccccagccccacgggactctgtggagtcggcgccgtgacatccccaggccctctccacagccctgggtcctccagtgatagcaacgggggtgatgcagaggggcctgggcctcctgcgccagtgactttccagcagatctgtaaggatgtgcatctggtgaagcaccagggccagcagctttttattgagtctcgggcccggcctcagtcccggccccgcctccctgctacaggcacgttcaaggccaaggcccttccctgccaatccccagacccagagctggaggcgggttctgctcccgtccaggccccactagccttggtccctgaggaggccgagaggaaagaagcctccagctgctcctaccagcagatcaactgcctggacagcatcctcaggtacctggagagctgcaacctccccagcaccactaagcgtaaatgtgcctcctcctcctcctataccacctcctcagcctctgacgacgacaggcagaggacaggtccagtctctgtggggaccaagaaagatccgccgtcagcagcgctgtctggggagggggccaccccacggaaggagccagtggtgggaggcaccctgagcccgctcgccctggccaataaggcggagagtgtggtgtccgtcaccagtcagtgtagcttcagctccaccatcgtccatgtgggagacaagaagcccccggagtcggacatcatcatgatggaggacctgcctggcctagccccaggcccagcccccagcccagcccccagccccacagtagcccctgacccagccccagacgcctaccgtccagtggggctgaccaaggccgtgctgtccctgcacacacagaaggaagagcaagccttcctcagccgcttccgagacctgggcaggctgcgtggactcgacagctcttccacagctccctcagcccttggcgagcgaggtagccacctggggcctcctggagcctgccctctgcccagtctaggactggattgttggggggtgggtcttaagggaggtgtttctgctccagggacccaggctggtgttgcttccaccactaggccctgcctagggacaggcccctcgctagcttctccccactaggatggggttccgggctgcagccagaggagggcagcctggggggatggcactgggatgggcaggcagaggtgctgtctccaggtaagcgacttcaggcctagcctgggggcaggggcaggaagtatgcccacttaggagtcagttgtcactgatgaagagacatgcatagattctgggccaactctgggtggggtctgggcttcaagggcaggtggaaggcagcccctccaggtgcctgagggagatcccctgcaggcagacgcaggactcaggactgggctttccagccccactcttcactccattgcaagctaggcagaatacggcctcgatgggcaggaggaatgcctaggctggcagtgcccacaggagtttggcggaccagagccatctgt

SEQ ID NO: 1351 - DNA, 2924 bp, Homo sapiens
  source 1..2924: mol_type = genomic DNA
ggttgcgcgggagactatggcgtcctcctcggtcccaccagccacggtatcggcggcgacagcaggccccggcccaggtttcggcttcgcctccaagaccaagaagaagcatttcgtgcagcagaaggtgaaggtgttccgggcggccgacccgctggtgggtgtgttcctgtggggcgtagcccactcgatcaatgagctcagccaggtgcctcccccggtgatgctgctgccagatgactttaaggccagctccaagatcaaggtcaacaatcaccttttccacagggaaaatctgcccagtcatttcaagttcaaggagtattgtccccaggtcttcaggaacctccgtgatcgatttggcattgatgaccaagattacttggtgtcccttacccgaaacccccccagcgaaagtgaaggcagtgatggtcgcttccttatctcctacgatcggactctggtcatcaaagaagtatccagtgaggacattgctgacatgcatagcaacctctccaactatcaccagtacattgtgaagtgccatggcaacacgcttctgccccagttcctggggatgtaccgagtcagtgtggacaacgaagacagctacatgcttgtgatgcgcaatatgtttagccaccgtcttcctgtgcacaggaagtatgacctcaagggttccctagtgtcccgggaagccagcgataaggaaaaggttaaagaattgcccacccttaaggatatggactttctcaacaagaaccagaaagtatatattggtgaagaggagaagaaaatatttctggagaagctgaagagagatgtggagtttctagtgcagctgaagatcatggactacagccttctgctaggcatccacgacatcattcggggctctgaaccagaggaggaagcgcccgtgcgggaggatgagtcagaggtggatggggactgcagcctgactggacctcctgctcttgtgggctcctatggcacctccccagagggtatcggaggctacatccattcccatcggcccctgggcccaggagagtttgagtccttcattgatgtctatgccatccggagtgctgaaggagccccccagaaggaggtctacttcatgggcctcattgatatccttacacagtatgatgctaagaagaaagcagctcatgcagccaaaactgtcaagcatggggctggggcagagatctctactgtccatccggagcagtatgctaagcgattcctggattttattaccaacatctttgcctaagagactgcctggttctctctgatgttcaaggtggtggggttctgagacacttgggggaattgtggggatattctagccaccagttctcttcttcctttgctaaattcaggctgcaggctccttccatccagataactccatcctgtcgagtaggctctttctgaccctcagaaatacattgtcctttttcctctttgcccatttttcttccctctcttcctccccatgagaagtctgcttgtagtattagaatgttattgttgactctctcccaagtgccttgatctttgtaatatctcctgttgtttctatgatataggagctaggggaagggggttgtttgccttcttcaggacctgactggacagatggacctggctcaagcaactactctggatgcactttgctgtgtgggatgaactaaaagtgtctgaattttgctgataactttataaaactcactatggcatgcttccctcctggtgggccctaggatggatgacactcaagatactacagatgtgggtgcaggcatgcacacacacgatggaatatggccattcctacacaggtggggtagagagtgggtcagcagcctggcacctcacagaggtgggacctaagaggactcatgattatgcagagaattggattgggtctctgtcatagattgagtaatctcttcccttacctcaattccatctccacccatctctacatctgggcacagcaacccagagatggccaaaagcattcaagcctgggggaagatgtttgactattgctgctcttcaccagaacctcacacctctcctgggactggaacccttcagtgggtgtgtggccagttttggaggctggaatgatgggccagggtgtaggattcattctccatgtaaagtttcctttcatcctgcctagccatccccaaggtttatttccagaagaaaggaatatctctacttggatcaattctggtcatttcaagaggatggaggcctcaagtgtgggaacttcccctactccctggatgtgtgtacctagcacacttccttctcccacccctttttccagttggatttgtttttctgttctcttctgtcctgtcttatactgcaactgtgtctcctaggggacagatggccttctttgtcatcttcactctccacccccagagaggagtcagagccataactcaatcactcagcccctccaaagatagttgatgtgtgataatctcataatgttgagaaccctgatgagatacattgtcttcctctccctacaatgcctctggggccaaggcacccattcttcttgctatcctccatcccccttgaggcttccactttttttttttttagacataaagctgggcatcagcaactggcctgtggtgatgcaaagctgctttgctctgtatctggctggactgatctgtctcacaagaagccatgaggccatagggagaagctccctctccccttcatcttctgctccaaaggtggtagcaagaggagtacccagttaggggttggagcccccatataacatcttcctgtcagaagactgatggatctttttcattccaaccatctccctttcccccgatgaatgcaataaaactctgtgacaccagcaa

SEQ ID NO: 1352 - DNA, 2296 bp, Homo sapiens
  source 1..2296: mol_type = genomic DNA
ggaagttgagcggcggcaagaaataatggcggcagctacgggggatcctggactctctaaactgcagtttgccccttttagtagtgccttggatgttgggttttggcatgagttgacccagaagaagctgaacgagtatcggctggatgaagctcccaaggacattaagggttattactacaatggtgactctgctgggctgccagctcgcttaacattggagttcagtgcttttgacatgagtgctcccaccccagcccgttgctgcccagctattggaacactgtataacaccaacacactcgagtctttcaagactgcagataagaagctccttttggaacaagcagcaaatgagatatgggaatccataaaatcaggcactgctcttgaaaaccctgtactcctcaacaagttcctcctcttgacatttgcagatctaaagaagtaccacttctactattggttttgctatcctgccctctgtcttccagagagtttacctctcattcaggggccagtgggtttggatcaaaggttttcactaaaacagattgaagcactagagtgtgcatatgataatctttgtcaaacagaaggagtcacagctcttccttacttcttaatcaagtatgatgagaacatggtgctggtttccttgcttaaacactacagtgatttcttccaaggtcaaaggacgaagataacaattggtgtatatgatccctgtaacttagcccagtaccctggatggcctttgaggaattttttggtcctagcagcccacagatggagtagcagtttccagtctgttgaagttgtttgcttccgtgaccgtaccatgcagggggcgagagacgttgcccacagcatcatcttcgaagtgaagcttccagaaatggcatttagcccagattgtcctaaagcagttggatgggaaaagaaccagaaaggaggcatgggaccaaggatggtgaacctcagtgaatgtatggaccctaaaaggttagctgagtcatcagtggatctaaatctcaaactgatgtgttggagattggttcctactttagacttggacaaggttgtgtctgtcaaatgtctgctgcttggagccggcaccttgggttgcaatgtagctaggacgttgatgggttggggcgtgagacacatcacatttgtggacaatgccaagatctcctactccaatcctgtgaggcagcctctctatgagtttgaagattgcctagggggtggtaagcccaaggctctggcagcagcggaccggctccagaaaatattccccggtgtgaatgccagaggattcaacatgagcatacctatgcctgggcatccagtgaacttctccagtgtcactctggagcaagcccgcagagatgtggagcaactggagcagctcatcgaaagccatgatgtcgtcttcctattgatggacaccagggagagccggtggcttcctgccgtcattgctgcaagcaagagaaagctggtcatcaatgctgctttgggatttgacacatttgttgtcatgagacatggtctgaagaaaccaaagcagcaaggagctggggacttgtgtccaaaccaccctgtggcatctgctgacctcctgggctcatcgctttttgccaacatccctggttacaagcttggctgctacttctgcaatgatgtggtggccccaggagattcaaccagagaccggaccttggaccagcagtgcactgtgagtcgtccaggactggccgtgattgcaggagccctggccgtggaattgatggtatctgttttgcagcatccagaagggggctatgccattgccagcagcagtgacgatcggatgaatgagcctccaacctctcttgggcttgtgcctcaccaggttcttgatcaatatgaacgagaaggatttaacttcctagccaaggtgtttaattcttcacattccttcttagaagacttgactggtcttacattgctgcatcaagaaacccaagctgctgagatctgggacatgagcgatgatgagaccatctgagatggccccgctgtggggctgacttctccccggccgcctgctgaggagctctccatcgccagagcaggactgctgaccccaggcctggtgattctgggcccctcctccataccccgaggtctgggattcccccctctgctgcccaggagtggccagtgttcggcgttgctcgggattcaagataccaccagttcagagctaaataataaccttggccttggccttgctattgacctggga

SEQ ID NO: 1353 - DNA, 1484 bp, Homo sapiens
  source 1..1484: mol_type = genomic DNA
gagttccgtattctagttctgtgtgatctgatctttaccttcccttccttggatccctgtgcacctactggagccaggttactctgggtcctggacctgactgcctcattctggaggcttccagacagccacagttagtgcccaaacctgagaggatggcttcagatggagcatctgcattgccgggaccggatatgagcatgaaacctagtgccgccccgtctccatcccctgcacttccctttctcccaccaacttctgacccaccagaccacccacccagggagccacctccacagcccatcatgccttcagtattctctccagacaaccctctgatgctctctgctttccccagctcactgttggtgacaggggatgggggcccttgcctcagtggggctggggctggcaaggtcattgtcaaagtcaagacagaaggggggtcagctgagccctctcaaactcagaactttatccttactcagactgccctcaattcgactgccccgggcactccctgtggaggccttgagggtcctgcacctccatttgtgacagcatctaatgtgaagaccattctgccctctaaggctgttggtgtcagccaggagggtcctccaggccttccgcctcagcctccaccaccagttgctcaactggtccccattgtgcccctggaaaaagcttggccagggccacatgggacaaccggggaaggaggtcctgtggccactctatccaagccttccctaggtgaccgctccaaaatttccaaggacgtttatgagaacttccgtcagtggcagcgttacaaagccttggcccggaggcacctatcccagagtcctgacacagaagctgtgaaggagtatgttgacatcatggaatggctggtggggactcacttggccactggggagtcagatggaaaacaagaggaagaagggcagcagcaggaggaggaagggatgtatccagatccaggtctcctgagctacatcaatgagctgtgttctcagaaggtctttgtctccaaggtggaggctgtcattcaccctcaatttctggcagatctgctgtccccagaaaaacagagagatcccttggccttaattgaggagctagagcaagaagaaggactcactcttgcccagctggtccagaagcgactcatggccttggaagaggaggaagatgcagaggcgcctccaagtttcagtggcgctcagttggactcaagtccttctggttctgttgaggatgaagatggggatgggcggcttcggccctcacctgggcttcagggggctgggggcgccgcttgccttggaaaggtttcttcttcaggaaaacgggcaagagaagtgcatggtgggcaggagcaagccctagatagccccagagggatgcacagggatgggaacactctgccatcccccagcagctgggacctgcccaccaatggagaatcccaatgttga

SEQ ID NO: 1354 - DNA, 1382 bp, Homo sapiens
  source 1..1382: mol_type = genomic DNA
gctcaggccccgccctcagacgagcaccgcccgccggctcctcccgcggctcgaatcgccgtctctctcctccccgccccgccgagttctagaattcgccgcgcagctgcttcagcccctcagccccagccggaccctcgggtcctcatccaccctcgcaggcgcaggccgtggctaccccgaagtcaactgtggaggatccttcctggcttccttcagctccatcctgcccttggatctaggtcacccgcttggacccaactatctgaggcccgaatgccccgcagctcccgctgctccctcgcgttctgctgacccccctccgagtcaggacatcccctttagaccccactttaggccctttcagcccaactccaactagccccatctgccgcttccgcacgcaccaaaaaggagactaactacccagccccgtccagtcatgcaggtgcaggatgatggagtcaacctcatcccctttgccaagtgttccagggtggtcagccgatctccacccccaaggttgccttcccagagcctcagacccatgccccagcgttatggagatgtcttctggaagaaccttaatcaaaggcccacccccacttggctggaggagcagcacattccacccatgctgctcccaccccctgaaatgctttggagaagaaagaagaggaggccatgtttggaaggaatgcagcagcagggccttgggggagtccccgcccgggtgagggctgtcacttaccacctggaggacctaagaaggcgtcagagcatcatcaacgaactgaagaaggcccagtggggcagctctggggctgcatctgagccagtggtgcttggcgaagagggctgtggattccccagcaccaatgaataccctgatctggaagaggagagagcaacctatccacaggaagaggaccgttttctcactcctggcagggcccagctgctttggtctccctggagccccctggatcaggaggaggcttgtgcctccaggcagctgcactctctggcctcgttcagcactgtcacagccagaaggaacccccttcacaatccctgggggatggagttggcagcgtctgaagagtaaggagaaaccaccgatgccgagaggctagtggtgccccagggacccaagactagttccgtcactagagtcaccctcattgctgacatgaaggcgtttccccttccttcgtctctccaactgcctttcccatcctctgaactaggcattaacagcccccgtgggctcccatctcaacccaccgctctcacaggagcaccccaagtcctgttttcctccaggccccgctcctggccttgtattctctctgctctgttattaaaaagcaagcaagtgg

SEQ ID NO: 1355 - DNA, 616 bp, Homo sapiens
  source 1..616: mol_type = genomic DNA
agcggagctgagctcgggtaggccgcgcgaggtccctcctctccgggcgtccgtgcgcctagctctgcgctgggagcctcgcgccctttgacagcagttagttgctgactcggatgcagagagtcggtaacaccttctccaacgagagccgggtggcatcccggtgtcccagcgtgggccttgctgaacggaaccgggtggccacaatgccggtgcggctgctcagggacagtccagcggctcaggaggacaatgaccatgccagagacggtttccaaatgaagctggatgcccacggcttcgccccggaggaactggtggtgcaggtggatggccaatggctgatggtgaccggacagcagcaactggacgtcagggacccggaaagggtcagttaccgcatgtcacagaaggtgcaccggaaaatgctcccgtccaacctgagtcctaccgccatgacctgctgcctgaccccctccgggcagctgtgggtcagaggccagtgtgtggcgctggccctccctgaagcccaaacaggaccgtccccgagactcgggagcctcggctctaaggcttccaacctgacccggtaaacaaacgacgcgatgtgcagcag

SEQ ID NO: 1356 - DNA, 2674 bp, Homo sapiens
  source 1..2674: mol_type = genomic DNA
ctgctttgtctgctgtcccctctctgctggagaacttagcccagagctagtgaacgagcctctgccgcagacatggagaaactcagcgcgctgcaggagcagaagggcgagctgcgcaagcggctgtcctacaccacacacaagctcgagaagctcgagaccgagttcgactccacgcgccactacctggagatcgagctgcggcgcgcgcaggaggaactggagaaggtcacggagaagctgcgcaggattcagagcaactacatggcactgcagaggatcaaccaggagctggaggacaagctgtaccgcatgggccagcactatgaggaggagaagcgtgcgctgagccacgagattgttgccctcaacagccatctgctagaagccaaggtgaccatcgacaagctgtcagaggacaacgagctctataggaaggactgcaatctagcggcccagctgctgcagtgcagccagacctacggcagggtccacaaggtgtctgagctgccctcggatttccaggagcgcgtgagcctgcacatggagaagcacggctgcagcctgccatccccgctctgccacccggcctacgccgacagcgtccccacctgcgtcattgccaaggtgctggagaagccggaccccgccagcctgtcctcccgcctgtccgatgcctccgcccgcgacctggccttctgcgacggggtggagaaaccaggcccgcggcccccctacaagggagacatctactgcagtgacacagccctctactgcccggaggagcggcggcgagaccggcggcctagcgtggacgcgcccgtgaccgacgtgggcttcctgcgggcccagaactccactgacagcgcggccgaggaggaggaggaggccgaggcggcggccttcccggcgggcttccagcatgaggccttccccagctacgcaggctcactgcccacgtccagctcctactccagcttcagcgccacgtcggaggagaaggagcacgcgcaggccagcacgctgaccgcgtcgcagcaggccatctacctgaacagccgcgacgagctcttcgaccgcaagccacccgccaccacctacgagggcagccctcgctttgccaaggccacggccgcggtggcggccccgctggaggccgaagtggccccaggcttcgggcggaccatgtcaccgtacccggccgagaccttccgcttcccggcctctccgggtccccagcaggccctgatgcccccaaacctgtggagcctgcgggccaagccggggaccgcccggctccccggggaggacatgaggggccagtggcgtcccctgagcgtggaggacatcggcgcctactcctaccccgtgagcgctgccggccgcgcctcaccctgcagcttctctgaacgctactacggcggggccgggggcagcccgggcaagaaggccgacggccgcgccagcccgctctacgccagctacaaggccgacagcttctccgagggggacgacctctcccagggccacctggcagagccctgcttcctgcgggcgggcggcgacctgagcctcagtcccggccgctcggctgacccactgcccggctatgcacccagcgaggggggggacggggacaggctcggggtgcagctgtgtgggaccgccagcagccctgagcccgagcagggttccagggactccttggagccgagctccatggaggcctccccggaaatgcatcctgccgcccgcctcagcccccagcaggcctttccgcggactggtggctcggggctgagccgcaaggacagcctcaccaaggcccagctctacggaaccttgctcaactgagcgcctgcgtgcaggcctggccgtggttcgctccccgccagcccacgtgccccagaagggccggcctcacctctccccagcccccgctgttcccctgccccggccaacaacgaggagtctgttcctccccgcacctcctctcctccccagccctgtaggcctgaggggagggtcccccacaccacggtgtccacccggccccggcccgtggaactccacttagagcgtttttcacgcgtccttcccccatgtgagaggagcatccccccttttataaagcgaaactatttttatagagaaaaagggtctttcttaacgcacttggcctccagctccctggacggctgccttggcgttttcaacacaaagctcctttattttttgggcgagggtgcgtggggcctgccccttggaagggaagggaaggacggtgtcctgtggagaccagactctgcaagtggggagaccacccccgcaagccagtgacaagggagccctgaagttgtgtccacgaagagggagctgaaacaaattcggggctatgaagtgttttaaaaatccattcttcgcagtgtggccaccacaccgccctgagccctcccacggcccatcgtcccgggtgggccgggatgatgccccagtgcggccggtgctcatctccgcccccgggtccgccccctgacaccgtcttactctacctcagacatgaggaggccctccattcctggtttctgtagcttgcattcttgttgtctctgatgcatgccctgccagttagtactgtattttgcattcattaataaaagacaccggtggaaag

SEQ ID NO: 1357 - DNA, 3280 bp, Homo sapiens
  source 1..3280: mol_type = genomic DNA
agccaagcggcgggctggcggcgggctccgacgtctgcgccaggacctggctggctgagcccggcgcagcagcagcagccagggcagcgcggcccctactccctgtcaggtcgtagaggcgagcagggaccagctggtcgccggcccctcgggcaagatggggaaccgggagatggaggagctgatcccgctggtgaaccgtctgcaggacgcgttttcggcgctgggacagagctgcctgctggagctgccgcagatcgccgtggtgggcggccagagcgccggcaagagctcggtgctcgagaacttcgtgggcagggactttctccctcgagggtcgggcattgtaacaagacgacctcttgtgctgcagcttgttacttctaaagcagaatatgccgagtttctacattgcaaaggaaagaaatttacagattttgatgaagttcgccttgagattgaagcagaaacagatcgcgtgactggaatgaataaaggcatttcctccatacccattaatttacgagtctattccccacacgtgttaaatctaacccttattgatctacctggaataactaaagtgcctgtgggagatcagccaccagatatcgagtatcagatcagagaaatgattatgcagttcatcacgagggagaactgtctgattttagctgttactccagccaacactgatcttgcaaactcagatgcgctgaagctagctaaagaagttgatcctcaaggtctgagaaccattggagttatcaccaaactggaccttatggatgaaggaacggatgccagggatgttctagagaacaaactgttgcctcttcgcaggggttacgtgggggtggtaaacagaagccagaaggacatagatgggaagaaggacataaaggcagccatgctggcagagaggaagtttttcctttcccacccggcttacagacatatcgctgaccgaatgggaaccccacacctgcagaaggtccttaatcagcaacttaccaaccacattcgggataccctaccaaacttcaggaacaaactacagggacagttgctctccatagaacatgaagtagaagcctacaaaaatttcaaaccagaagacccaacaaggaagaccaaagcattgctgcagatggttcagcaatttgctgtggactttgagaagagaattgaagggtcaggggatcaagtagataccctggaactctcaggtggtgctaaaatcaatcgtatttttcatgaacgctttccttttgagatagtaaagatggagttcaatgagaaagaattgcgaagagaaataagctatgcaatcaaaaacatacatggtatcaggacagggttgtttactccagacatggcatttgaagcgatagtcaagaaacagattgtaaagttgaaagggccttccttgaagagtgtggatctggtaatacaagaattaatcaacactgtgaagaagtgtaccaaaaaactggcaaacttccccagactctgcgaggaaacggaaaggattgttgctaaccacattcgtgagcgagaagggaagacaaaggaccaggtattgctattgattgacattcaagtctcttacatcaacaccaaccatgaagacttcattggcttcgcaaatgctcagcagaggagcagtcaggttcacaagaaaaccacagttggaaatcagggaaccaatcttccgccttcaaggcaaattgtgattcgcaaggggtggctcaccatcagcaacattggcatcatgaaaggcggctcgaagggatactggttcgtccttactgcggaaagcttgtcctggtataaagatgatgaggaaaaagaaaagaagtacatgcttcccttggacaacctgaaagttcgggatgtggaaaagagctttatgtctagcaagcacatctttgcactctttaatacagagcaaaggaatgtatacaaagactatcgcttccttgagctggcatgtgattcccaggaggatgtcgacagctggaaggcatctctactaagagctggggtctatcctgacaaatctgtagctgaaaatgatgagaatggacaagcagaaaacttttccatggacccacaattggagaggcaagtggagaccattcgcaacctcgtagactcctacatgtccattatcaacaaatgtatccgagatctaattccaaaaacaataatgcaccttatgatcaataacgttaaagatttcataaattccgagctcctagcacagttgtattcttcagaggaccaaaataccctgatggaggaatctgctgagcaggctcagcgccgggatgagatgcttcgaatgtatcaagcactgaaagaagcccttgggataattggggacatcagcacagccaccgtgtccactccggcaccccctccagtggatgactcctggatacagcactctcgcaggtcacctcctccaagccccacaacccaaaggaggccaacactaagtgctcccctcgcaaggcccacatccggccgaggaccagctcctgccattccctctcctggcccccactctggggctcctccagtcccattccgtccaggcccattacctcctttccccagcagcagtgactccttcggagcccctccacaagttccatctaggcctacgagggccccgcccagtgtcccaagccggagaccacccccatcaccaactcgtcccactataatccgcccactagaatcctccctgttagactaaacgaagtgtctggcatggcaattaatcactaatgaattatgcgaaagcaacatatttgataaccgttgcagtaaatcatgagtagtcgcatgtgtggacatcagtaggcaagtaaccagttttactaatgcattcatcgctcatcttcattgctcatggtatgtcaaacctttggggtttgactcagaaactgctaaccttttagaggctttatatgttgtactgaccaaggtaggtttgtatagcagccctatactttggggatcatttgcctaccatggcatatatttgaaattgctttggacaagttttctaggctatctaccaggtagctcattaaacgtaattcttcagatatgagatagtgggcttagacctaagccatacatatttcttttcccacattctgtttaggatgacagtaattctgttgtctaccattaatgctactacctactccataattgcctatttagctcctcttttcttcctttttatttcataagactgcta

SEQ ID NO: 1358 - DNA, 3941 bp, Homo sapiens
  source 1..3941: mol_type = genomic DNA
attgcgtcccgctctacctctgtggttctttgggagcgacccccgggaagcgtccaaagtggagttcccacacacgctgcgaacccacagccggttttctctgaactcgcgtccctgagtccgggaggtggaggcggagaaaagggtgcggagcgaccccacgcagggccgccccccctcccaccagcgcgtcctgccgcgccggcagccacaggctggcatagcggctgccgacccgccctcgttcctccaccccctgaacgggactgctgggcccgccccgccccgcctgcaggtgaagcggccgcagccgccgagtaggtgcgtggggatgatctcactcgcgcgctccgcgccaggaggaggaggagcgggagcggatccaacttccgggtagtggagccgcaagccaccggcatcttgctttttcttccccctcctcctgtgtgccccgcgccgctccctctttcccttttattcccggccccacccgccaaaatgaacagctcggacgaagagaagcagctgcagctcattaccagtctgaaggagcaagcaataggcgaatatgaagaccttagagcagagaaccagaaaacaaaggagaagtgtgacaaaattaggcaagaacgagatgaagccgttaaaaaactggaagaatttcagaaaatttctcacatggtcatagaggaagttaatttcatgcagaaccatcttgaaatagagaagacttgtcgagaaagtgctgaagctttggcaacaaagctaaataaagaaaataaaacgttgaaaagaatcagcatgttgtacatggccaagctgggaccagatgtaataactgaagagataaacattgatgatgaagattcgactacagacacagacggtgccgccgagacttgtgtctcagtacagtgtcagaagcaaattaaagaacttcgagatcaaattgtatctgttcaggaggaaaagaagattttagccattgagctggaaaatctcaagagcaaactcgtagaagtaattgaagaagtaaataaagttaaacaagaaaagactgttttaaattcagaagttcttgaacagagaaaagtcttagaaaaatgcaatagagtgtccatgttagctgtagaagagtatgaggagatgcaagtaaacctggagctggagaaggaccttcgaaagaaagcagagtcatttgcacaagagatgttcattgagcaaaacaagctaaagagacaaagccaccttctgctgcagagctccatccctgatcagcagcttttgaaagctttagacgaaaatgcaaaactcacccagcaacttgaagaagagagaattcagcatcaacaaaaggtcaaagaattagaagagcaactagaaaatgaaacactccacaaagaaatacacaacctcaaacagcaactggagcttctagaggaagataaaaaggaattggaattgaaatatcagaattctgaagagaaagccagaaatttaaagcactctgttgatgaactccagaaacgagtgaaccagtctgagaattcagtacctccaccacctcctcctccaccaccacttccccctccacctcccaatcctatccgatccctcatgtccatgatccggaaacgatcccaccccagtggcagtggtgctaagaaagaaaaggcaactcaaccagaaacaactgaagaagtcacagatctaaagaggcaagcagttgaagagatgatggatagaattaaaaagggagttcatcttagacccgttaatcagacagccagaccgaagacaaagccagaatcttcgaaaggctgcgaaagtgcagtggatgaactaaaaggaatactggggacacttaacaaatccactagttcaagaagcttaaaatcccttgaccctgaaaacagtgaaactgagttagaaaggattttgcgtcgcagaaaggtgacagcagaagcagatagcagtagtccaactgggatattagccacctcagagtccaaatccatgccagtgttgggttctgtatccagtgtaacaaaaacagccttgaacaagaaaactctggaggcagaattcaacagcccgtcccccccaacacctgagccaggtgaagggccccgtaaattggaaggatgcacaagttccaaggttacgtttcagcctcccagtagcattggatgcaggaaaaaatacattgacggtgaaaaacaagccgaaccagttgtagttttagatcctgtttctacacatgaaccccaaaccaaagaccaggttgctgaaaaagatccaactcaacacaaggaggatgaaggcgaaattcaaccagaaaacaaagaagacagcattgaaaacgtgagagagacagacagctccaactgctgatccataaaccagaagcctgacatgtttggaagtccttttcaataagcacatgattagtgttgttatattggcaagggctgtagacattctgctctggtcactgtattcagaatacaggttcttttctggtgtcacttttgtaagtagcaactataaacataagtaagctgtttagcaaaacacacattcctagtaggttttggttttttgatctttataaagatgaggtttttttcctagttactgtattaagtatgacttcttttagaaggttacaaaaaaattcagatgttgatacctttttaggaaatgtgcataccactcatcaaatggaatgctgaaagtttgaggtgcttgtatataatcggataaacaaaactgatcaacccaatgtgattttaaaagcccccaaagaagcttctgttttgggtctgatcctcttgatggagaaactgcagcagcatggaaattgttgggtactgtggcatacaagttattttctacagtagactgagataaactgaaaactcaggagctggcatcaaactcgtagtcccatagtcagtgttaattacacacattgttaactattggatgaaaaatacatgctattgattgtgtccaaagcctcccgaggacctccgtggggatgctctggtagcctgaatacagaactgaggtgaaagtccaaaccttgaattttacagtagtaagttggtaaaccatgtgctctgtgctatgagttaattatgttttcccaaatactaatgtggcacaagtaccatattttatcagagttcttatgtacagtatggtgaagataagtgacaagcacacatttttcttgcttcactgctgttctatattacacaggtttgttgttgttttttttaaaaaagaaattaagcagtagttagtctctaaaaatacaatgtttcaggctaccacagtgaataaatagaaatgtaatcagggattaaaaaaaaaacttatgcagcttttcaaagttgattgtttcaaaattggtgtttatttaaaataagtggtaatgtacttgaatgcactttttatgacaatgattcagtaatggtaattttactattaaagaaagtgaaaggtttagttttgttagcatggctcagcatgtagctgtcaggtgtttttcacctaagggcaaaagaaaatgatagtaataattgcagtagttgtattgtattgtatttttgcacgtgtggtaagcataggcttgaagaggtgggtaggcaggtacatgtacttcctaaatttggagataattatctttctgtaagttcgttatgcttgactgtttccatgttctcccaataatgattttatagttacttatcactttactcatggagaattaaaacgtaatgtttttcaactgtatctttctttaactggataatactgctatatgatatgcttactacagactgcattaattcacgaaacgaattctgttatgctgtaatttgaactctcctcaccacaacttattaaaaaggcaccaatagtttcccatt

SEQ ID NO: 1359 - DNA, 3099 bp, Homo sapiens
  source 1..3099: mol_type = genomic DNA
tgcgtgcgtgtgtgtgtgcgcgcgtgtgtgtgtctccgagtccctgggagagtggaggctcattcactgattagatccagcgctgagaggcagcactgctccttctctcacgccaactgagtctcttgatctgtacatgcaatcccaggcagctcgcgaacacaaacccggggccagccgcctactgctgctgctgctgctgccgctgccgccgccgccgccgccgctgcctccgccggctctgcgaacccgggacttttcatgcaccacactctccgcctgcttccctccgtgtcctgaaaagtgcgaccgttctcccaaggaatttccacggtcttaggagggaatgattccccagtaatattccctgccctgacccaaagtgctggttggcctccctcccagggaagactgcttcttgcgtaacgccggccacagaaagagactccgatggacttacaccgggcagccttcaagatggagaactcatcctaccttcccaaccctctggcatccccagcactgatggtcctggcatccacggctgaggccagccgtgatgcttccatcccttgtcagcagccacgaccctttggtgtacctgtctcagttgacaaggacgtgcatattcctttcaccaacggttcctatacctttgcctctatgtaccatcggcaaggtggggtgccaggcacttttgccaatcgtgatttccccccttctctactacacctccaccctcaatttgctcccccaaatctagattgcaccccaatcagtatgctgaatcatagtggtgtgggggctttccggccctttgcctccaccgaggaccgggagagctatcagtcagcctttacgccggccaagcgacttaagaactgccatgacacagagtctccccacttgcgcttctcagatgcagatggcaaggaatatgactttgggacacagctgccatctagctcccccggttcactaaaggttgatgacactgggaagaagatttttgctgtctctggcctcatttctgatcgggaagcctcatctagcccagaggatcggaatgacagatgtaagaagaaagcagcggcattgttcgacagccaggccccaatttgccccatctgccaggtcctgctgaggcccagtgagctgcaggagcatatggagcaggaactggagcagctagcccaactgccctcgagcaagaattcccttctgaaggatgccatggctccaggcaccccaaagtccctcctgttgtctgcttccatcaagagggaaggagagtctccaacggcatcaccccactcatctgccaccgatgacctccaccattcagacagataccagacctttctgcgagtacgagccaaccggcagacccgactgaatgctcggattgggaaaatgaaacggaggaagcaagatgaagggcagagggaaggctcctgcatggctgaggatgatgctgtggacatcgagcatgagaacaacaaccgctttgaggagtatgagtggtgtggacagaagcggatacgggccaccactctcctggaaggtggcttccgaggctctggcttcatcatgtgcagcggcaaagagaacccggacagtgatgctgacttggatgtggatggggatgacactctggagtatgggaagccacaatacacagaggctgatgtcatcccctgcacaggcgaggagcctggtgaagccaaggagagagaggcacttcggggcgcagtcctaaatggcggccctcccagcacgcgcatcacacctgagttctctaaatgggccagtgatgagatgccatccaccagcaatggtgaaagcagcaagcaggaggccatgcagaagacctgcaagaacagcgacatcgagaaaatcaccgaagattcagctgtgaccacgtttgaggctctgaaggctcgggtcagagaacttgaacggcagctatctcgtggggaccgttacaaatgcctcatctgcatggactcgtactcgatgcccctaacgtccatccagtgttggcacgtgcactgcgaggagtgctggctgcggaccctgggtgccaagaagctctgccctcagtgcaacacgatcacagcgcccggagacctgcggaggatctacttgtgagctatctgccccaggcaggcctcgcctccagcagccccacctgcccccagcctctgtgacagtgaccgtctccctttgtacatacttgcacacaggttccccatgtacatacatgcacatactcaaacatgcgtacacacacacacatttacacacgcaggactctggagccagagtagaggctgtggcccaggcactacctgctggctcccacctatggtttgggggccatacctgttccagctctgttcccagggtggggcagggaggtgggggttgggggagtagtggggcacggctcctaagatccagcccccatactgacagacggacagacagacatgcaaacaccagactgaagcacatgtaatatagaccgtgtatgtttacaatgttgtgtataaatgggacaactcctcgccctctacctgtcccctccccctttggttgtatgattttcttcttttttaagaacccctggaagcagcgcctccttcagggttggctgggagctcggcccatccacctcttggggtacctgcctctctctctcctgtggtgtcccttccctctcccatgtgctcggtgttcagtggtgtatatttcttctcccagacatggggcacacgccccaagggacatgatcctctccttagtcttagctcatggggctctttataaggagttggggggtagaggcaggaaatgggaaccgagctgaagcagaggctgagttagggggctagaggacagtgctcctggccacccagcctctgctgagaaccattcctgggattagagctgcctttcccagggaaaaagtgtcgtctccccgaccctcccgtgggccctgtggtgtgatgctgtgtctgtatattctatacaaaggtacttgtcctttccctttgtaaactacatttgacatggattaaaccagtataaacagtt

SEQ ID NO: 1360 - DNA, 2561 bp, Homo sapiens
  source 1..2561: mol_type = genomic DNA
tgtctgatgatgctggtgacaccttagccactggagacaaagcagaagttactgaaaacggagtccctgaaagtgagtgaaagcccacccacttccccttcatcagcctctcggggtatgctgtctgccatcaccaatgtggttcaaaacacaggtaaaagtgtcttaactggaggccttgatgcgttggaattcatcggcaagaaaaccatgaatgtccttgcagaaagtgacccgggctttaagcggaccaagacgctcatggagagaactgtttccttgtctcagatgttaagggaagctaaggagaaggagaagcagagactggcacagcagctcacgatggagagaaccgcgcactacgggatgctgtttgatgaatatcaaggcttgtcacacctggaagccctggaaattctgtccaatgaaagcgaaagcaaggttcagtcatttttagcatcacttgatggagagaagctggaactcttaaaaaatgacctaatttccattaaagacatctttgcagccaaagaattagagaatgaagaaaatcaagaagaacaaggcttagaagaaaagggagaagaatttgctcgcatgcttacagagcttctctttgaattacatgtggcggccacacctgacaaactcaataaggccatgaagagggctcatgactgggtggaagaggatcaaaccgtggtgtcagtagatgtggcaaaagtgtccgaagaagaaacaaagaaggaagaaaaggaagagaaatctcaagaccctcaagaagacaaaaaggaggaaaagaaaactaagaccatagaggaagtatacatgtcgtccattgaaagtctggcggaggtaacagcgcgctgtattgagcagcttcataaagtagcagaattaattcttcatggacaagaagaggaaaaaccagctcaggaccaagcaaaagttctaataaaattaactactgcaatgtgcaatgaagtggcctctttatcaaagaagtttacgaattctttaaccactgttgggagcaacaagaaggccgaggtccttaaccccatgatcagtagtgtattgttagagggctgcaacagtacaacgtacatacaggatgccttccagctgctgctgcctgttctgcaggtctcacatatccagaccagttgtttgaaagcacagccgtgacctggccagactccatctagttaaaggagacagctggccgccttgcctcaatatgtaccatttaaggggatgttctctgtgcgcctggccacagacatccatttgaggacactacaagcaattttgcacagacaatattgagaatgcaaatttagagagagttatcatttctctcaatgtgtataattgtttttacaaacaattgtgttttctttatgttaatttaaacttacacagcttatattgaaaatttcctttcatctgaaatttatttacaaatattcgtgttcattttcctggttaagcatgctatatttagaaactcatggggagaccttagacttttgtttaatcctttatgtttcaacctttaaatgttccattcttatagtattactttaaatcaattctaaaactgaactttgttttgttacataaatgtcgcaggcaaaaataacactacttatagattttacctattatggtaaaaaataggaacatattgtcattctttttttttttttttttttgagacagagtctcactctgtcgccaggctggagtgcgttggcacaatctcggctcactgcaacctccgcctcctgggttcaatcgattctcctgcctcagcctcctgagtagctgggactacaggtgtgtgccaccacgcccagccaattttttttgtatttttagtagagacagggtttcaccatgttggccaggatggtctcgatctcctgacctcgtgatctgcccgcctcagcctcccaaagtgctgggattacaggcttgagccaccgcgcccggccggtcattcattcttgcaacaagcatttattgagcacctactgtgtgctcacagtaaagaaacgtgatcttatcccagtagaggtagatattctgaaaaagaataattcttaaactgcttaaaacaggggtccccacccccaggccacagaccagtaccagtccgtggcactggttaggaaccaggccacacagcagggggtgagcggtgggtgagtgagcacagcttcatctgtatttacagctgctccccagagcttgcattactgcctgagctctgcctcccgtcaggtcagcagcagcattagagtctcatgggagtgcgaaccctgttgtgaactgcacatgcgagggatctaggttgtgcactccttatgagaatctaatgcctgatgaatctaatgcctcatgatctgaggttgaatagcttcgtgccgaaaccatcccccacccccatcccgctaccccgagtccgtgaaaaaattgtcttccatgaaaccggtccctggtaccagaaaggttggggaccactggcttaaaataccaataaatttttgaacctt

SEQ ID NO: 1361 - DNA, 745 bp, Homo sapiens
  source 1..745: mol_type = genomic DNA
atctcccatcaacatgtcctacaactgctgctctggaaacttctcctcccgctcctgtggtggctacctgcactacccagcctcctcctgtggcttttcctaccccagcaaccaggtctacagcactgacctctgctctcccagcacgtgccagctgggttcctctctctataggggctgtcagcagacctgctgggagcccaccagctgccagacatcctatgtggagtccagcccctgccagacctcctgctaccgtcccagaacctccttgctctgcagtccctgccagacaacttactctgggtctctaggctttggatccagcagctgccgctccctgggctatggatcgaggagctgctactcagtgggctgtgggtccagtggcttcagatccctgggttatggaggctgtggcttcccttccctgggctatggcgttggattctgccgcccaacctacttggcttctaggagctgccagtcttcttgctacagaccaacttgtggatcaggcttctactattgatcatcttgttaaattgctgattttgttggctaatgccttcaatgcctctactcataacctttattgtcttcatcatgtacagaaagaattagcctcttattctataattatcaagttctcagtttgtctttgtccccaaatactggctggcaggcttcatctgaaaaactgtaattggagaactagctcaaaataaatcttgaaatacacatt

SEQ ID NO: 1362 - DNA, 2663 bp, Homo sapiens
  source 1..2663: mol_type = genomic DNA
ggaggagagaagaggaggtggagaaggcttgggctcgcgccgctgaagtcggcttacccgctggccgcctcctgacaagcgggagggatccgcggtggacccagggaagcggaggagcctggcggccaccccctcttcctcacttccctgtactctcatcgctctcggcctccgacacgaaaaggaagcaaatgagctgatggaagatctgtttgaaactttccaagatgagatgggattctccaacatggaagatgatggcccagaagaggaggagcgtgtggctgagcctcaagctaactttaacacccctcaagctctacggtttgaggaactactggccaacctactaaatgaacaacatcagatagcgaaggaactatttgaacagctgaagatgaagaaaccttcagccaaacagcagaaggaggtagagaaggttaaaccccagtgtaaggaagttcatcagaccctgattctggacccagcacaaaggaagagactccagcagcagatgcagcagcatgttcagctcttgacacaaatccaccttcttgccacctgcaaccccaatctcaatccggaggccagtagcaccaggatatgtcttaaagagctgggaacctttgctcaaagctccatcgcccttcaccatcagtacaaccccaagtttcagaccctgttccaaccctgtaacttgatgggagctatgcagctgattgaagacttcagcacacatgtcagcattgactgcagccctcataaaactgtcaagaagactgccaatgaatttccctgtttgccaaagcaagtggcttggatcctggccacaagcaaggttttcatgtatccagagttacttccagtgtgttccctgaaggcaaagaatccccaggataagatcctcttcaccaaggctgaggacaatttgttagctttaggactgaagcattttgaagggactgagtttcttaaccctctaatcagcaagtaccttctaacctgcaagactgcccgccaactgacagtgagaatcaagaacctcaacatgaacagagctcctgacaacatcattaaattttataagaagaccaaacagctgccagtcctaggaaaatgctgtgaagagatccagccacatcagtggaagccacctatagagagagaagaacaccggctcccattctggttaaaggccagtctgccatccatccaggaagaactgcggcacatggctgatggtgctagagaggtaggaaatatgactggaaccactgagatcaactcagatcaaggcctagaaaaagacaactcagagttggggagtgaaactcggtacccactgctattgcctaagggtgtagtcctgaaactgaagccagttgccgaccgtttccccaagaaggcttggagacagaagcgttcatcagtcctgaaacccctccttatccaacccagcccctctctccagcccagcttcaaccctgggaaaacaccagcccaatcaactcattcagaagcccctccgagcaaaatggtgctccggattcctcacccaatacagccagccactgttttacagacagttccaggtgtccctccactgggggtcagtggaggtgagagttttgagtctcctgcagcactgcctgctatgccccctgaggccaggacaagcttccctctgtctgagtcccagactttgctctcttctgcccctgtgcccaaggtaatgatgccctcccctgcctcttccatgtttcgaaagccatatgtgagacggagaccctcaaaaagaaggggagccagggcctttcgctgtatcaaacctgcccctgttatccaccctgcatctgttatcttcactgttcctgctaccactgtgaagattgtgagccttggcggtggctgtaacatgatccagcctgtcaatgcggctgtggcccagagtccccagactattcccatcgccaccctcttggttaaccctacttccttcccctgtccattgaaccagccccttgtggcctcctctgtctcacccttaattgtttctggcaattctgtgaatcttcctataccatccacccctgaagataaggcccacatgaatgtggacattgcttgtgctgtggctgatggggaaaatgcctttcagggcctagaacccaaattagagccccaggaactatctcctctctctgctactgttttccccaaagtggaacatagcccagggcctccaccagtcgataaacagtgccaagaaggattgtcagagaacagtgcctatcgctggaccgttgtgaaaacagaggagggaaggcaagctctggagccgctccctcagggcatccaggagtctctaaacaactcttcccctggggatttagaggaagttgtcaagatggaacctgaagatgctacagaggaaatcagtggatttctttgagctaggagaataagagtctggagactgggagccttcacttcggcctccgattggtggcgcatagggtgtaaccaataggaaacccctaaagggtacttaaaccccagattttgcaactggggctcttgagcagcttgctttagcctgctcccactctgtggaatatacttttgcttcaataaatctgtgcttttattgcttcattgtttca

SEQ ID NO: 1363 - DNA, 2218 bp, Homo sapiens
  source 1..2218: mol_type = genomic DNA
caggctgggttccagcatagggctcttggtgggcacgctggggtcgggtggaatgcaggagagagaggaggtgggacaggtgggtacctgggctggaggcagggcctgaggtgggcaggtgcagagggctgcacttctcggctgaagccgggaatgaggaccccgctctcgggtgggattggaggggacccgcggctgaggcgctgggctgcgacagggacatcaccgttctcctcctcagggagatggtgctcgtcgtgcacggcttcccgtcctccgtggccgcccttcgggtaaggaaggagaccgggcagcggcggccgggtgagggcttgggttccgcccctcgctccgagccgccctgatgcccctgtacgccgcccgcagtttgagtgggcttggcagcacccgcacgcctcgcgccgcctggcgcacgtggggcctcgcctgcgaggagagacagccttcgctttccacctgcgcgtgctggcgcacatgctgcgcgcaccgccctgggctcgcctcccgctcacgctgcgctgggtgcgcccagacctccgccaggacctctgcctcccgccgccgccgcacgtgcctctggccttcgggcctccaccgccccaggccccggccccaaggcgccgcgcaggtccctttgatgacgcggagcctgagccagaccagggggatccaggggcctgctgctccctgtgcgcccagaccatccaggatgaagaggggcccttgtgttgcccccaccctggctgcctgctaagggcccatgtgatctgcctggcagaggagtttcttcaggaagaaccagggcagcttctgcccctagagggccaatgcccttgctgtgagaagtcactgctttggggagacctgatctggctgtgccagatggacactgagaaagaagtagaagactcagaattagaagaggaacatggagctgatccaggacacctcccgcccgccactggagtacgtgaagggggtcccgctcatcaagtactttgcagaggcactggggcccctgcagagcttccaagcccgacctgatgacctgctcatcaacacctaccccaagtctggcaccacctgggtgagccagatactggacatgatctaccagggcggcgacctagagaagtgtaaccgggctcccatctacgtacgggtgcccttccttgaggtcaatgatccaggggaaccctcagggctggagactctgaaagacacaccgcccccacggctcatcaagtcacacctgcccctggctctgctccctcagactctgttggatcagaaggtcaaggtggtctatgttgcccgaaacccaaaggacgtggcggtctcctactaccatttccaccgtatggaaaaggcgcaccctgagcctgggacctgggacagcttcctggaaaagttcatggctggagaagtgtcctacgggtcctggtaccagcacgtgcaggagtggtgggagctgagccgcacccaccctgttctctacctcttctatgaagacatgaaggagaaccccaaaagggagattcaaaagatcctggagtttgtggggcgctccctgccagaggagaccatggacttcatggttcagcacacgtcgttcaaggagatgaagaagaaccctatgaccaactacaccaccgtcccccaggagctcatggaccacagcatctcccccttcatgaggaaaggcatggctggggactggaagaccaccttcaccgtggcgcagaatgagcgcttcgatgcggactatgcggagaagatggcaggctgcagcctcagcttccgctctgagctgtgagaggggctcctggagtcactgcagagggagtgtgcgaatctaccctgaccaatgggctcaagaataaagtatgatttttgagtcaggcacagtggctcatgtctgcaatcccagcgatttgggaggttgagctggtaggatcacaataggccacgaatttgagaccagcctggtaaaatagtgagacctcatctctacaaagatgtaaaaaaattagccacatgtgctggcacttacctgtagtcccagctacttgggaagcagaggctggaggatcatttcagcccaggaggttgtggatacagtgagttatgacatgcccattcactacagcctggatgacaagcaagaccctccctccaaagaaaataaagctcaatt

SEQ ID NO: 1364 - DNA, 1696 bp, Homo sapiens
  source 1..1696: mol_type = genomic DNA
cacagacctggaacaaactaaagccagacacatactatggacaccaagggctgtacaacaaccaattctccttcaaccccatgtcaaaactgctctaggattacaaatgttagtaccatctcttctaacaacggctgccatcctggtggccttacagtcaacaactgtcaaccagctggccacgttctcagaattccctgggaccagggctgccaacccactcctcgcttttgtcgcaagcccatctacctaatgaacaacttcaatgcccgtttttctctggatgactgcagctggtatggtgaaggcatcaacagtaatgagaaggagaccatgcaaatcttgaacgagcgccttgctaactacctgcaaaaggtgcgaatgctagaacgagagaatgctgaactggaatctaaaatccaggaagaaagtaacaaagagctccctgttctatgtcctgattacctgtcttactacactaccattgaggagctccagcagaagatcttgtgtaccaaggccgagaattccagactggtctcgcaaattgacaacaccaaactgactgcagatgacttgagagccaaatacgaagctgaggtgtctctacgccagctggtagagtcagatgccaatggcctcaagcagatcctgaatgtgctgaccctgggcaaggccgacctagaggcacaagtccagtctctgaaagaggagctcctttgcctcaagaacaaccacaaagaggaaatcaattctttacagtgtcagcttggggagagacttgacattgaagtgactgctgccccttctgctgacctaaaccaggttctacaagaaatgagatgtcaatatgagcccatcatggagacaaaccgcaaagatgtggaacagtggttcaacacgcagatagaggagctgaatcaacaagtggtgaccagctctcaacagcagcaatgctgccaaaaggagatcatagaactgagacgcagtgtgaacactctggaggttgaactgcaggcccagcatcgaatgagagattcccaagagtgcatcctaacggagacagaggctcgctacacggccttgctgacccagatccagagtctgattgataacctggaagctcagctggcagagatccggtgtgccctggaaagacagaaccaagaatacgagatcctgctggacgtcaagtcccggctggaatgtgagattaccacataccgcagccttctggagagctcggatggcaagcgtccctgttacccacgtgccaccaaatgtgagccttccccttggacatcttgtaagtccggagccatagaaagcacggccccagcttgcacatcctcatccccctgcagcttaaaggagcactgcagtgcctgcggacccctgtcccggatactggttaaaatttgcaccatcaccaaggagattaaggatgggaaggtcatttcttcttacgagcatgtgcagccttgtttcatcatcagacctgccaaagtctaacatcccaaggtgatgaaaatgacccacatttatgaaacagaggccaatacatgctcctgccagagaggtttaagaaaactccccagtcccttaaggtacttagtttcttactactacagcgggtccccattgctaggtagaatatcttttattctgctccttccctaactcaccactgctaaca

SEQ ID NO: 1365 - DNA, 3503 bp, Homo sapiens
  source 1..3503: mol_type = genomic DNA
gtttgtggcccaggtgcaggaagcttacgcggtggcagccgctcgctgaggtagtctctcgcggcgccggggatccctgaacacagacagcgcgggactgagaaggaaagcttctttctgggcagccagagccgcaaaggtggagccgcgttggcgccctccgcgggaccagcgcctcggatgcgggcggagcgcggggggccgcggctgcgggagcgcgaagcggggggccaggggcgcctcatgtgagagccgcgggacctgcagccgccgccgtccccggagcacggggtggtgtgtgggggaagccgcccccggcagcaggatgaaacgaggaggaagagatagtgaccgtaattcatcagaagaaggaactgcagagaaatccaagaaactgaggactacaaatgagcattctcagacttgtgattggggtaatctccttcaggacattattctccaagtatttaaatatttgcctcttcttgaccgggctcatgcttcacaagtttgccgcaactggaaccaggtatttcacatgcctgacttgtggagatgttttgaatttgaactgaatcagccagctacatcttatttgaaagctacccatccagagctgatcaaacagattattaaaagacattcaaaccatctacaatatgtcagcttcaaggtggacagcagcaaggaatcagctgaagcagcttgtgatatactatcgcaacttgtgaattgctctttaaaaacacttggacttatttcaactgctcgaccaagctttatggatttaccaaagtctcactttatctctgcactgacagttgtgttcgtaaactccaaatccctgtcttcgcttaagatagatgatactccagtagatgatccatctctcaaagtactagtggccaacaatagtgatacactcaagctgttgaaaatgagcagctgtcctcatgtctctccagcaggtatcctttgtgtggctgatcagtgtcacggcttaagagaactagccctgaactaccacttattgagtgatgagttgttacttgcattgtcttctgaaaaacatgttcgattagaacatttgcgcattgatgtagtcagtgagaatcctggacagacacacttccatactattcagaagagtagctgggatgctttcatcagacattcacccaaagtgaacttagtgatgtatttttttttatatgaagaagaatttgaccccttctttcgctatgaaatacctgccacccatctgtactttgggagatcagtaagcaaagatgtgcttggccgtgtgggaatgacatgccctagactggttgaactagtagtgtgtgcaaatggattacggccacttgatgaagagttaattcgcattgcagaacgttgcaaaaatttgtcagctattggactaggggaatgtgaagtctcatgtagtgcctttgttgagtttgtgaagatgtgtggtggccgcctatctcaattatccattatggaagaagtactaattcctgaccaaaagtatagtttggagcagattcactgggaagtgtccaagcatcttggtagggtgtggtttcccgacatgatgcccacttggtaaaaactgcatgatgaatagcaccttaatttcaagcaaatgtattataattaaagttttatttgctgtagttctgatataattctactattttgtggcacagaaatttgatatcttcagtcagtatatgtaaagattgtttatcggaagacccatgaatgagttttggtcagaaaattccacttgtttccttagtgtaatagcagtcatatctccgaattttttttaatgtggttcggatgtgaaataaccagttatacgtattaaacagtttacagtctaaaggaaacaaaacctatatgttataatatccaagaagtactaataggttttctgaaatgttatattctctatgcatttaaaaaaaaatgtaaacttgacattttagggtcttcagttacacatacacctgttataaggtgtttaatatagctcaggaaagtgagcattttgtgagaaaaatgaatatatcatatctaatggaaaagattggatgaatgttctcaaatgttacaaagctgtttaaagaaaaaggtatatataagtaatcagaacacttagaagactgatagatgtcacacagtggtattatagaaggataatacagagccaagatcaaattaaaagacaataaatggaacagaagggaggcagtgtttagctttgtataaacttttaggtttgctctgtaatctgctaaaccatatacattcttttgtgatatgttattatgtatgtggcacttgaggcactgtatgtaaagtaaggaatgctttactagttctccttggttttatctttgtttaaactagctttaaagtattaaacaataattgaaatgaaaagcttacctattttaaaaagccaaatttaaataaatatagaactttaaaatgtttatcagttgtttccatgaaagaatattagtttccagtaaattttagtgatggctcactcacttttctattttggaattacatagttatgtaagtaaaatttttaaaaatcataaagggagcaccattgtacagtctagcataaacagcaaattttaaagaggacatatttaagttcataatcatatttttcagtaaatattgctcagtgaactggaaaactttaatagaaaaatgtctgcagttttgtgattgttaatttggttaaaccgatattttatattatttaagttaggtaacattttatattactttcatatgaataaaagtaatccatgcattgtagagtctataaaatgttgagttttaaaagatgatataaactttgatgctgggcactagtgctagtagatattactaccctcctgagggaaatcagaaatgatttaaccccggtggaatacattaattcttaaagcggctcttttcagtggtgtgacttttagattgtgtctcagtggttgaggaagctaacagtcttagatctacttttaaaacggatggccttcttaagaataaagcaaaaggtgattttctacataatttttgctttccaaaagtgatgatatgctctcctacagcaacatatgagaagaaaaaaggcttatctagattcgaaaattaacagcaattatagtaatatatcccctccttctaaatagtaaaaagctctgattgtacaagaattacctgtgctagtcaagttgttgtttttccttgaacaactttggaaaaatggatttgacagtacataatcagttctactaaccaaagcttgtatttggaaatttactttttgtacaaattgaattatataatgcttaaaatactttgtcactttataagcaaaatgcatagtacttaatttgtttatactgtaaagtatatgttaaatgcttttatcactttgagaataaaaagttactaatgctgttgta

SEQ ID NO: 1366 - DNA, 4622 bp, Homo sapiens
  source 1..4622: mol_type = genomic DNA
ttttattacgtctctccttgtggattacgtagaactttggaaaattaaacattagacatcttcatagaaaatcatgtcactgatttttaaagccagctcaatttaacctgccactgattccctaaccagctcttctctgactgtatcccgagggaaaatgtattgaacgcagcagaaggttaaggcagaggagttcggctagaccgggtagcagccaatcagatggggagggtccaaggatctgatgcctccaggcgagcagcgccaagctgagctggttagtctccttttattgtggatgaacaccacgtacatgccgtaaatgctccctaggctggctgcggctacaaggcagacccgggagctgagaatagaggaatacctgcccaagcaactcattctgcacagcagccgacaagacagcgattttcctgtgctggaatgtgcccatccaaagccaaccaatttgttggaaaatcagtcaaaatctaattttgatgttctgcaagttccctgggggccatgaagcacctgacacttggattggacttaatcttaaacctctggagttcaagaccttttaaaaagggctaaataaacaatctctacatgtaaaaggccactgactcctacttcctctgtatagagcaactgttgaactcagctgcctgtaggaaaactgaagactttaataacaaactctccaaggtgaaaatgaacacagatagcggtgggtgtgctcgcaaacgtgccgccatgtctgttacgctaacatctgtgaagagagtgcaaagttctccaaacctattggctgcagggcgtgattctcagtcaccagactcagcttggagatcttacaatgatggcaatcaggagacactgaacggagatgctacatattcctctcttgcagcaaaaggttttagaagcgttcgaccaaacctacaagataaaagatcaccaactcagagccagataacagtgaatggaaactcaggaggtgccgtgagtcccatgagttactatcagaggccgttttccccctcggcatattctctcccagcctcactcaactccagcattgtcatgcagcacggcacatccctcgattccacagacacatatccccagcatgcgcagtctctggatggcaccaccagcagctctatccccctgtaccgatcctcagaggaagagaagagagtgacagtcatcaaagccccgcattacccagggatcgggcccgtggatgaatccggaatccccacagcaattagaacgacagtcgaccggcccaaggactggtacaagacgatgtttaagcaaattcacatggtgcacaagccggatgatgacacagacatgtataatactccttatacatacaatgcaggtctgtacaacccaccctacagtgctcagtcacaccctgctgcaaagacccaaacctacagacctctttccaaaagccactccgacaacagccccaatgcctttaaggatgcgtcctccccagtgcctcccccacatgttccacctccagtcccgccgcttcgaccaagagatcggtcttcaacagaaaagcatgactgggatcctccagacagaaaagtggacacaagaaaatttcggtctgagccaaggagtatttttgaatatgaacctggcaagtcatcaattcttcagcatgaaagaccagcctccttgtatcagtcctctatagacagaagcctggaaagacccatgagttctgcaagcatggccagtgacttcaggaagcggaggaagagcgagcctgcagtgggtccaccacggggcttgggagatcaaagtgcgagcaggactagcccaggccgagtggacctcccaggatcaagcaccactcttacaaagtctttcactagctcttctccttcttccccatcaagagcaaaaggtggggatgatagcaaaatatgtccatccctttgcagttactcagggctcaacggcaacccctccagtgagttagattactgtagcacttacagacagcacttggatgtccctcgggactcaccaagagccattagtttcaagaacggctggcaaatggcccggcaaaacgcagaaatctggagcagcacggaagaaaccgtctctcccaaaatcaaatcccggagctgtgacgatctcctaaacgacgactgcgatagcttcccggacccgaaagtcaagtcggaaagcatgggctccctgttatgtgaggaggactccaaggagagctgccccatggcgtgggggtccccctacgtcccggaggttcgcagtaacggcagatcaaggatcagacacaggtcagcccgcaacgccccggggttcctgaagatgtacaagaaaatgcaccgcatcaaccgcaaggacctgatgaactccgaggtgatctgctccgtgaagtccaggattctgcagtacgagagcgagcagcagcacaaggacctgctgcgcgcctggagccagtgctccacggaggaggtgccccgggacatggtgcccacacgcatctccgaattcgaaaagctgatccagaagtccaaatccatgccaaatttaggggatgacatgctgtctcccgtaaccctagaaccaccgcaaaatggcctatgtcccaagaggcggttttccattgagtatttgctggaggaagaaaatcaaagcggcccccccgctcggggccggcgaggctgccagtctaacgccctggtgcccattcacattgaagtcaccagcgatgagcagccccgagcacacgtggagttttccgacagcgaccaggacggggttgtgtccgaccacagtgactacattcacctagaggggtcatccttctgcagtgaaagtgactttgatcacttttccttcacatcctccgaaagcttttacggatccagccaccaccaccaccatcaccaccaccaccaccaccgccacctcatcagctcctgcaaaggcaggtgcccggcctcctacactcgatttaccacaatgttaaaacacgaaagagccagacacgaaaacaccgaggagcccagaaggcaagaaatggaccctggcctttctaaacttgcttttctagtcagtcctgtgcctttccggaggaaaaaaaattcggctcctaagaaacagactgaaaaggcaaaatgtaaagcatctgtgtttgaggctctggactctgcccttaaagacatctgtgaccaaattaaagctgaaaagaaaagggggagcttgccggacaacagcatcctgcaccgcctcatcagtgagctgctgccagatgttcccgagaggaactcatccctgagagcgctgaggaggagccccctgcaccagcctctccacccactgcctcccgatggtgctattcattgtccaccctaccagaatgactgcgggagaatgccccgcagtgcctctttccaagacgtggacacagccaacagcagctgccaccaccaagaccgtggcggtgcactccaagaccgtgagtcccctagaagttactcatccactttgactgacatggggagaagtgcaccaagggaaagaagaggaactccagaaaaagagaaattgcctgcaaaagctgtttatgattttaaggctcagacatctaaggagttgtcatttaagaaaggagatactgtctacatcctcaggaaaattgatcaaaattggtatgagggagaacaccacgggagagtgggcatcttcccgatctcatacgtagagaaactcacacctcctgagaaagcacagcctgcaagaccacctccgccagcccagcccggagaaatcggagaagctatagccaaatacaacttcaacgcagacacaaatgtggagctgtcactgagaaagggagatagagttattcttcttaaaagagttgatcaaaactggtatgaaggtaaaatcccaggaaccaacagacaaggcatcttccctgtttcctatgtggaggtcgtcaagaagaacacaaaaggtgctgaggactaccctgaccctccaataccccacagctattctagtgataggattcacagcttgagctcaaataagccacagcgtcctgtgtttactcatgaaaatattcaaggtgggggggaaccgtttcaggctctgtataactatactcccaggaatgaagatgagctggagctcagagaaagtgatgtcattgatgtcatggaaaagtgtgatgacggctggtttgtggggacctcaagaagaaccaaattctttggtactttccccggaaactacgtcaagaggctgtgaattgcgctccctccttctgtagaggccgcctgccagccatgcacctgcgtcaacgcgcctgaaacaccccgcgggcctcccgttgtcatgccttacggtttccaatgcgccgtcaccatctccacctgccaccaaaccaccagcagagtagccgccgctgctgtgagcctggggacgacatggcaggctggtccccctccgtgaaagtgtggattcctacttcctgctctaagctttgacacgtcaaaatgtgggatcagaaagaaaaaaatcatgatatttaaaaatggtcaaatatttgaggc

SEQ ID NO: 1367 - DNA, 1950 bp, Homo sapiens
  source 1..1950: mol_type = genomic DNA
gcacacgcgcctcttcacgaggtggaaacaagatggaggattcggcctcggcctcgctgtcttctgcagccgctactggaacctccacctcgactccagcggccccgacagcacggaagcagctggataaagaacaggttagaaaggcagtggacgctctcttgacgcattgcaagtccaggaaaaacaattatgggttgcttttgaatgagaatgaaagtttatttttaatggtggtattatggaaaattccaagtaaagaactgagggtcagattgaccttgcctcatagtattcgatcagattcagaagatatctgtttatttacgaaggatgaacccaattcaactcctgaaaagacagaacagttttatagaaagcttttaaacaagcatggaattaaaaccgtttctcagattatctccctccaaactctaaagaaggaatataaatcctatgaagccaagctccgccttctgagcagttttgatttcttccttactgatgccagaattaggcggctcttaccctcactcattgggagacatttctatcaaagaaagaaagttccagtatctgtaaaccttctgtccaagaatttatcaagagagatcaatgactgtataggtggaacagtcttaaacatttctaaaagtggttcttgcagtgctatacgtattggtcacgttggaatgcaaattgagcacatcattgaaaacattgttgctgtcaccaaaggactttcagaaaaattgccagagtgggagagcgtgaaactcctgtttgtgaaaactgagaaatcggctgcacttcccatcttttcctcgtttgtcagcaattgggatgaagccaccaaaagatctttgcttaataagaagaaaaaagaggcaaggagaaaacgaagagaaagaaattttgaaaaacaaaaggagaggaagaagaagaggcagcaggctaggaagactgcatcagttcttagtaaagatgatgtggcacctgaaagtggtgatactacagtgaagaaacctgaatcaaagaaggaacagaccccagagcatgggaagaaaaaacgtggcagaggaaaagcccaagttaaagcaacaaatgaatccgaagacgaaatcccacagctggtaccaataggaaagaagactccagctaatgaaaaagtagagattcaaaaacatgccacaggaaagaagtctccagcaaagagtcctaatcccagcacacctcgtgggaagaaaagaaaggctttgccagcatctgagaccccaaaagctgcagagtctgagaccccagggaaaagcccagagaagaagccaaaaatcaaagaagaggcagtgaaggaaaaaagtccttcgctggggaaaaaagatgcgagacagactccaaaaaagccagaggccaagtttttcaccactcctagtaaatctgtgagaaaagcttcccacacccccaaaaaatggcccaaaaaacccaaagtaccccagtcgacctaaagtcagtgattcaactggaaggaaacctcaatgctgcctccagagctttttggaaatactcagatcctggccgcctttgtaaccttctctaaacgtcaggcctggacttaaaagattttttaaaacctccataagtagtccaggggcggtggctcacgcctgtaatcccagcactttgggaggccgaggcaggcggatcacaaggtcaacgagatcgagaccatcctggccaacatggtgaaaccctgtctgtaccaaaaatacaaaaattaattgggcatggtggtggacacctgtaatcccagctactagggaggctgaggcaggagaattgcttgaacctgggaggcggaggttgcagtgagccactgcactccagcctgatgacagagcaagactcagtctcaaaaataaataaaaataataaaacctccataagtaatcctga

SEQ ID NO: 1368 - DNA, 3290 bp, Homo sapiens
  source 1..3290: mol_type = genomic DNA
ggtgcttgccctgcccatccccgtggcgggggcgtggccatggcgggggcgctccggcgggggcgggccctgggctcccgcccttcgggtcccacagtttccagccgccgctctcctcagtgcccggtggcccaggagggcctgggagcccgaagccgtccccgagtcgctcctaggtcactggcgcgatgcgggccgtcctctcggctgatgggttggaagcccagcgaggctagaggccagtcccaaagtttccaggcatcagggctgcagcccaggagcctcaaggcggcccggcgggcgactggacggccggacaggtcccgagcagccccgcccaacatggacccagacccccaggcgggcgtgcaggtgggcatgcgggtggtgcgcggcgtggactggaagtggggccagcaggacggcggcgagggcggcgtgggcacggtggtggagcttggccgccacggcagcccctcgacacccgaccgcacagtggtcgtgcagtgggaccagggcacgcgcaccaactaccgcgccggctaccagggcgcgcacgacctgctgctgtacgacaacgcccagatcggcgtccggcaccccaacatcatctgtgactgctgcaagaagcacgggctgcgggggatgcgctggaagtgccgtgtgtgcctggactacgacctctgcacgcagtgctacatgcacaacaagcatgagctcgcccacgccttcgaccgctacgagaccgctcactcgcgccctgtcacactgagtccccgccagggcctcccgaggatcccactaaggggcatcttccagggagcgaaggtggtgcgaggccccgactgggagtggggctcacaggatggaggggaagggaaaccgggccgtgtggtggacatccgtggctgggatgtggagacaggccggagtgtggccagcgtgacgtgggctgatggtaccaccaatgtgtaccgtgtgggccacaagggcaaggtggacctcaagtgtgtgggcgaggcagcgggcggcttctactacaaggaccacctcccaaggctcggcaagccggcggagctgcagcgcagggtgagtgctgacagccagcccttccagcacggggacaaggtcaagtgtctgctggacactgatgtcctgcgggagatgcaggaaggccacggcggctggaaccccaggatggcggagtttatcggacagacgggcaccgtgcatcgtatcacggaccgcggggacgtgcgcgtgcagttcaaccacgagacgcgctggaccttccaccccggggcgctcaccaagcaccactccttctgggtgggcgacgtggtccgggtcatcggcgaccttgacacagtgaagcggctgcaggctgggcatggcgagtggacggacgacatggcccctgccctgggccgcgtcgggaaggtggtgaaagtgtttggagacgggaacctgcgtgtagcagtcgctggtcagcggtggaccttcagcccctcctgcctggtggcctaccggcccgaggaggatgccaacctggacgtggccgagcgcgcccgggagaacaaaagctcactgagcgtggccctggacaagcttcgggcccagaagagtgacccagagcacccgggaaggctggtggtggaggtggcgctgggtaacgcagcccgggctctggacctgctgcggaggcgcccagagcaggtggacaccaagaaccaaggcaggaccgctctgcaagtggctgcctacctgggccaggtggagttgatacggctgctgctacaagccagggcgggcgtggacctgccggacgacgagggcaacacggcactgcactacgcggccctggggaaccagcccgaggccaccagggtgctcctgagtgctgggtgccgggcggacgccatcaacagcacccagagcacagcactgcacgtggccgtgcagaggggcttcctggaggtggtgcgggccctgtgtgagcgcggctgtgacgtcaacctgcccgacgcccactcggacacgcccctgcactccgccatctcggcgggcactggagccagcggcattgtcgaggtcctcacggaggtgccaaacatcgatgttaccgccaccaacagccagggtttcaccctgctgcaccatgcctccctcaagggtcacgcgctagctgtgagaaagattctggctcgggcgcggcagctggtggacgccaagaaggaggacggcttcacggcgctgcatctggctgccctcaacaaccaccgcgaggtggcccagatcctcatccgggagggccgctgtgacgtgaacgtgcgcaaccggaagctgcagtccccgctgcatctcgccgtgcaacaggcccacgtggggctggtgccgctactggtggacgctgggtgcagtgtcaacgccgaggacgaggagggggacacagccctgcacgtggcgctgcagcgtcatcagctgctgcccctggtggctgatggggccgggggggacccagggcccttgcagctgctgtccaggctacaggcctcgggcctccccggcagcgcggagctgacggtgggcgcggcggtcgcctgcttcctggcgctggagggcgccgacgtgagctacaccaaccaccgcggtcggagcccgctggacctggccgccgagggtcgcgtgctcaaggcccttcagggctgcgcccagcgcttccgggagcggcaggcgggcgggggcgcggccccgggccccaggcaaacgctcgggacccccaacaccgtgacgaacctgcacgtgggcgccgcgccggggcccgaggccgctgagtgcctggtgtgctccgagctggcgctgctggtgctgttctcgccgtgccagcaccgcaccgtgtgtgaggagtgcgcgcgcaggatgaagaagtgcatcaggtgccaggtggtcgtcagcaagaaactgcgcccagacggctctgaggtggcgagcgccgcccccgcccccggcccgccgcgccagctggtggaggagctgcagagccgctaccggcagatggaggaacgcatcacctgccccatctgcatcgacagccacatccgcctcgtgttccagtgcggccacggcgcatgcgccccctgcggctccgcgctcagcgcctgccccatctgccgccagcccatccgcgaccgcatccagatcttcgtgtgagccgcgccgtccgccgcgcccgagctgccttcgcgtgcccccgccctgtgttttataaaaagaaagattctcggacgttg

SEQ ID NO: 1369 - DNA, 1602 bp, Homo sapiens
  source 1..1602: mol_type = genomic DNA
cggcaccgcgcgggacggagcttggctgttggtcggtgggttcccgtgcggcggcggccaaggaggaggagacacagttggagcagctccgtgggctgactggggcgaggcctcagcagcgcgagcttgagtgcggccgagcctgcggcgccttcccctgcgggtggggacgagcgggccccgcggcgtcatcggcggcgaggagccgccgcgcctcggcctagcatgtcggaagcgggcgaggagcagcccatggagacgacgggcgccaccgagaacggacatgaggccgtccccgaaggcgagtcgccggccggggctggcacgggcgccgcggcgggggctggaggcgcgaccgcggcgcccccgagcgggaatcagaacggcgccgagggcgaccagatcaacgccagcaagaacgaggaggacgcgggaaaaatgttcgttggtggcctgagctgggatactagcaaaaaagatttaaaagactattttactaaatttggagaggtcgttgactgtacaataaaaatggatcccaacactggacggtcaagagggtttgggtttatcctgttcaaagatgcagccagtgtggagaaggtcctagaccagaaggagcacaggctggatggccgtgtcattgaccctaaaaaggccatggctatgaagaaggacccggtgaagaaaatcttcgttgggggtctgaatcctgaagccactgaggaaaagatcagggagtactttggcgagtttggggagattgaggccattgaattgccaatggatccaaagttgaacaaaagacgaggttttgtgtttatcacctttaaagaagaagaacccgtgaagaaggttctggagaaaaagttccatactgtcagtggaagcaagtgtgagatcaaggtggcccagcccaaagaagtctatcagcagcagcagtatggctctgggggccgtggaaaccgcaaccgagggaaccgaggcagcggaggtggtggtggaggtggaggtcagggtagtacaaactacggcaagagccagcgacgtggtggccatcagaataactacaagccatactgaggcggcagcaggagcgaccaactgatcgcacacatgctttgtttggatatggagtgaacacaattatgtaccaaatttaacttggcaaactttctattgcctgtcccatgtgcatcttatttaaaatttcccccatggaaatcactctcctgttgactatttccagagctctaggtgtttaggcagcgtgtggtgtctgagaggccatagcgccatcatgggctgatttttattaccaggtcccccagaagcaggtgggaggctctgcttcctgctgccgctctgcagcctggacctgtggaccctggttgtaaagagtaaattgtatcttaggaaaccagtgtcacctttttttcaccttttaattttatattatttgcgtcatacatttcctgtaacggaagtgttaattttactgtactttttggtaccttttgggaatctaatgtattgtaaggtattttacacgtgtcctgattttgccacaacctggatattgaagctatccaagcttttgaa

SEQ ID NO: 1370 - DNA, 2015 bp, Homo sapiens
  source 1..2015: mol_type = genomic DNA
gtcaaacccctcattgttcgcagctgatgtcactcgcagttgtgagcggccgcctctcccggggacaatgtgggactgagcggcccagccgccgtgccgccgccgccgccgccgcaggacagccccagcgagagccggccaggttgcagcgcggacacactcgcaggtcgctgtggccccagcctcgcctgacagaatgagcggctcggacgggggactggaggaggagccagagctcagcatcaccctcacgctgcggatgctgatgcacgggaaggaagtgggcagcatcatcgggaagaagggcgagactgtaaagcgaatccgggagcagagcagtgcccggatcaccatctccgagggctcctgccctgaacgcatcaccaccatcaccgggtctacagcagctgtcttccatgcagtctccatgattgctttcaaactggatgaggacctttgtgctgctcctgcaaatggtggaaatgtctccaggcctccagtgaccctgcgccttgtcatccctgccagtcagtgtggctcactgattgggaaggctggcaccaagatcaaggagatccgagagactacgggtgcccaggtacaggtggcaggggacctgctccccaactccacagagcgagctgttacggtatctggggtgcctgatgccatcatcctgtgtgtgcgccagatctgcgctgttatcctggagtccccacccaaaggagccactatcccctaccatccgagcctctccctaggtactgttcttctctctgccaaccagggcttctctgtccagggtcagtatggggctgtgaccccagctgaggtcaccaagctccagcagctctcaagccatgcggtcccctttgccacacccagcgtggtgccaggactggatcccggcacacagaccagctcacaggagttcttggttcccaacgatttgattggctgtgtgatcgggcgccagggcagcaagatcagcgagatccggcagatgtcaggggcacatatcaagatcgggaaccaagcagagggcgctggggagcggcatgtcaccatcactggctctccggtctccatcgccctggcccagtacctcatcactgcctgtctagagacggccaagtctacctctggggggacgcccagctcggcccccgcagacctgcctgcccccttctcgccacccctgacggccctgcccacagctccccctggcctgctgggcacaccctatgccatctccctctccaacttcatcggcctcaagcccatgcccttcttggctttaccacctgcttccccagggccgccgccgggcttggcggcctacactgccaagatggcagcagctaatgggagcaagaaggctgagcggcagaaattctccccctactgaggccagctgaggtacaggcaggggcaggcaggaccaccagcagggggctgcctctgcaccctacccgcccaaggagactccaccctggggtcccaaacgccgctaacgcccagacgcatggatgcaccccctaccctgcctccatctatgggagttctttctctcagagtgggggcagtttctggcccaggggtctgagctgcggcagccccagggcagggggccctacctcctcagctctgtgcttggatacagggagcagccaggagactccctagtgcccccaccatggcgggtgtcactcacgcactccccatcccttagggcttcctggcctactgcatccttgtgggagtcagggaggagggcccgttgggtagctggggccaggcttctctccccaccacctgcagatttcttgctgcttccactgatacccttttgactggaatgaactggctgggcttgtcagggggcaccccaaagagggggcactgccaggtagctgggggagtggcatggggcaggggcccagttctcagcagcagacactctgtacagttttttcaatccctgtttttgaataaatattctcagcgaccaggaa

SEQ ID NO: 1371 - DNA, 1720 bp, Homo sapiens
  source 1..1720: mol_type = genomic DNA
cgcgccgcttccggtctgcagccttgtagtggggctggagcagagcctgccgcgaacccccggagcccacgatccctcgtgccatccctcgaatccaccagcacgagcgtcccacccgcgcctgggaccatggccactgactcatgggccctggcggtggacgagcaggaagctgcggctgagtcgttgagcaacttgcatcttaaggaagagaaaatcaaaccagataccaatggtgctgttgtcaagaccaatgccaatgcagagaagacagatgaagaagagaaagaggacagagctgcccagtccttactcaacaagctgatcagaagcaaccttgttgataacacaaaccaagtggaagtcctgcagcgggatccaaactcccctctgtactcggtgaagtcttttgaagagcttcggctcccacagaacttaattgcccaatctcagtctggtactggtaaaacagctgccttcgtgctggccatgcttagccaagtagaacctgcaaacaaatacccccagtgtctatgtctctccccaacgtatgagctcgccctccaaacaggaaaagtgattgaacaaatgggcaaattttaccctgaactgaagctagcttatgctgttcgaggcaataaattggaaagaggccagaagatcagtgagcagattgtcattggcacccctgggactgtgctggactggtgctccaagctcaagttcattgatcccaagaaaatcaaggtgtttgttctggatgaggctgatgtcatgatagccactcagggccaccaagatcagagcatccgcatccagaggatgctgcccaggaactgccagatgctgcttttctccgccacctttgaagactctgtgtggaagtttgcccagaaagtggtcccagacccaaacgttatcaaactgaagcgtgaggaagagaccctggacaccatcaagcagtactatgtcctgtgcagcagcagagacgagaagttccaggccttgtgtaacctctacggggccatcaccattgctcaagccatgatcttctgccatactcgcaaaacagctagttggctggcagcagagctctcaaaagaaggccaccaggtggctctgctgagtggggagatgatggtggaacagagggctgcagtgattgagcgcttccgagagggcaaagagaaggttttggtgaccaccaacgtgtgtgcccgcggcattgatgttgaacaagtgtctgtcgtcatcaactttgatcttcccgtggacaaggacgggaatcctgacaatgagacctacctgcaccggatcgggcgcacgggccgctttggcaagaggggcctggcagtgaacatggtggacagcaagcacagcatgaacatcctgaacagaatccaggagcattttaataagaagatagaaagattggacacagatgatttggacgagattgagaaaatagccaactgagaagctccaccagccactgatgccagccctggcactgcccctgcacaggagacaagtgcgttcagggcacaggccccgacatcaccccaaggacaacggcacaagtagagagaaactacctacctcacttcaaattatgtttggacttgacaaaaatgtatgcaaatgatgggggatggtagaaaaaaattatttacacaaccttggaagattaggcatgaatacacagagatttaccttttgg

SEQ ID NO: 1372 - DNA, 2670 bp, Homo sapiens
  source 1..2670: mol_type = genomic DNA
gctcgcaggcgggggtttccatggtgatggtcaacaagcctcaactgcctctgctacaactgccaagttccccgcgtcccaccctcctctaggtgctccaagggaccaccggggtgcctgatatgagagcgggagtgtagagactcggaggccgaggttgagaacaaaaacatgcacctggagtttccccggagccctctgcgtggttgagcttcggtggaatttcggggctcttggctgccagccgcgcttgcctggtagcaacagaaaccagtcctgctcgcctccgtggacatttcattaccatccagaagtgtctcccactgaaggcatccgtggttgtttttaagccacaaaaaagccacacccaagatcacctgacacccaccctgacaagtgtccatgatgctgggccctgagggaggtgaaggctttgtggtcaagctccgtggcctgccctggtcctgctctgttgaggacgtgcagaacttcctctctgactgcacgattcatgatggggccgcaggtgtccatttcatctacactagagagggcaggcagagtggtgaggcttttgttgaacttggatcagaagatgatgtaaaaatggccctgaaaaaagacagggaaagcatgggacaccggtacattgaggtgttcaagtcccacagaaccgagatggattgggtgttgaagcacagtggtcccaacagtgccgacagcgccaacgatggcttcgtgcggcttcgaggactcccatttggatgcacaaaggaagaaattgttcagttcttctcagggttggaaattgtgccaaacgggatcacattgcctgtggaccccgaaggcaagattacaggggaagcgttcgtgcagtttgcctcgcaggagttagctgagaaggctctagggaaacacaaggagaggatagggcacaggtacattgaggtgtttaagagcagccaggaggaagttaggtcatactcagatccccctctgaagttcatgtccgtgcagcggccagggccctatgaccggcccgggactgccaggaggtacattggcatcgtgaagcaggcaggcctggaaaggatgaggcctggtgcctacagcacaggctacgggggctacgaggagtacagtggcctcagtgatggctacggcttcaccaccgacctgttcgggagagacctcagctactgtctctccggaatgtatgaccacagatacggcgacagtgagttcacagtgcagagcaccacaggccactgtgtccacatgaggggcctgccgtacaaagcgaccgagaacgacatttacaacttcttctctcctctcaaccctgtgagagtccatattgagattggcccagatggaagagtgacgggtgaagcagatgttgagtttgctactcatgaagaagctgtggcagctatgtccaaagacagggccaatatgcagcacagatatatagaactcttcttgaattcaacaacaggggccagcaatggggcgtatagcagccaggtgatgcaaggcatgggggtgtctgctgcccaggccacttacagtggcctggagagccagtcagtgagtggctgttacggggccggctacagtgggcagaacagcatgggtggctatgactagttttgttaggaacatttgagttacttcaatcattttcacaggcagccaacaagcaattaagagcagttataatagaggaagctgggggacccattttgcaccatgagtttgtgaaaaatctggattaaaaaattacctcttcagtgttttctcatgcaaaattttcttctagcatgtgataatgagtaaactaaaactattttcagcttttctcaattaacattttggtagtatacttcagagtgatgttatctaagtttaagtagtttaagtatgttaaatgtggatcttttacaccacatcacagtgaacacactggggagacgtgcttttttggaaaactcaaaggtgctagctccctgattcaaagaaatatttctcatgtttgttcattctagtttatattttcatttaaaatcctttaggttaagtttaagctttttaaaagttagttttgagaattgagacacaatactaatactgtaggaattggtgaggccttgacttaaaactttctttgtactgtgatttccttttgggtgtattttgctaagtgaaacttgttaaattttttgttaactaaatttttttcttaaaataaagactttttcacaatgactggcacagattactcagcaaaagatagcaaaacgggtggttgaagataattcattttaatcgtaatgtattttagtgtgaatttaaaaatttcatacatcaaatctatgatctcccttatattcttatgatgaggctaaataaaagtctaataaaaatgttaaatatgtgaatggtggaaatggtgactagcagcacacattctgggaagcatcaaatagacacacggccccagccacctgcaacttatgtgcactgttgtaaaccattcagaattttcctgctaggcccttgatgctggagtcacatctgttgatagctggagaactttagtttcaagtactacattgtgaaagcaattattttgtttctagtttttataaaatgctgatttaaactttt

SEQ ID NO: 1373 - DNA, 1302 bp, Homo sapiens
  source 1..1302: mol_type = genomic DNA
ctggttctggaggctgggttgagaggtcgccggtccgactgtcctcggcggttggtcagtgtgaatttgtgacagctgcagttgctccccgcccccgagcagccgaggtgcgtgggggaaggggaagaaggaaaaggtccgggtcgcgtttccgctcagtttttgccagggttgaggcgattccagagagcggcggaaaggataagcctcgacttagaagctaccgagttaccctaagaaaggagtctaccatggctcaagaatctcccaaaaattcagcagcagaaattccagtgactagtaatggagaagttgatgactctcgtgaacatagctttaatagggatttgaagcattcattaccatctggacttggtctctcagaaacccaaattacatctcatggctttgacaataccaaagagggtgttattgaagcaggagcatttcaaggtggccagagaacacagacaaaaagtggaccagttattctagcagatgaaattaaaaatcctgcaatggaaaagttagaacttgttagaaaatggagtctaaacacctataagtgtactcgacagattatctctgagaagctaggccgtggctcaagaactgtggaccttgaacttgaagctcagattgatatattaagggataacaagaaaaaatatgaaaatattttaaaactggctcaaacattgtcgacccagcttttccagatggtacatacccaaaggcaacttggagatgcatttgctgacctgagtttgaagtcactagaacttcatgaagaatttggctataatgccgatacccagaaactgctggctaaaaatggagagactcttcttggggccattaattttttcattgctagtgtgaacactttggtgaataaaaccattgaagatacattaatgactgtgaaacagtatgaaagtgccaggattgaatatgatgcatatcgcactgatttggaagaactgaatcttggaccacgtgacgcaaacactctgccaaagattgagcagtcacagcatctcttccaagcacataaggaaaaatatgataaaatgcgcaatgatgtttctgtcaaattgaaatttctagaagaaaataaggttaaagtattgcacaatcagctggtccttttccacaatgccattgccgcttactttgctgggaatcagaagcagcttgaacagacacttaaacagttccatatcaaattgaaaacccctggagtggatgccccatcttggcttgaagaacagtaaaatcacagcggaaaataaaaagaaa

SEQ ID NO: 1374 - DNA, 2378 bp, Homo sapiens
  source 1..2378: mol_type = genomic DNA
tggaggccgggcgcgcgggccctactcggcagggcctgctcggggccggcttcgggcctgcccggccgggcctgcccgcacccttccgcccggcctggccggcgccccctcgcgccccgggcgggccctgcacgtctcgcgagcagcccggagcggcgggggaggcggggcccgcgggctgccgggcagggccggggcggtgccgaggccgggccggagcggggcgaagggggccgagcggcgggccgggccgggccgggcagggccggggcgtgggccggcaggaagatggcgaacgtggggctgcagttccaggcgagcgcgggggactcggacccacagagccggcccctgctgctgctcgggcagctgcaccacctgcaccgcgtgccctggagccacgtccgcgggaagctgcagccccgggtcaccgaggagctctggcaggctgccctgagcacgctcaaccccaaccccacggacagctgtcccctctacctgaactacgccaccgtggctgccctgccctgcagggtgagccggcacaacagcccctcggccgcccacttcatcacgcggctggtgcggacctgcctgccgcccggagcgcatcgctgcattgtgatggtctgcgagcagccggaggtctttgcttccgcctgtgccctggcccgggccttcccgctgttcacccaccgctcaggtgcctctcggcgcttggagaagaagacggtcaccgtggagtttttcctggtgggacaagacaacgggccggtggaggtgtccacattgcagtgcttagcgaatgccacagacggcgtgcggctagcagcccgcatcgtggacacaccctgcaatgagatgaacaccgacaccttcctcgaggagattaacaaagttggaaaggagctggggatcatcccaaccatcatccgggatgaggaactgaagacgagaggatttggaggaatctatggggttggcaaagccgccctgcatcccccagccctggccgtcctcagccacaccccagatggagccacgcagaccatcgcctgggtgggcaaaggcatcgtctatgacactggaggcctcagcatcaaagggaagactaccatgccggggatgaagcgagactgcgggggtgctgcggccgtcctgggggccttcagagccgcaatcaagcagggtttcaaagacaacctccacgctgtgttctgcttggctgagaactcggtggggcccaatgcgacaaggccagatgacatccacctgctgtactcagggaagacggtggaaatcaacaacacggatgccgagggcaggctggtgctggcagatggcgtgtcctatgcttgcaaggacctgggggccgacatcatcctggacatggccaccctgaccggggctcagggcattgccacagggaagtaccacgccgcggtgctcaccaacagcgctgagtgggaggccgcctgtgtgaaggcgggcaggaagtgtggggacctggtgcacccgctggtctactgccccgagctgcacttcagcgagttcacctcagctgtggcggacatgaagaactcagtggcggaccgagacaacagccccagctcctgtgctggcctcttcatcgcctcacacatcggcttcgactggcccggagtctgggtccacctggacattgctgcaccggtgcatgctggtgagcgagccacaggcttcggtgtggccctcctgctggcgctcttcggccgtgcctctgaggaccctctgctgaacctggtgtccccactgggctgtgaggtggatgtcgaggagggggacctggggagggactccaagagacgcaggcttgtgtgagcctcctgcctcggccctgacaaacggggatcttttacctcactttgcactgattaattttaagcaattgaaagattgcccttcatatgggttttggtttgtctttctggtcgtcagcgtggtggtggaaacagctgaagttttaggagacagcttagggtttggtgcgggccacggggaggggaccgggaagcgctggggcttgtttctgtttgttacttacaggactgagacatcttctgtaaactgctacccctggggccttctgcaccccggggtgaggcctcctgcctgcctggtgccctgtcccagccccaggtcctgtgcagggcacctgcgtggctgacagccaggctcttactccagccggggctgccagcgcatccagccagcccagccctgtgaaagatggagctgacttgctgcaggggacctgatttatagggcaagagaagtcacactccggcctctcagaattcacttgaggttcaattaaatacagtcacaccgccccctca

SEQ ID NO: 1375 - DNA, 4406 bp, Homo sapiens
  source 1..4406: mol_type = genomic DNA
gcgtgggctcccgatgggctgcctgagcgggtgcgcgggcaacttccggtgtgggtgacgagtggtggccgaagcagggggacagcaagggacgctcaggcggggaccatggcggacggcggctcggagcgggctgacgggcgcatcgtcaagatggaggtggactacagcgccacggtggatcagcgcctacccgagtgtgcgaagctagccaaggaaggaagacttcaagaagtcattgaaacccttctctctctggaaaagcagactcgtactgcttccgatatggtatcgacatcccgtatcttagttgcagtagtgaagatgtgctatgaggctaaagaatgggatttacttaatgaaaatattatgcttttgtccaaaaggcggagtcagttaaaacaagctgttgccaaaatggttcaacagtgctgtacttatgttgaggaaatcacagaccttcctatcaaacttcgattaattgatactctacgaatggttaccgaaggcaagatttatgttgaaattgagcgtgcgcgactgactaaaacattagcaactataaaagaacaaaatggtgatgtgaaagaggcagcctccattttacaggagttacaggtggaaacctacgggtcaatggaaaagaaagagcgagtggaatttattttggagcaaatgaggctctgcctagctgtgaaggattacattcgaacacaaatcatcagcaagaaaattaacaccaaatttttccaggaagaaaatacagagaaattaaagttgaagtactataatttaatgattcagctggatcaacatgagggatcctatttgtctatttgtaagcactacagagcaatatatgatactccctgtatacaggcagaaagtgaaaaatggcagcaggctctgaagagtgttgtactctatgttatcctggctccttttgacaatgaacagtcagatttggttcaccgaataagtggtgacaagaagttagaagaaattcccaaatacaaggatcttttaaagctttttaccacaatggagttgatgcgttggtccacacttgttgaggactatggaatggaattaagaaaaggttcccttgagagtcctgcaacggatgtttttggttctacagaggaaggtgaaaaaaggtggaaagacttgaagaacagagttgttgaacataatattagaataatggccaagtattatactcggataacaatgaaaaggatggcacagcttctggatctatctgttgatgagtccgaagcctttctctcaaatctagtagttaacaagaccatctttgctaaagtagacagattagcaggaattatcaacttccagagacccaaggatccaaataatttattaaatgactggtctcagaaactgaactcattaatgtctctggttaacaaaactacgcatctcatagccaaagaggagatgatacataatctacaataagggtcttagtgctttagaaaaaagttaaaattggaagtcattaaaaaaagactgttataatggtgtatatgttggggttttttttctaagcttctttgtcttaaattttaaaatagtgaatatgtttgagactccctttgacctttcagttccccaagttcattgttaactttgcatttgcaattggtgcaaaaatacagatttctgtcgtctgaatacacaaaaagttgtgtcataacttacccagatatgtttttctatcatttgaaacctttttagctactgtttgttttcattcaactaacaaacatattccaataataaaagcagtatatacatatttcctttctacagttacctctgattctcaacattttgtggggtagtgatttggcaagtgttttttaaataaaacaaatctcattgtaaagctatcagtcatttagtagaatagaaaagcaacatagagcatacaagaacatttgggatagagttgtgatttgtgaagaatttgtactttgatattgtggcggaaagtctagactgagtgtgtatgctggtaaactgtagacttttttttttttttttttgagtccggctggttccaatcacagtagcttgattgctttcagccctcatcctctcacttgatcagttgttcaacagaatcagctgacataattgacacagtttattgggtgttaagtccgctctatagggatagtgactactttttttttttttttttttttgctcttcttcctctcccctttctttatatgggtttaaatttaacataaagttgtttttataaggcttatttgtggctttaacttgtaagtctgattacatcattattgttccaaattcattatctctgtaggaacttttagttccattatatgaacactggataacctaattttttttaatgctttaaaaaaatggcaaaaagacgtcaggccaccctcatagtaagtggtgtagtattaaaatattttcacggaattaaaagtagcttgctgtcaaagaaacacctgagatgaattggtgtgaacgaattttgcaagtttaatttgatttatttcagagaaaatagaaaaaacaatgttagaaggttatttaaaatgatacttaaataaagaaagtgtgaggtctactttaaaaaaattcaaatgaagagaaaaagaaaaacagcattctagaaatggcatttctcctaattaattttccacttaatggaagattatcaattgtcctattttatgatcccaggactgaagacagttgtgggatatctgtcatatttatcctgtgagtcattgtgaataatgacatacagtactgaagtaatctgattttattctttggaaattcaatgcattggtcacactaataacatcaacatctgctatcacttatctttttaaaactaaccaaaaaaggccgggtgcagtggatcccagcactttgggaggccaaggcgggtggatcatctaaggtcaggatttcgagactagcctggccaacatggcaaaaccctgtctctactaaaaaaaatacaaaaatttgccgggcgtggtggcgtgtgcctgtagtcccagttacttgggaggctgaggtgggagaattccttgaagccaggaggcggaggttgcagtgagccaagatcacaccattgcactccagcctgggtgacagagtgagactccgtctcaaaaaaaaaaaaacaaaactggaaagttcagaaacagaagttcacactaacagagtatggttttaattttcctttgaatgaaaaggatagaagataaaattgtgtattgttaacatgtaaataaaattggagctaatttgaaactagcttctcaataacttcatctttctagagactcattacctgtgggcttgtcaaacctggactatttggccaaataggttgctatagagattgcaagtgttcctcctctttatttttttcatattttttgagacggagtttcactcttgttgcccaggctggattgcagtgtcacgatctcggctcactgcaacctttgcctcccatattcaagcagttctcctgcctcaacctcccaagtagctgggattataggcgcctgccaccacacctagctaatttttgtgtttttagtagagatggtttcatcatgttggccgggctggtctcaaactcctgacctcaggtgatccacccgccttggctgcccaaagtgctgggattacaggcatgagccactgcacccaactcctctttcgtctttctttaacacacactaggctctttgtgtattatgattcagtgctatttgtaactgtgtcccagtgaccaaattgcactcgactcgatcagctgttcatccatttcgtgttttttcctgtcaaacattaatccagcaaatatatgaggtatttaccaatttattttcttagtattacaaaataattcattagcataaagtacaatagtgaaatatttgagttgttcggaacctcaattaatcctgttttacatttcagacctaaagctggcaatcaggagaagaagcactttgttttaaatgtggagaagataacacttgattccatttcattgtcattagtgtattaaccagcaggagaggtgatgagccatttttcaaatgaaataccttttatttccatataatttttttattttagagttcaatagctgtttctatgattatcctcaatttccatatgttactgaatctgaaaaacatctttaaaattcaaacagttccattttctctcttgtaagtgttaaatgtgataaaagtacatattttaaattgttttcagctcttggatatagcagcaataaaaacactaatttgtgggtatttaagaaaacctggagaataaactcatactttaaaagatca

SEQ ID NO: 1376 - DNA, 1321 bp, Homo sapiens
  source 1..1321: mol_type = genomic DNA
gggttgggcaggcctactgactgctgcctgaaggttgctgtaaagggactaagtaaatcaattaactccacagttttcacaaaggtctcttgatatcaaaacttctttccttgcatgcttctctgatcctgtggagatgaaaattgacatccatagtcatattctaccaaaagaatggccagatctaaaaaagaggtttggctacggaggctgggtgcagctccaacaccacagcaagggagaagcaaagttgttgaaagatgggaaagtcttcagagtggtgcgagagaattgctgggatccagaagttcgtattagagaaatggaccaaaaaggagtaacagtgcaagccctttccacagttcctgtcatgtttagctactgggccaaacctgaggacactttaaacctgtgccagcttttaaacaacgaccttgccagcaccgttgtgagctaccccaggaggttcgtgggtctggggacgttgcccatgcaggcccctgagctggcggtcaaggagatggagcgctgtgtgaaagagctgggctttcccggggtccaaattggcacccacgtcaacgagtgggacctgaacgcgcaggagctctttcctgtctatgcggcagccgaaaggctgaagtgttccctgttcgtgcatccctgggacatgcagatggatggacgaatggccaaatactggctcccttggcttgtaggaatgccagcagagaccaccatagccatttgctccatgatcatgggtggagtatttgagaagtttcccaaactgaaagtgtgtttcgcacatggtggtggtgccttccccttcacagtgggaagaatctcccatggattcagcatgcgcccagatctgtgtgcccaggacaaccccatgaacccgaagaaataccttggttccttttacacagatgctttggttcatgatcctctgtccctcaagctgttaacagatgtcataggaaaggataaagtcattttgggaaccgattacccctttccactaggtgagctggaacctgggaaactaatagagtccatggaagaatttgatgaagaaacaaagaataaactcaaagccggcaatgccctggcatttttgggtcttgagagaaaacaatttgaatgactgaatttactacaaaggcaaactttcaaaaggatatctcatttttgtttctaaatatgtatcaacaggtatcaacaaaatcctattttgaactattttactcagaaatgaatgtcccaaatatcctaaattattcataataaaaatgatttgtaagtgttttcattctgaaaa

SEQ ID NO: 1377 - DNA, 2903 bp, Homo sapiens
  source 1..2903: mol_type = genomic DNA
agtaactgactacttttctcccttctctagggtcctagcacagtgtctgatggagctttcctaccagaccctgaaattcacgcatcaggcgcgggaagcgtgcgagatgaggacagaagcacgacgaaaaaatcttctcattttgatttcgcattatttaacacaagaagggtatatcgatacagcaaatgctttggagcaagaaactaaactggggttacgacggtttgaagtttgtgacaacattgatcttgaaactattttgatggaatatgagagttattattttgtaaaatttcagaaataccccaaaattgtcaaaaagtcatcagacacagcagaaaataatttaccgcaaagaagtagagggaagaccagaaggatgatgaacgacagttgtcaaaatcttcccaagatcaatcagcagaggccccggtccaaaaccacagcggggaagacaggggacaccaaatcgctcaataaggagcatcctaatcaggaggtagttgataacactcgcctggaaagtgccaacttcggcctacatatatcaagaatccgtaaagacagtggagaggaaaatgcccacccacgaagaggccaaatcattgacttccaagggctgctcacagatgccatcaagggagcaaccagtgaacttgccttgaacaccttcgaccataatccagacccctcagaacgactgctgaaacctctgagtgcatttattggcatgaacagtgagatgcgagaattggcagccgtggtgagccgggacatttatctccataatccaaacataaagtggaatgacattattggacttgatgcagccaagcagttagtcaaagaagctgttgtgtatcctataaggtatccacagctatttacaggaattctttctccctggaaaggactactgctgtacggccctccaggtacaggaaagactttactggccaaagctgtggccactgaatgtaaaacaaccttctttaacatttctgcatccaccattgtcagcaaatggagaggggattcagaaaaactcgttcgggtgttatttgagcttgcccgctaccacgccccatccacgatcttcctggacgagctggagtcggtgatgagtcagagaggcacagcttctgggggagaacatgaaggaagcctgcggatgaagacagagttactggtgcagatggatgggctggcacgctcagaagatctcgtatttgtcttagcagcttctaacctgccgtgggagctggactgtgccatgttacgccgcctggagaagaggattctggtcgatctccccagccgggaggccaggcaggccatgatctaccactggctgcctcctgtgagcaagagcagggccttggagctgcacacagagctggagtacagtgtgctgagccaggagactgagggctactcaggctcagatattaagctcgtctgcagggaagcagccatgcggcccgtgaggaagatctttgatgcacttgaaaatcaccagtcagaaagcagcgacttacccaggatccagttggatatagtaaccactgccgactttctggatgtgctaactcacaccaagccctccgcaaagaatctggctcagagatactcagactggcaaagagagttcgagtctgtctgaaaccacatttaccctgacctggccacaaaggcaaccacaaagacctcctagtttattaatgtccgtgggagaacaaaatgattggaatggaaaagagaaaattatttttgaagactggattaacttgagccactgtattgttttggatagctgagatatatttattaacttaccattatcgatgtcagcaaaatattgagagtttcagttacatacatatatgtgctattgggtcatacaatggagatttttctgacaattagactccataaaattttaatgaacaattttctgtaatgttactcatttgtaaactttttaagaaaaagatgtacttagaaaagttgtgttggccacacacaggatgaccctgagttggggcagccaagtagaagctaagcttgacaggcactgcccagctgacagtcccagggtgaaggaggacggaagcagggaaggcaatgcagtctgtttctcattccggacaatattctgaatctcatcagctccccctaattctgactccatccagctttgtcagcagcaaacccctcccaaactaagccccactcagaaatgtcactgagcattctgatgctagagctaatagccagggtgactagcacaccatcaccatcagctgccagtctgattgttttgggttctggcccccaataacatcttttcactcttcacacctcacatccggtgtgctctgcccttctctttccattgccgcagcttctcatcagatccaaagcttaggatggggcacctaagcttcgagaacattcatcccaagtcttccctgctcttaggctcttccccctctccttaaggggttataaacaactagacgcatctctctcagaaacccacaatccgaggcatctactttcaacccttgataaattttgaaggcttctactaagtaatgccacttcttttcccccactagaacttacctatgggaaatcaccttcttttctcttccttgccttgtcttcatcatccctgcagacagactcttcaagaggaaaaacctccagaaagagacactttggatagctaagtatcccaaaggattttacccttttaaacaaaaccaaagcatttttttcggtatcgattattttgagattattctcaaatgcctctttaaacatcatttcatggaaaatgtcaaattgaaaatataccttatttaacaaattgaaaataaaaaagatttcatctc

SEQ ID NO: 1378 - DNA, 1400 bp, Homo sapiens
  source 1..1400: mol_type = genomic DNA
gtaactgtccggccgcggcgctggcttaagccatggctgagggtagccggattcctcaggcccgggcgctcctacagcagtgcctgcacgcccggctgcaaattcgcccagccgatggggacgtcgcggcccagtgggtggaggtccaaagaggactggtgatctacgtgtgctttttcaagggagctgataaagaacttcttcccaaaatggttaatacactgttaaatgtgaaattaagtgagacagaaaatggcaagcatgtctctatattggatctacctggcaacattcttattatccctcaagctacccttggaggaagactaaaaggaagaaacatgcaatatcactctaactctggaaaagaagaagggtttgaactttactctcaatttgtgactctatgtgaaaaagaagtagctgctaatagcaagtgtgctgaagctagggttgtagtggaacatggcacttatgggaacaggcaggtgttaaagctggacaccaacggaccattcacacacttaattgagttttgaaaatgaaaaactagtttctatagctgttttctggtatgaaatgatctaaagtataattagattttcttccccttaatcttgaatatactaatcttcagcatttttagacaggaaaatcttgggtttcatatataactctgcacctgctaattggatgactttgccaagtcacctaaactctggatctcagtcaccttttgtcctacattcctctacccttctacttgaaaatttgaaatatgctgtctattcacttcatagtcattaaggaaatgttcttaattgtttttttgtttttgttttttttttgagatggagtcttgctctgtcgccagactggagtgcagtggcgcaatctcggctcactgcaacctccacctcctggattcaagcgattctcctgcctcagcctcccaagtagctgggactacaggcatgagccaccgtgcccggcctcttagttgttttttaaaaattatgtacattttaagtattttgcaatgaagaaattcatgcaaacaagaaaaacacatttcttataccatcaaatttgtgtagcatgtaataaaaataactatttgtattaaaattaggtaaacttcagcactttgggaggccgaggtgggaggatcacttgagcccaggagtttgcgaccagcctgggcagaatagcaagacccagtctctaacatatacatatacatatagatatatatgtaatatagaagggttattgtgtgttatattactttccagggacattcaaatgttttacattactttaagaatctttacttgatataagaacaaagtataagggtttaaaagttgtttttattaaacatactatataaatgggtt

SEQ ID NO: 1379 - DNA, 3060 bp, Homo sapiens
  source 1..3060: mol_type = genomic DNA
gaacaaatcaaatcgaagcaaagaaactgccggctttcaaaatcctcctcctccgccatcatccgccgcggtgcggagagcaggtggtgctggaagcgcgtgaggccgggagctcgagagagctaacagactagccggctggacatctggaccgctggatccggaggtggcgaccccggcctgacccggaccctaaatccgtccccgccccagagggcggaggcgcgcgctcgattccccccacgcggcggcgccgcctgtttacgtctgcagatctccaggggagcccaccagcctagtcaacatggcctcggaagacattgccaagctggcagagacacttgccaagactcaggtggccgggggacagctgagtttcaaaggcaagagcctcaaactcaacactgcagaagatgctaaagatgtgattaaagagattgaagactttgacagcttggaggctctgcgtctggaaggcaacacagtgggcgtggaagcagccagggtcatcgccaaggccttagagaagaagtcggagttgaagcgctgccactggagtgacatgttcacgggaaggctgcggaccgagatcccaccagccctgatctcactaggggaaggactcatcacagctggggctcagctggtggagctggacttaagcgacaacgcattcgggcccgacggtgtgcaaggcttcgaggccctgctcaagagctcagcctgcttcaccctgcaggaactcaagctcaacaactgtggcatgggcattggcggcggcaagatcctggctgcagctctgaccgaatgtcaccggaaatccagtgcccaaggcaagcctctggccctgaaggtctttgtggctggcagaaaccgtctggagaatgatggcgccactgccttggcagaagcttttagggtcatcgggaccctggaggaggtccacatgccacagaatgggatcaaccaccctggcatcactgccctggcccaggctttcgctgtcaaccccctgctgcgggtcatcaacctgaatgacaacaccttcactgagaagggcgccgtggccatggccgagaccttgaagaccttgcggcaggtggaggtgattaattttggggactgcctggtgcgctccaagggtgcagttgccattgcagatgccatccgcggcggcctgcccaagctaaaggagctgaacttgtcattctgtgaaatcaagagggatgctgccctggctgttgctgaggccatggcagacaaagctgagctggagaagctggacctgaatggcaacaccctgggagaagaaggctgtgaacagcttcaggaggtgctggagggcttcaacatggccaaggtgctggcgtccctcagtgatgacgaggacgaggaggaggaggaggaaggagaagaggaagaagaggaagcagaagaagaggaggaggaagatgaggaagaggaggaagaagaggaggaggaggaggaagaagagcctcagcagcgagggcagggagagaagtcagccacgccctcacggaagattctggaccctaacactggggagccagctcccgtgctgtcctccccacctcctgcagacgtctccaccttcctggcttttccctctccagagaagctgctgcgcctagggcccaagagctccgtgctgatagcccagcagactgacacgtctgaccccgagaaggtggtctctgccttcctaaaggtgtcatctgtgttcaaggacgaagctactgtgaggatggcagtgcaggatgcagtagatgccctgatgcagaaggctttcaactcctcgtccttcaactccaacaccttcctcaccaggctgctcgtgcacatgggtctgctcaagagtgaagacaaggtcaaggccattgccaacctgtacggccccctgatggcgctgaaccacatggtgcagcaggactatttccccaaggcccttgcacccctgctgctggcgttcgtgaccaagcccaacagcgccctggaatcctgctccttcgcccgccacagtctgctgcagacgctgtacaaggtctagactcaaagcctctcccatcccttggcctggaccagtgagctggggagggactcggatgaactgaggcgcagcctacgccattgccttggacaggactctggccacaggcagggcgggtctgtgtcccatgtgtcctgtcagtcccctgagtatgtgtgtgggtgtggcgcatgtgcaggtctgtgcctcctgtcgggatttgggttttaacgtcttctgctggcccagccctgctctgttgtggggagttggcccccaggggaaagggctgtgagctgctccgccattaaactcacctccacctgagggcgctctgctgatctccgcctgggccctgatggccgtccccacccacctgccttccggcccggctccctggcggagccagaacccagggagttgcccgcgtgctgtccttcccctctgtgttgtgattgggttgtttcctgccctgcctggggctgcttctcgtcaccaagccctggtcctgcggcagctgtcacccctaccatccataccactgtgctgaccgctcagcctgaagagcagagaatgccatgggtgggactgtgggggtcggatcgtggggttgttggcagagggcaaccctgggccccacaccgtgtggacaggcagacaccagattgtccaggagcaggagctgctgggactgcgctggccccggacctagtgggccttctcctggctgctgagatgtcgtctgtgactggcctggctggagggggagtgttgacaacccaaagctgttctccagtctggggagggagaggcagggtccccaatgtccgagctgcatctggacgctgctcttaaaggacctcctggggcaggggagcggtagggtctggactgggcagatgctgtatgacctccctgagcacccgtgactgccccatgctttcccctttgtgctctgtgtgtgtctgggctgtgcccgggggcttcacaaataaagtcgtgtggcagcttca

SEQ ID NO: 1380 - DNA, 2745 bp, Homo sapiens
  source 1..2745: mol_type = genomic DNA
ttgtacaggtagccaggtgtcggtctccagcctgagaactctggctgttgttccttgtgtcgtcccatattcctgcctggcctgcgatggacatcagcaagggcctcccaggcatgcagggaggcctccacatatggatctctgagaaccggaagatggtgccggtacccgagggggcttacgggaacttttttgaggaacactgctatgtcatcctccacgtcccccagagcccgaaggccacgcagggggcgtccagcgacctgcactactgggtcgggaagcaggcgggtgcggaagcgcagggcgctgcggaggccttccagcagcgcctacaggacgagctggggggccagaccgtgctgcaccgcgaggcgcagggccacgagtccgactgcttctgcagctacttccgcccgggaatcatctacaggaagggaggcctagcatctgacctcaagcatgtggagaccaacttgttcaacatccagcgactgctgcacatcaaagggaggaagcacgtgtctgccactgaggtggagctctcctggaacagctttaataagggtgacatcttcctgctggacctaggcaagatgatgattcagtggaatgggcccaagaccagcatttctgagaaggctcgggggctggctttgacctacagcctccgggacagggaacgtggtggtggtcgtgcacagattggtgtggtggatgatgaggccaaagccccggacctcatgcagatcatggaggctgtgctgggccgcagggtgggcagcctgcgtgccgccacgcccagcaaggatatcaaccagctgcagaaggccaatgttcgcctgtaccatgtctatgagaagggcaaagacctgctgcaggaggaggacttctacatcctggaccagggtggcttcaagatctatgtgtggcagggacgcatgtctagcctccaggagagaaaggctgccttcagccgggctgtgggcttcatccaggccaagggctacccgacctacaccaacgtggaggtggtgaacgacggcgccgagtcggccgcgttcaagcagctcttccggacttggtctgagaagcggcgcaggaaccagaagctcggcgggagggataaatcgattcatgtaaagctggacgtgggcaagctgcacacccagcctaagttagcggcccagctcaggatggtggacgacggctctgggaaggtggaggtgtggtgcatccaggacttacacaggcagcccgtggaccccaagcgtcatggacagctgtgtgcaggcaactgctaccttgtgctctacacataccagaggctgggccgtgtccagtacatcctgtacctatggcagggccaccaggccactgcggatgagattgaggccctgaacagcaacgctgaggaactagatgtcatgtatggtggcgtcctagtacaggagcatgtgaccatgggcagcgagcccccccacttcctcgccatcttccagggccagctggtgatcttccaggagagagctgggcaccatggaaaggggcagtcagcatccaccacaaggcttttccaagtgcaaggcactgacagccacaacaccaggaccatggaggtgccagcccgtgcctcatccctcaactccagtgacatcttcttgctggtcacagccagcgtctgctacctctggtttgggaagggctgtaatggtgatcagcgtgagatggcacgggtggtggtcactgtcatttccaggaagaatgaggaaacggtgctggagggtcaggagcctccccacttctgggaggccctgggaggccgggccccctaccccagcaacaagaggctccctgaggaggtccccagcttccagccacgactgtttgagtgctccagccacatgggctgcctggtcctcgcagaagtggggttcttcagccaggaggacctggacaagtatgacatcatgttactggacacctggcaggagatcttcctgtggcttggggaagctgcaagtgagtggaaggaggcggtggcctggggccaggagtacctgaagactcacccagcagggaggagcccggccacacccatcgtgctggtcaagcagggccatgagcctcccaccttcattggatggttcttcacttgggacccctacaagtggactagccacccgtcccacaaggaagtggtggatggcagcccggcagcagcatcaaccatctctgagataacagcagaagtcaacaacttgcggctatccagatggccgggcaatggcagggcaggtgccgtggccctgcaggccctcaagggctcccaggacagctcagagaatgatctggtgcgaagccccaagtcggctggcagcagaaccagcagctccgtcagcagcaccagcgccacgatcaacgggggcctgcgccgggaacaactgatgcaccaggctgttgaggacctgccagagggcgtggaccctgcccgcagggagttctatctctcagactctgacttccaagatatctttgggaaatccaaggaggaattctacagcatggccacgtggaggcagcggcaggagaaaaagcagctgggcttcttctgaacccaagccctctcgactgcccctatcccctggaccccaacatacctacaatgctggggaggccctgcttccactcccctcagaggcttttggtcatcctctgcgtgtcagtaaaagcaggcagcccata

SEQ ID NO: 1381 - DNA, 2157 bp, Homo sapiens
  source 1..2157: mol_type = genomic DNA
ggccgccatcttggattgcgaactgggtcgctacgcttcacgccaggggcggagtggcggcccttctgttacccgccacacacgtcgccgctggggactgggaaatcagggcatcggagagtgccacattaatggatgccatggctagtccagggaaagataactatagaatgaaaagttataagaataaagccctaaatcctcaagagatgcgtagacgaagagaagaagaaggaatacagcttagaaaacaaaaaagagaagaacagttgttcaaacgcagaaatgtctatttgcccagaaatgatgaatctatgcttgaaagtcctatacaggatccagatattagttccactgtacccattccagaggaagaagttgttactacagatatggttcagatgattttttctaataatgctgatcaacagctaacagcaacacagaaatttagaaagctgctttctaaagaacctaatccaccaatagatcaagttatacagaaaccaggagttgtacagagatttgtgaaatttcttgaaagaaatgaaaattgcactttacaatttgaagctgcatgggcattaacaaatatagcatctggaacttttctgcataccaaggtagtgattgaaactggggctgttccgatttttatcaaacttcttaattctgaacatgaagatgttcaggaacaggctgtttgggcacttggtaatattgctggtgacaatgcagaatgcagagattttgttttgaattgtgaaatacttccacctcttttagagttattaacaaattcaaacagactcacaacaacaagaaatgccgtgtgggccctctcaaatttatgtagaggcaaaaaccctcctccaaactttagtaaggtttcaccttgcttaaatgtcctgtcacgactgttgtttagcagtgacccagatgtgttagcagacgtgtgttgggccctttcttatctctccgatggacccaatgataaaattcaagcagtcattgattctggagtctgtcgaagattggtggaacttttgatgcacaatgattataaagttgtatcacctgcattaagggcagttggtaatattgtgactggtgatgatattcaaacacaggtaattttgaattgttctgcattaccctgtctcttacatttattgagtagcccaaaggagtcaattagaaaagaagcctgctggactgtttctaacatcactgctggaaatagagctcagattcaggctgttatagatgcaaatatttttcctgttttgattgagattcttcagaaagcagagtttcgtaccagaaaagaagcagcttgggctataactaatgcaacatcaggaggtactccagagcaaataaggtatttggtagctttaggctgcattaaaccactttgtgatcttttgactgttatggactccaaaatagtccaagtggctttaaatggacttgaaaatattttacgtcttggagaacaagaatctaagcagaatggaataggcattaatccatactgtgctctcattgaagaagcatatggtctggataaaattgagtttttgcaaagccatgaaaatcaggaaatttaccagaaggcatttgatctgattgaacattactttggtgtagaagaagatgaccccagcattgtacctcaggtggatgaaaaccaacaacagtttatatttcagcagcaggaagcaccaatggatggatttcaactttaacttactggaggaaaaaaaatttatggctaaaaagggtagcttcagaaatgacagactttttcattgaatgatgaggacacagcagccatattatgccaagaggaaaaatatcatgatcatattgaaagatcaagcatgagcttccatggtgaagtcttctgtaccaatgcaccagagaatgcctaccatccaaaaaagcagtcagctgatggaaaagaagattattaaacctttgttctgggatttactgttaaaaaacaaacaaaaaacaacaaaaaagcggtgacaggaaacagttaaggaaatgatttaactgaagggaagcaagatttttttaaagcattgttcttaatccccatgactgtccttcagtcacaattccagaataaaagaatctactttgtgt

SEQ ID NO: 1382 - DNA, 4225 bp, Homo sapiens
  source 1..4225: mol_type = genomic DNA
agggactgcaggggcgccggcgggcggatcgagaggaaggtcggggccatgggccggcactgcgcctcgggagggtccggccaccgctggaacccgaggccggggctgggggcgctccgggctccgacccacgggccggccggccctgcccgggctgggtgaggggcgcccgcctcaagctagaggaggagcggaggccgcgcgcggcccgccgagcgccttcaggatgctcatcaaggaataccacattctgctgcccatgagcctggacgagtaccaggtggcccagctctacatgatccagaaaaagagccgggaggagtctagtggtgagggcagcggcgtggagatcctggccaaccggccctacacggatgggcccgggggcagcgggcaatacacacacaaggtgtaccacgtgggctcccacatcccaggctggttccgggcactgctgcccaaggctgccctgcaggtagaagaggaatcctggaatgcctacccctacacccgaacccggtacacctgccctttcgtggagaaattctccattgaaattgagacctattacctgcctgatggggggcagcagccaaacgtcttcaacctgagcggggccgagaggagacagcgcatcctggacaccatcgacatcgtgcgggatgcagtggccccaggcgagtacaaagcagaagaggacccccggctttatcactcggtcaagacgggccgagggccactgtctgatgactgggcacggacggcggcacagacggggccccttatgtgtgcctataagctgtgcaaggttgagttccgctactggggcatgcaagccaagatcgagcagttcatccatgatgtaggtctgcgtcgggtgatgctgcgggcccaccgccaggcctggtgctggcaggatgagtggacagagctgagcatggctgacatccgggcactggaagaggagactgctcgcatgctggcccagcgcatggccaagtgcaacacaggcagtgaggggtccgaggcccagccccccgggaaaccgagcaccgaggcccggtctgcggccagcaacactggcacccccgatgggcctgaggcccccccaggcccagatgcctcccccgatgccagctttgggaagcagtggtcctcatcctcccgttcctcctactcatcccaacatggaggggctgtgtctccccagagcttgtctgagtggcgcatgcagaacattgcccgagactctgagaacagctccgaggaagagttctttgatgcccacgaaggcttctcggacagtgaggaggtcttccccaaggagatgaccaagtggaactccaatgacttcattgatgcctttgcctccccagtggaggcagagggaacgccagagcctggagccgaggcagctaaaggcattgaggatggggcccaagcacccagggactcagagggcctggatggagccggggagctgggggctgaggcatgcgcagtccacgccctcttccttatcctgcacagcggcaacatcctggactcaggccctggagacgccaactccaagcaggcggatgtgcagacgctgagctccgccttcgaggccgtcacccgcatccacttccctgaggccttgggccacgtggcgctgcgactggtgccctgtccacccatctgcgccgccgcctatgcccttgtctccaacctgagcccttacagccacgatggggacagcctgtctcgctcccaagaccacattccactggctgccctgccactgctggccacctcatcctcccgctaccagggcgccgtggccaccgtcattgcccgcaccaaccaggcctactcagccttcctgcgctcacctgagggtgccggcttctgtgggcaggtcgcactgattggagatggtgttggtggcatcctgggctttgatgcactctgccacagtgctaacgcgggcaccgggagtcggggcagcagccgccgtgggagcatgaacaatgagctgctctctccggagtttggcccagtgcgggaccccctggcagatggtgtggaaggcctgggtcggggcagcccagaaccctcggccttgcctccccagcgcatccccagcgacatggccagtcctgagcccgagggctctcagaacagccttcaggcagcccccgcaaccacctcctcctgggagccccggcgggcaagcacggccttctgcccacccgctgccagttccgaggcacctgacggccccagcagcactgcccgccttgacttcaaggtctctggcttcttcctcttcggctccccactgggcctggtgctggctctgcgcaaaactgtgatgcccgccctggaggcagcccagatgcgcccagcctgtgaacagatctacaacctcttccacgcggctgacccctgcgcctcacgcctcgagcccctgctggccccgaagttccaggccatcgccccactgaccgtgccccgctaccagaagttccccctgggagatggctcatccctgctgctggccgacactctgcagacgcactccagcctctttctggaggagctggagatgctggtgccctcaacacccacctctactagcggtgccttctggaagggcagtgagttggccactgaccccccggcccagccagccgcccccagcaccaccagtgaggtggttaagatcctggagcgctggtgggggaccaagcggatcgactactcgctgtactgccccgaggcgctcaccgcctttcccaccgtcacgctgccccacctcttccacgccagctactgggagtccgccgacgtggtggcgttcatcctgcgccaggtgatcgagaaggagcggccacagctggcggaatgcgaggagccgtccatctacagcccggccttccccagggagaagtggcagcgaaaacgcacgcaggtcaagatccggaacgtcacttccaaccaccgggcgagcgacacggtggtgtgcgagggccgcccccaggtgctaagcgggcgcttcatgtacgggcccctggacgtcgtcacgctcactggagagaaggtggatgtctacatcatgacgcagccgctgtcgggcaagtggatccactttggcaccgaagtcaccaatagctcgggccgcctcaccttcccagttcccccagaacgcgcgctgggcattggtgtctaccccgtgcgcatggtggtcaggggcgaccacacctatgccgaatgctgcctgactgtggtggcccgcggcacggaggctgtggtcttcagcatcgacggctccttcaccgccagcgtctccatcatgggcagcgaccccaaggtgcgagctggcgccgtggacgtggtcaggcactggcaggactccggctacctgatcgtgtatgtcacaggccggccggatatgcagaagcaccgcgtggtggcatggctgtcgcagcacaacttcccccacggcgtcgtctccttctgcgacggcctcacccacgacccactacgccagaaggcaatgtttctgcagagcctggtgcaggaggtagaactgaacatcgtggccggttatgggtctcccaaagatgtggctgtatacgcggcgctggggctgtccccgagccagacctacatcgtgggccgtgccgtgcggaagctacaggcgcagtgccagttcctgtcagacggctatgtggcccacctgggccagctggaagcgggctcgcactcgcatgcctcctcgggacccccgagagctgccttgggcaagagcagctatggtgtggctgcccccgtggacttcctgcgcaaacagagccagctgcttcgctcgaggggccccagccaggcggagcgtgagggcccgggaacaccacccaccaccctggcacggggcaaagcacggagcatcagcctgaagctggacagcgaggagtgaggcccacaccagcctggacctgggttatttattgacacacccaaggggcccgaggggctgcgtgtgggaggctggggacccagacttttggccccagcgctggcccccccagccccacaccctatatctccgtgtgctcctcggtgttacttccctttcatatgaggggacccagcgccggggggagggaggagggcgtgggcatgggcgcagaggcttttccagtgtgtataaatccatgaaaataaacgccacctgcacccc

SEQ ID NO: 1383 - DNA, 1116 bp, Homo sapiens
  source 1..1116: mol_type = genomic DNA
gcggcggcggcagcggcagcggcagcggcgctgagttttgtctcccgggccgtctgggcgcgcgcgggtgtcccagaatgaaatatgactgaggactctcagagaaactttcgttcagtatattatgagaaagtggggtttcgtggagttgaagaaaagaaatcattagaaattctcctaaaagatgaccgtctggatactgagaaactttgtacttttagtcagaggttccctctcccgtccatgtaccgtgcattggtatggaaggtgcttctaggaatcttgcctccacaccacgagtcccatgccaaggtgatgatgtatcgtaaggagcagtacttggatgtccttcatgccctgaaagtcgttcgctttgttagtgatgccacacctcaggctgaagtctatctccgcatgtatcagctggagtctgggaagttacctcgaagtccctcttttccactggagccagatgatgaagtgtttcttgccatagctaaagccatggaggaaatggtggaagatagtgtcgactgttactggatcacccgacgctttgtgaaccaattaaataccaagtaccgggattccttgccccagttgccaaaagcgtttgaacaatacttgaatctggaagatggcagactgctgactcatctgaggatgtgttccgcggcgcccaaacttccttatgatctctggttcaagaggtgctttgcgggatgtttgcctgaatccagtttacagagggtttgggataaagttgtgagtggatcctgtaagatcctagtttttgtagctgtcgaaattttattaacctttaaaataaaagttatggcactgaacagtgcagagaagataacaaagtttctggaaaatattccccaggacagctcagacgcgatcgtgagcaaggccattgacttgtggcacaaacactgtgggaccccggtccattcaagctgaacgcacccgctggttgtggaccgtctgccaggcaccacagtgagcattgtgttcttggcatgtgatctgggaaactgattgaataatacacttttcttgctttggtgctcaaagtggtttttttcccccaataaaattatttaattgaaa

SEQ ID NO: 1384 - DNA, 585 bp, Homo sapiens
  source 1..585: mol_type = genomic DNA
gtgtagagaagggatggatagtgaatgccaaggttagttctagctggataaattagccaagggtttcagctggataagttggctgagggtgctacaggtctagccttaaggctgtctcactgaaacattttggagtctggagtcatctgttctgaatagcgcccacatagtttatatttttttattttttgagacagagtctcactctgttgcccaagctggagtgcagtggcacgatctcagctcactgcaacctctgcctcccgggttcaagtgattctcctgcctcagcctcctgagtagctgggactacagtgcaggcctgagtgttccttccagcatgtcggagggggagtcccagacagtacttagcagtggctcagacccaaaggtagaatcctcatcttcagctcctggcctgacatcagtgtcacctcctgtgacctccacaacctcagctgcttccccagaggaagaagaagaaagtgaagatgagtctgagattttggaagagtcgccctgtgggcgctggcagaagaggcgagaagaggtgaatcaacggaatgtaccaggtattgacagtgc

SEQ ID NO: 1385 - DNA, 5847 bp, Homo sapiens
  source 1..5847: mol_type = genomic DNA
ggcattatgcaattatattactaaggctgctacctgcccatgcccctctcctcctcctggtttggaactaccctccccatctgctgctatatttatctgccttcttggccataaaaggctggttgtgtggcctgacattcgactgcctgaccacatgcattatttttgaactggcccccagggtcctgtctttagccctgcctcttaacattgtcttggattcaacctaggtggagtcttcattctctcatccagctcctcggcctcatcggaacatttccaccaccattactcctttggaaactggtggcccggttccttcaaggggcacaggatgtctttgcctttttatcagaggtgccaccagcactatgatctcagctaccgcaacaaggacgtgcgcagcaccgtgagtcactaccagcgggagaagaaacgctccgccgtctacacccagggctccacggcctacagcagccgctcctccgccgcgcaccgccgggagtccgaggccttccgtcgggcgtccgcctcctcctcccagcagcaggcctcgcagcacgccctgagctctgaagtcagtcggaaggcagcctcagcctacgattatggctcctcccatggacttacagattccagtctgctgttagatgattattcatccaagttgagccccaaaccaaagagagccaagcacagcctactgtctggagaagagaaagaaaatttgcccagtgactacatggtacccattttctcaggacgtcaaaagcatgtcagtggaattactgatacggaagaagaaagaattaaagaagctgctgcttatatagcccagaggaatcttcttgctagtgaggaaggaatcacaacatctaaacagtccacggcatccaagcagaccacggcatctaagcagtccacggcatccaagcagtccacagcatccaagcagtccacggcatccaggcagtccacggcatccaggcagtctgtggtttccaaacaggccacatccgctcttcaacaggaagaaacttctgaaaagaagtcaaggaaagttgtgattcgagaaaaggcagaacgcctgtccctgaggaaaacattagaagaaaccgagacatatcatgccaagctgaatgaagaccatcttctccatgctcctgagtttatcattaaacctcgctcccacacggtttgggagaaggagaatgtaaaattgcattgctccatagcaggctggccagaacctcgtgtcacgtggtataaaaaccaggtgccaataaatgtccatgcaaaccctggaaagtatattattgagagtcgatatgggatgcacactctggagattaatggatgtgattttgaagatacagctcagtaccgggcctcggcgatgaatgttaaaggagagctttcggcatatgcttcagttgtggtaaaaaggtataagggagagtttgatgagactcgcttccacgctggggcttccaccatgcccctcagctttggtgtgaccccatatggttatgcatcccggtttgagatccactttgatgacaaatttgatgtgtcttttgggagagagggagagacaatgagtctaggctgtcgtgttgtcatcactcctgaaattaaacatttccagccagagatccagtggtacagaaacggagtacctctttctccatcaaaatgggtgcaaacactttggagtggagagcgggcaacgctgacattttcccatctcaacaaagaagatgaaggcctctatacaatccgtgtacggatgggagaatattatgaacaatatagtgcttatgtctttgttcgagatgctgatgcagagattgaaggagccccagctgctcccttggatgtgaagtgcttggaggccaacaaagattatatcatcatctcctggaaacagccagctgtcgatggagggagtcctattctcggatattttattgataagtgtgaggtgggcacagatagctggtcgcagtgcaatgacacacctgtgaagtttgctcgttttcctgtcactggattgatcgaaggtcgttcctatatcttccgagttcgagctgtgaataaaatgggaataggtttcccatctcgagtttccgagcccgtggctgctctggatccggctgagaaagctagacttaaaagtcgcccctcagcaccctggactggacagatcattgttactgaagaggaaccttcagagggtattgtgcctggccccccgacagacctctctgtcactgaggccacccggagctatgtggtgctcagctggaagccccctggccagcgtggtcatgagggcattatgtactttgtggaaaagtgtgaggcaggaacagaaaactggcagcgagtgaacacggagctccctgtgaagtctccccgctttgctctgtttgacttggccgaggggaaatcctactgtttccgtgtccgctgttctaattctgcaggagttggtgagccctcagaggcaacggaggtgactgtggtaggggacaaacttgatatccccaaggctcctggcaaaatcatcccaagcagaaacacagacacctcagtggtagtttcgtgggaggagtccaaagatgccaaagagctggtcgggtactacatagaggcgagcgttgctggctctggcaagtgggagccctgtaacaacaaccccgtgaagggctcacgattcacttgtcatggattagtgactggtcagagttatattttccgggtcagagcagtcaatgcagctggacttagtgaatattcccaggattcagaagctattgaagtcaaagctgctattgggggaggagtgtctccagatgtgtgtcccgcactgagcgatgagcctggtggactaaccgcctccagggggcgcgtgcatgaagcctccccgccaaccttccagaaagatgctttgcttggcagcaaacctaacaaaccttcactacccagtagctctcaaaacctgggccaaacagaagtgagtaaagtaagtgaaacagttcaggaagagcttaccccgccaccacagaaagcggctcctcaggggaaaagtaagtctgaccccctgaaaaagaagacagacagagcaccaccatctccaccctgtgatatcacctgtcttgaaagttttcgtgactcaatggttcttggatggaagcaaccagataagattggaggggcagaaattactggctattatgtgaactatcgcgaggtcattgatggggtaccaggaaaatggagagaagccaatgtcaaggctgtcagtgaggaggcatacaagattagcaacttgaaggaaaacatggtgtatcagttccaagtggcagccatgaacatggctgggctgggcgcgccctccgcagtaagcgaatgcttcaaatgtgaagagtggaccatcgccgtcccaggaccaccgcacagtctcaagtgtagtgaagtcaggaaagactcactggttctccagtggaagccgccagtccactccgggcggactccggtcactggttacttcgtggacttgaaggaggccaaggccaaagaagaccagtggcgagggctcaatgaggcggctattaaaaacgtatacctgaaggttcgaggcctcaaggagggcgtcagctacgtgttccgtgttcgagccataaaccaggcgggagttgggaagccatctgaccttgctggccctgttgtggcagagacccgtccaggaaccaaagaggttgttgtaaatgtggatgatgatggagtcatttcattgaacttcgagtgtgataagatgactccaaagtccgagttctcctggtccaaagattatgtatccactgaggactctccacgattggaagtcgaaagcaagggcaacaagacgaaaatgaccttcaaagaccttgggatggatgacttgggtatttactcttgcgatgtaacagacactgatggaatagcatcaagctacttaatagatgaggaagaattgaaacgtttacttgctctcagccatgaacacaagttcccaactgtcccagttaaatcagagttggcagttgaaattttggagaaaggccaggtccggttttggatgcaggctgagaaactgtctggcaatgccaaagtcaactacatatttaacgagaaggaaatttttgaaggcccgaaatataaaatgcatattgaccgaaacactggcatcatcgaaatgttcatggaaaagctacaggatgaggatgagggaacgtacactttccagcttcaagatggaaaagcaactaaccattctactgttgttctcgttggagatgttttcaaaaagctccagaaagaagctgaattccagcggcaagaatggatcaggaaacaaggtcctcactttgttgagtatttgagctgggaagtgactggtgaatgtaatgtactattgaaatgcaaggtggcaaatattaagaaggagactcatattgtgtggtacaaagatgagagggagatatcagtggatgaaaagcatgactttaaggatggtatatgtaccctgcttataacagagttttccaagaaagatgctgggatttatgaagttatcctgaaagatgaccgaggaaaagataagagcagactgaagcttgtggatgaagcctttaaggaactgatgatggaagtatgcaaaaaaatagctttgtctgctacagacctgaaaatccagagcacagccgagggcatccaactgtactcttttgtaacttactatgtggaggatttgaaagttaactggtcccacaatgggtccgccattaggtactcagacagagttaagaccggggtcactggagagcagatctggctacaaatcaacgagcccaccccgaatgacaaagggaagtatgtcatggagctctttgatggcaaaactggacatcagaagacagtggatctctctggacaagcatacgatgaggcctatgctgaattccagaggttgaaacaagctgccattgccgagaaaaatcgtgcccgggtgttgggaggtctcccagacgtggtcaccatccaggaggggaaggcccttaatctcacttgcaacgtgtggggagacccgcctccggaggtgtcgtggttgaagaacgagaaggccctggcctcagacgaccactgcaacctcaagttcgaggctgggaggaccgcgtacttcaccatcaacggcgtgagcaccgctgactcgggcaaatacgggctggttgtgaagaacaagtatggctcggagaccagcgacttcaccgtcagcgtgttcatcccagaggaggaggcgaggatggccgccttggagtccctgaaaggtggcaagaaggccaagtgaccggaggtgcgaggagagccagccggcctgtgtgacttgggtgtgaatggtttgggttaaggatgagacgtcttcatgctttctcctccctattattttctggcttgaggggaaaataatgtcaggtctttcactcatataaaaaagcaccaactaatgacactttaattgtttttctttatctacaaaattatgtgttaagaaaataccattcatagcatgaagattaggaaacagttttaaggagaagacttgaatgaagttggagggacattgaatgatggtcagagggcagacgaatgtgtcgtggggcgaattgggatttgctgcagctgtgaagccatggccgtgtctcgtgtgttgttacagaggtgatgtgcttttcgacgggcgcctcgtggcttggaacctcctctgtatgaataaacagttttcacgtctgtcctcttccccga

SEQ ID NO: 1386 - DNA, 8320 bp, Homo sapiens
  source 1..8320: mol_type = genomic DNA
gatatagactgtcaatttcggatccaaagacggcgatggcagagctcacccgggttgcctgtcaaatcaaggctatcgcagaataaatcccgccgcctgccgcgaagccccggcgcaccgcaaacttcagtgagcgaactgggtgatcgctgttgggatatgcagattcctgatgtaaaaggcggggtggcccccccgagagcctctcccgggggccggagcccgcaggtgcagtgaggcgcgcgcgccggtgccggcgcccccagagccgccttgcccgggtagagggagcccggcgcccggcggggtctggcggccgcacaccggcggcggcggcttgtctgcggcggctgcagcggatgatggtggcggccggcccgctgggctgtgcctgtgtgtcgccgcggaaatcagcgccctgcgccgcgcgctgagcccctgcaggtccgccgcagccccagcctcggcgaggacggccccggcgcgcgggggggcggggggcgcgcggggtcggcttatcatggcggatcggacggcgccccgctgccagctccggctggagtgggtgtacgggtaccggggtcaccagtgccgcaacaacctgtactacacggcaggcaaggaggtggtctactttgtggctggggtcggggtggtttacaacacccgcgagcacagccaaaaattcttcctgggacacaacgacgacattatcagccttgccttacacccagacaaaactctcgttgcaactggccaagtcgggaaggagccatatatatgcatatgggattcctataatgtccagactgtgtctcttcttaaagatgtccatacacatggagttgcctgcctggcttttgactcagatggacagcgtttagcctctgtggggttggatgccaaaaacacagtctgcatttgggactggaggaagggaaaacttctggcgtcagccaccggccattctgacaggatttttgatatttcctgggatccatatcagccaaacagagtggttagctgtggagtaaaacacataaagttttggacactgtgtggaaatgccctgactgcaaaaagagggatatttggcaaaacaggggatcttcagaccatcctttgccttgcatgtgccaaagaagacatcacctactctggtgctttaaatggtgacatctatgtctggaaagggctcaatttagtccgcaccattcaaggagcacatagtgctggaatctttagcatgtatgcttgtgaagaaggctttgccactggtgggcgagatgggtgtatacgactgtgggacactgatttcaaaccaataaccaaaattgatctcagggagacagaacaaggatacaaaggcctctctatccggagcgtgtgctggaaagcagaccgccttctagcagggacccaggacagtgagatatttgaagtgattgtgcgagagcgagacaagccgatgttgatcctacagggccactgcgagggtgagctctgggctctggccctgcaccccaagaagcctctggctgtgacaggcagcgatgaccgctctgtcaggctgtggagcctggctgatcatgccttgatcgcccgctgtaacatggaagaggcggttcgcagtgtagctttcagccccgacggatctcagctggccctgggcatgaaggacggctctttcattgttctccgagtcagagatatgacagaagtagttcacatcaaagatcgaaaagaagtcattcatgaaatgaaattttctccagatggttcttaccttgcagtgggatccaatgatggcccagtagatgtctatgctgttgcccagaggtataagaaaattggagaatgcagcaagtcccttagtttcatcacgcatattgactggtccttggatagtaaatacttacaaactaatgacggtgcaggagaacgattgttctacagaatgccatctgggaagcctttaacaagtaaagaagaaattaaagggattccttgggcctcctggacatgcgtgaaaggccctgaagtgagtggaatttggcccaaatacactgaggttactgacatcaactcagtggatgcgaattacaacagctcagtgctggtgtctggagatgattttggactggttaaattgtttaaatttccttgtctcaagagaggagccaaatttagaaagtatgtgggccattctgcacatgtcacaaatgtccgctggtcccatgactttcagtgggtgttgagcacaggaggggctgatcactcagttttccagtggaggtttattccagaaggtgtcagcaacggcatgctggaaactgcaccccaagaaggtggagctgattcctacagtgaagaatctgattcagatttatctgatgtgcccgaactggactctgatattgagcaagaagctcaaatcaattatgatcgccaggtttacaaagaagatctacctcagctaaagcaacaaagtaaagagaaaaaccacgcagtgcccttcctcaaacgagaaaaggctcctgaggacagcttgaaactccagttcatacacggttatagaggctacgactgtagaaacaatctgttctacacacaagctggagaagtagtctaccacattgctgcagttgctgtcgtgtataatcggcagcagcactcccagaggctgtacctggggcacgatgacgacattctcagcctgaccatccatccagtgaaggactatgtggctactgggcaggttggaagagatgctgctattcatgtgtgggacacacaaactctaaaatgtttgtcgctgttgaaaggacaacatcagagaggagtgtgtgcacttgatttttcagccgatggaaaatgtctggtgtcggttggtttagacgattttcacagtattgtattttgggactggaaaaagggagaaaagatagccacaacaagaggacataaagataagatatttgtggtaaagtgtaacccacaccatgttgacaaactggttacagttgggataaaacacatcaaattctggcaacaagcaggtgggggcttcacttctaaaagaggaacttttggaagcgttggaaaattggaaacaatgatgtgtgtttcttacggacgaatggaagatctagtgttctcaggagcagctactggagatatttttatttggaaagacattctactactgaagacagtgaaagctcatgatgggcctgtgtttgctatgtatgcactggataagggctttgtaacaggtggaaaggacggcatcgtggagctctgggatgatatgtttgaaagatgtttgaagacttatgccattaaaagatcagcattgtcgactagctcaaaaggcttgcttttggaagataacccttcaattcgtgccatcactttgggacatggacatatcctggtgggaacaaaaaatggagagattctggaaattgataagagtggcccaatgacactgcttgttcaggggcacatggaaggagaagtgtgggggttggcagctcaccctctcctgcccatctgtgcaacagtgagcgatgataaaacacttcgcatctgggaactatctgcccagcaccgtatgctggcagtacggaaactcaaaaaaggtggaagatgctgtgccttttcccctgatgggaaagccttagcggttggcttgaacgatgggagtttcctggtggtaaatgctgacactgttgaagacatggtctctttccatcacagaaaagaaatgatctctgatattaagttttcaaaagatacgggaaaataccttgccgtggcatcccatgataactttgtggatatttacaacgtacttacaagcaaaagggttggcatctgtaaaggtgcttctagttatattacacacattgactgggactctagaggaaaattattgcaagtgaattcaggtgccagagaacaacttttttttgaagctccaagaggcaaacggcatataataagaccttcagagatcgagaagatagagtgggacacatggacctgtgtcctggggcccacctgtgagggaatctggccagcacatagcgatataactgacgtaaatgctgccagtcttaccaaagactgttcccttttagccaccggagatgattttggtttcgttaagcttttttcatatcctgtcaagggacagcacgcaagattcaagaagtatgtggggcacagtgcacatgtcactaacgtgaggtggctgcacaatgactctgtgctgctcacggtgggcggcgccgacacagccctgatgatctggaccagggagtttgtggggacccaggagagcaagctggtggacagcgaggagtcagacaccgacgtggaagaggatggaggctatgacagcgatgttgctagagaaaaggccattgactacaccaccaagatttatgctgtgagcatcagggaaatggaaggcaccaagccacaccagcagctgaaggaagtttccgtggaagaaagaccacccgttagccgagcagctccccagcctgagaaactgcagaagaacaatatcaccaaaaaaaagaaactggttgaggagctggctctagaccacgtgtttggctacagaggtttcgactgtcgaaataacctgcattaccttaatgatggcgctgacatcatcttccacacagcagcggctggcatcgttcagaacctctccacagggagccagagcttctatctggagcacacagatgacatcctctgtctcacagtgaaccagcaccccaagtacagaaacgtggtggccaccagccagatagggacaacaccttccatccacatatgggacgccatgaccaaacacaccctctccatgctgcggtgcttccactccaagggggtgaattacatcaacttcagtgcaactggaaagctcctggtgtcggtgggagtggaccctgagcacaccatcactgtctggcgatggcaggaaggtgccaaggttgccagccgagggggtcacctggagcgcatatttgtggtggaatttcgccccgactcagacacgcagtttgtatctgtcggggtcaaacatatgaagttctggaccctggcaggcagcgccttgctttacaagaaaggggtcatcgggtccctgggagctgccaaaatgcagacgatgctctccgtggccttcggtgctaacaatctcactttcacgggtgccatcaatggagatgtctacgtctggaaggaccacttcctcatccggctggtggccaaggctcacacaggccccgtgttcacaatgtacacaacccttcgggatggactcatagtgaccggcggaaaagagaggccgaccaaagaaggaggtgctgtaaaattgtgggaccaggagatgaagcgctgccgggcctttcagctggagaccgggcagctggtggagtgtgtgcgctccgtgtgccgtggaaaaggaaaaatcttagtgggaaccaaagacggagaaataattgaagttggtgaaaaaaatgctgcttctaacatcctgattgatggtcacatggaaggggagatctggggcctggccactcacccttccaaggacctcttcatctctgccagcaacgatggcacagcccggatctgggacctggctgacaagaagctgttaaacaaggtgagcttgggccatgcggccaggtgtgcagcctacagccctgatggggagatggtggccattggcatgaagaatggagagtttgtcatcttgttggtgaacagcctgaaagtttgggggaaaaaacgagaccggaaatctgctatccaagatatcagaatcagcccagacaaccgattcttagccgttggttcttctgaacacacagttgacttctatgacctcactcagggcacaaatctgaaccgcattggctactgcaaagatatcccaagctttgtcattcagatggatttttctgcggatggcaaatacattcaggtgtcaacaggtgcctataagcgccaggtgcatgaggtccccctggggaagcaggtaactgaagccgtggtcattgagaagatcacctgggcctcctggacaagcgtcctgggagatgaagtcattggaatctggccacgaaatgcagacaaggctgatgtcaactgcgcatgtgtgacccacgctggcctgaacattgtcacaggagatgactttgggctggtgaagctctttgattttccatgcacagaaaaatttgccaaacataagcgatacttcggtcactcggctcacgtgacgaacatccgtttctcttatgatgacaagtatgtggtcagcactggaggagacgactgcagtgtatttgtgtggcgatgtctgtaaaatgccagaagcctcttatgttattgctgctgctgctaccagccagcaactgcagaggccatgctgaggtgcctccttgccaccagccgttgggaaatgcctaccatgctgccccggatgcacaagctcaaaacgctgcagaagttacacaactgctcccataatctggactctccaaaaccgtgatgccacgaaggaaggtcaagttttaaaatgttaaagactgcttgcctctgttcctgagactaaacagtatacatactaactacattgacaaagaaatcctatctgataatgtagcccgctgacgaattttgaagcctcggttaccctaaccaatatgtagcttttaatttgcatcaaaacttttacaaagatgttttgctattgtttctatatacttcaagaatgttcatttttacaaataagttgaacaagacagcctaagttagatgcaccgaagtactagaaatatcgctagcctctgttctccagtttagctttcaaaaccaaatgagccatgtataaaggagttgagaaacttaatttttaaatgtttcatttgcagagttttatatccattaagtgcctttgaaagtttccagttgtgtgggctgctgtctcacctcccaccaatttctcctttctccatatggtgctaaaacctcaaagctgaggagggctgcaggacccttagcagattcagtgtgtcacccttgtcctgtgttcacgccaaggcttcctaaatgaaagacatcggttacctgcttatgggaaggtgagcagcaaaggaattgaagttcgggacagggtagaattatgggttttcattgtgtttcatgccaaacccacaaaatccaaaatagaattcaagttaaacaaacttctactacaaaatggaaggggaaaaaggctcaggaaggtctatgagaatgagctgacttatctcgttaaatcttaagataaatgagggtaacccaaggctgcaccttggtgtaccaccctgagtggagttgaggtgacttcatttgattgcttcaggcgaactatataggtcaagtccagattataaaaaaattatctgcagaacaaattgtaaacccaaggaatagctggtaaatcaaaattataaagtgagttagagttccttggagttggttgtatgacggaatatgacttggacaatctttaccagaagccatccgtaagcccctcagtcacactttccatgtagctgaccagtgactacaggatgtggctgacagtgctcactgaaaggagagttggtgcgggactggtggttctgagcacatagacgcctattagtccttctggtcagtgaacgaaaattctagacctacagttactggctacttgcatttgtcagtttagagaaaaggtaaaatgaggcattttcaattgtagaatagactaacatttaccacagaagtgcttcagcattctaaatggattagatcactcattaagctatttttatatgccaatttactaatgccttacatcaatccactaataggttgttgggcccgcagtagagtccctatgcagtcccaattctgttttctgtaaccatgtgactggtgatgcagagtgataaccatgtctgcctatcttgtactagactcttcatgctgatcggatcttgcattgaaataaccatgtggaagaacaatgaatcgattaatgatgacatgtacaaccatatttaaagagcaatagtgtccgtgtgtcatgaaaaacttatttgtaaacgtttatatggtatgattttgattttatgtatgttcataaatcctgcactgtatgatatatgtgagttaaaacattggtgcatgaatttattttcaaagtataaaacacatcacttaaacattttatgtgtcaaataaaatttgattatgt

SEQ ID NO: 1387 - DNA, 1133 bp, Homo sapiens
  source 1..1133: mol_type = genomic DNA
gtctgcgtcagttggtcacgtggttgttcggagcgggcgagcggagttagcagggctttactgcagagcgcgccgggcactccagcgaccgtggggatcagcgtaggtgagctgtggccttttgcgaggtgctgcagccatagctacgtgcgttcgctacgaggattgagcgtctccacccatcttctgtgcttcaccatctacataatgaatcccagtatgaagcagaaacaagaagaaatcaaagagaatataaagaatagttctgtcccaagaagaactctgaagatgattcagccttctgcatctggatctcttgttggaagagaaaatgagctgtccgcaggcttgtccaaaaggaaacatcggaatgaccacttaacatctacaacttccagccctggggttattgtcccagaatctagtgaaaataaaaatcttggaggagtcacccaggagtcatttgatcttatgattaaagaaaatccatcctctcagtattggaaggaagtggcagaaaaacggagaaaggcgctgtatgaagcacttaaggaaaatgagaaacttcataaagaaattgaacaaaaggacaatgaaattgcccgcctgaaaaaggagaataaagaactggcagaagtagcagaacatgtacagtatatggcagagctaatagagagactgaatggtgaacctctggataattttgaatcactggataatcaggaatttgattctgaagaagaaactgttgaggattctctagtggaagactcagaaattggcacgtgtgctgaaggaactgtatcttcctctacggatgcaaagccatgtatatgaaatgcattaatatttgactgttgagaattttactgccgaagtttacctccactagttctttgtagcagagtacataactacataatgccaactctggaatcaaatttccttgtttgaatcctgggaccctattgcattaaagtacaaatactatgtatttttaatctatgatggtttatgtgaataggattttctcagttgtcagccatgacttatgtttattactaaataaacttcaaactcctgttgaacattgtgtataacttagaataatgaaatataaggagtatgtgtag

SEQ ID NO: 1388 - DNA, 1886 bp, Homo sapiens
  source 1..1886: mol_type = genomic DNA
gcgccccctgcgctgccaacccgcgagcccgcatcatggatgtcgagctcccctatttcgcattgctagccctggaattcgagaccccagacgaggaccaggattcatgaaatcagtcgcaggggccggggcaggggcctctggctcccgacactggccgagaggtgatgagtgaggttcgaagaacggaagatttaaaaagcagccggggcctccgtattgaatgaaagacccagtgcaaagacatcaccatgaacactagcattccttatcagcagaatccttacaatccacggggcagctccaatgtcatccagtgctaccgctgtggagacacctgcaaaggggaagtggtccgcgtgcacaacaaccacttccacatcagatgcttcacctgtcaagtatgtggctgtggcctggcccagtcaggcttcttcttcaagaaccaggagtacatctgcacccaggactaccagcaactctatggcacccgctgtgacagctgccgggacttcatcacaggcgaagtcatctcggccctgggccgcacttaccaccccaagtgcttcgtgtgcagcttgtgcaggaagcctttccccattggagacaaggtgaccttcagcggtaaagaatgtgtgtgccaaacgtgctcccagtccatggccagcagtaagcccatcaagattcgtggaccaagccactgtgccgggtgcaaggaggagatcaagcacggccagtcactcctggctctggacaagcagtggcacgtcagctgcttcaagtgccagacctgcagcgtcatcctcaccggggagtatatcagcaaggatggtgttccatactgtgagtccgactaccatgcccagtttggcattaaatgtgagacttgtgaccgatacatcagtggcagagtcttggaggcaggagggaagcactaccacccaacctgtgccaggtgtgtacgctgccaccagatgttcaccgaaggagaggaaatgtacctcacaggttccgaggtttggcaccccatctgcaaacaggcagcccgggcagagaagaagttaaagcatagacggacatctgaaacctccatctcaccccctggatccagcattgggtcacccaaccgagtcatctgcgacatctacgagaacctggacctccggcagagacgggcctccagcccggggtacatagactcccccacctacagccggcagggcatgtcccccaccttctcccgctcacctcaccactactaccgctctggtgatttgtctacagcaaccaagagcaaaacaagtgaagacatcagccagacctccaagtacagtcccatctactcgccagacccctactatgcttcggagtctgagtactggacctaccatgggtcccccaaagtgccccgagccagaaggttctcgtctggaggagaggaggatgattttgaccgcagcatgcacaagctccaaagtggaattggccggctgattctgaaggaagaaatgaaggcccggtcgagctcctatgcagatccctggacccctccccggagctccaccagcagccgggaagccctgcacacagctggctatgagatgtccctcaatggctcccctcggtcgcactacctggctgacagtgatcctctcatctccaaatctgcctccctgcctgcctaccgaagaaatgggctgcacaggacacccagcgcagacctcttccactacgacagcatgaacgcagtcaactggggcatgcgagagtacaagatctacccttatgaactgctgctggtgactacaagaggaagaaaccgactgcccaaggatgtagacaggacccgtttagagggaaacttttggaagagtggctgcttatga

SEQ ID NO: 1389 - DNA, 2166 bp, Homo sapiens
  source 1..2166: mol_type = genomic DNA
ggccctcgcggggggcttgtgggtcctcctccccctcccactgacaactgccccaactgctcttcccgccccggtcacagtgaaaatgtagacggggtcgttgtccactatgttaggtcttaatggtgggaggacgcccgagtgctcggcccgtttcaccccgaggaggaaggacactgggtcatgacgccatcagagggcgccagagcagggaccggacgcgagttggagatgttggactcgctgttggccttgggcggcctggtgctgcttcgggattccgtggagtgggaggggcgcagtctcttgaaggcgcttgtcaagaaatctgcactgtgtggggagcaagtgcatatcctgggctgtgaagtgagcgaggaagagtttcgtgaaggttttgactctgatatcaacaatcggctggtttaccatgacttcttcagagaccctctcaactggtcaaaaactgaggaggcctttcctggggggccgctgggagccttgagagccatgtgcaagaggacagatcctgttcctgtcaccattgctctcgattcactcagctggctgctacttcgccttccctgcaccacactctgccaggtcctgcatgctgtgagccatcaggactcttgtcctggtgacagctcctcagtggggaaagtgagtgtgctgggcttgctacatgaagagcttcatggaccaggccctgtgggagctctcagcagccttgctcagactgaggtgaccctgggcggtaccatgggccaggcctcggcccacatcctgtgtcggaggccccgacagcgcccaactgaccagactcagtggttctccatccttccggacttcagcctggatctccaagaggggccctctgtagagtcccagccctactccgatcctcatatacccccggtatctaagaatgccaaggccagaacaaggaaatgtagtttagtatctggtcacgggagagaaaataaaagctgcagaggttgggggtggggtcagggattctagggatggggcagagtggcagcatcctttgtacctacaggtggatcccacaactcatttgacctttaaccttcacctgtccaagaaagagagagaagccagagatagcctgatcctgcccttccagttcagttctgaaaagtaaggttgggacctgggtacgtggatccctgagtagatcccagcatctgggccatggagaggttggggcaacaggttattgattaacctgactttatagggactgaagtccacctccagagacaagtccaagttcttgatccacccattccccctataatggcagaggacctttatgtctcttttctctcccttatacccttgggtcacagctccagttgtccccagagcaccctgggcctgggctgagccagaccagacccttgggaggtggccctatccctaggcagtggtgctaggaggacagaaggctatatgggcgtggcagaggctggttaacaagggcttagtacacgcttgctgttctgtgcccagtatgtgggcggatgacgcaagactacaagatccttgccctcaagctgctaggaacttacggttttattaggagagcagtacaagggtatctatcccagtaccaaatggtgcttcagctctaacatggaggtcagagaaagggacttggaccaataaaatgacatggaggcctaacaggttgcctgaatgagagtcacagtcacctggaagaaagtatccagacccaacctgttagctaccctcaccagcaccaaatcttcccttctcagacagcaggctctcctgcggcctaggccagggcaggctaccagccacatcttctatgagccagatgcttatgatgacctggaccaagaagacccagatgacgacctggatatttgactggccagatttgattagattgtaattggagggggcgcgggaagactttgggcccagaaccatctttctattgtttgtgttagccttaccctgtccctgccccaccttggttccccttgtctatggagccccgccttgtgagccaggaagcagcgtctcatcaggacagaaggtaggatgaagacatggggtaatgtgagagagtagaacacccccgtacctaataaaaatctttatttttttatt

SEQ ID NO: 1390 - DNA, 834 bp, Homo sapiens
  source 1..834: mol_type = genomic DNA
ggacagcttggagatagggcccggaattgcgggcgtcactctgctcctgcgacctagccaggcgtgagggagtgacagcagcgcattcgcgggacgagagcgatgagtgagaacgccgcaccaggcctttgcggggagcttctcctgcaaagaggaaccacgaaggtggccacaggtctggttctgaacagagaccagaggctcgcctgggcagagaacagcattgacttcatcagcagggagctgtgtgcgcattccatcaggaagctgcaggcccatgtcctgttgatcaaagcagtccacggatattttgattcaagacagaattactctgagaaggagtccctgtcgttcatgatagacacgatgaaatccaccctcaaagagcagttccagtttgtggaagtcccaggcaatcactgtgtccacatgagcgaaccccagcacgtggccagtatcatcagctccttcttacagtgcacacacatgctcccagcccagctgtagctctgggcctggaactatgaagacctagtgctcccagactcaacactgggactctgagttcctgagccccacaacaaggccagggatggtggggacaggcctcactagtcttgaggcccagcctaggatggtagtcaggggaaggagcgagattccaacttcaacatctgtgacctcaagggggagacagagtctgggttccagggctgctttctcctggctaataataaatatccagccagctggaggaaggaagggcaggctgggcccacctagcctttccctgctgcccaactggatggaaaataaaaggttcttgtattctca

SEQ ID NO: 1391 - DNA, 3667 bp, Homo sapiens
  source 1..3667: mol_type = genomic DNA
gtgctgctagaaaccacgaacattagtcatctcgcagcatgtgtgcacatggggtgacccgggggcctcctcgaatgcagcgtctacgcctggtgaatggacgcactcttaccaattctgctctgggagatgcagcggtaacctaccgagcgcagaggccggcgcgcacccgtggagcccgcgctcgcgatccctcctcgtgccagggccccagggcagtcaaggcctgccgaccgttaggcgggtcaaggggtacacagggtgcgaattcgttaggcaaaagctgggtacaggcgcgagccacaggcacggaaacctcgcgccgaccggggccctaggcccgacgacggcaggtaaggggaagtggaggcacacagggctgggacgtgccccaggcaccatacgggtggcttcgggcgcgggacgtccgcagccccgcagctcccaggacgttcgacaatctgcagctgaccagcttcggccggtttggggataaagggaagacaggcggcgcggggagtgggaacgcctgaaggccgcgcccctcctttcaggtcggccaggagcgcgccggtaagagcctgggggcaaggggtagaaagacgcccacctcatcacaacccagagctcgggactcctatacagtcccatagggaacaggcggccgccattcccctcccccacgctggcgggtaaggctagagaacggtttcaaggaagacgcatgcgcatgaaataattataaaccgctaggactccgaagttcaatattcgcgggaaggcgcaggcgcaacaaaaagcccggcgggtttatgggtgggggtgctgagcccaaaacccaagcgtgtaataatccgccggcgggaggtgggctggctcttgaaattacgcatgcgccagagctctttgtgacgcaacggggcggtgcgggcagctggctgcgcgtgcgcagaactcgcacaagggaccttatttaggttgcgcaggcgcccgctggccatttcgtcttagccacgcagaagtcgcgtgtctaggtgagtcgcggtgggtcctcgcttgcagttcagcgaccacggtgggtaccgtttttgcgaggattgtttgtccccatatctctgggagggccacggggaccttggcgagctgcaggctgccgtcgagagccgcgagtggttcgctgaatctcggcaccgccgctgaggcctgcaggccgcgccgactctattgtgtgagaagtcggaggaggcggagcggaagcggccgccgccatttcctttcctctacgctggctctcggcccgggcccccacggttcggggcgccgacagctgttgctcaggacagctttgggggtccggtcgccggacgaggaggtgttggagtcgccggggtgggtgcatccgcccggtttttgctccgtgggggggcggtgcgggcccgggcgcgcctcggaggcgaaggacagcttaattggcgctctcagttctggtcctccccgctttgcagtttgtttcgacgccggaccgcgtaagagacgatgatgttgggcacggaaggtggagagggattcgtggtgaaggtccggggcttgccctggtcttgctcggccgatgaagtgcagaggtttttttctgactgcaaaattcaaaatggggctcaaggtattcgtttcatctacaccagagaaggcagaccaagtggcgaggcttttgttgaacttgaatcagaagatgaagtcaaattggccctgaaaaaagacagagaaactatgggacacagatatgttgaagtattcaagtcaaacaacgttgaaatggattgggtgttgaagcatactggtccaaatagtcctgacacggccaatgatggctttgtacggcttagaggacttccctttggatgtagcaaggaagaaattgttcagttcttctcagggttggaaatcgtgccaaatgggataacattgccggtggacttccaggggaggagtacgggggaggccttcgtgcagtttgcttcacaggaaatagctgaaaaggctctaaagaaacacaaggaaagaatagggcacaggtatattgaaatctttaagagcagtagagctgaagttagaactcattatgatccaccacgaaagcttatggccatgcagcggccaggtccttatgacagacctggggctggtagagggtataacagcattggcagaggagctggctttgagaggatgaggcgtggtgcttatggtggaggctatggaggctatgatgattacaatggctataatgatggctatggatttgggtcagatagatttggaagagacctcaattactgtttttcaggaatgtctgatcacagatacggggatggtggctctactttccagagcacaacaggacactgtgtacacatgcggggattaccttacagagctactgagaatgacatttataattttttttcaccgctcaaccctgtgagagtacacattgaaattggtcctgatggcagagtaactggtgaagcagatgtcgagttcgcaactcatgaagatgctgtggcagctatgtcaaaagacaaagcaaatatgcaacacagatatgtagaactcttcttgaattctacagcaggagcaagcggtggtgcttacgaacacagatatgtagaactcttcttgaattctacagcaggagcaagcggtggtgcttatggtagccaaatgatgggaggcatgggcttgtcaaaccagtccagctacgggggcccagccagccagcagctgagtgggggttacggaggcggctacggtggccagagcagcatgagtggatacgaccaagttttacaggaaaactccagtgattttcaatcaaacattgcataggtaaccaaggagcagtgaacagcagctactacagtagtggaagccgtgcatctatgggcgtgaacggaatgggagggttgtctagcatgtccagtatgagtggtggatggggaatgtaattgatcgatcctgatcactgactcttggtcaaccttttttttttttttttttttttctttaagaaaacttcagtttaacagtttctgcaatacaagcttgtgatttatgcttactctaagtggaaatcaggattgttatgaagacttaaggcccagtatttttgaatacaatactcatctaggatgtaacagtgaagctgagtaaactataactgttaaacttaagttccagcttttctcaagttagttataggatgtacttaagcagtaagcgtatttaggtaaaagcagttgaattatgttaaatgttgccctttgccacgttaaattgaacactgttttggatgcatgttgaaagacatgcttttatttttttgtaaaacaatataggagctgtgtctactattaaaagtgaaacattttggcatgtttgttaattctagtttcatttaataacctgtaaggcacgtaagtttaagctttttttttttttaagttaatgggaaaaatttgagacgcaataccaatacttaggattttggtcttggtgtttgtatgaaattctgaggccttgatttaaatctttcattgtattgtgatttccttttaggtatattgcgctaagtgaaacttgtcaaataaatcctccttttaaaaactgc

SEQ ID NO: 1392 - DNA, 5015 bp, Homo sapiens
  source 1..5015: mol_type = genomic DNA
gaggtcagaccggttgctttcccgggagttcggcgtttgctggggctgcagcagctgaagtgtagtgttttcttgggactggcggtctgcacttctctcccgggttccatctccccccgcccggtggtgaggccctcgaggagggctcggacgggtgtagcgatccgcgctagaggaagacgaggcccgggaacgcatgtcccccagggcaggttagggggctggaggggtcaaatcccggggtacttgtggagactctttagcgtggcttcttctctctgctgagaccccgagagctttcccagttctcctcccaggaccaccggggttcctgaagatcgggacttttctgcgcccctccaccaacagcccatctcctgtctatgaagaaagacccttcgtagaaacaacttccccgctgctgacgcgttttcccgtcccgtccccgaagtagtctactatgacctcgttgtgagcctctgaacgattttgacactttcccgaggcctagggtattatatcctaaccttactaaagaccacagaggtgcttgccattatgggaaatcagcttgctggcattgctccctcccagatcctttctgtagagagttatttttcagatattcatgactttgaatatgataaaagcctggggagtactcggttttttaaagttgctcgagccaagcaccgagaaggcctggtcgttgtgaaggtttttgcaattcaggatcccacattgcctttaaccagctataaacaagagctggaggaactgaaaatcaggcttaattctgcacagaattgtctacctttccagaaagcatcagaaaaagcatctgagaaagcagctatgctctttaggcagtatgtgcgagacaatctctatgatcgcatcagtacccgtccattcttgaataacattgagaagcgctggattgctttccagatcctgacagctgtggaccaagcacacaaatctggagttcgtcatggggacatcaagactgagaatgtgatggtcaccagttggaattgggttcttctaactgattttgccagttttaagcccacttatcttccagaagacaacccggcagatttcaattatttctttgacacatcacggaggagaacttgctatattgctcctgaacgttttgttgatggtgggatgtttgccactgagttagaatatatgagagatccttcaactccgcttgtagacttaaatagcaatcagagaacaagaggagagttgaagagagcaatggacatcttttcagcaggttgtgtgatagctgagctttttacagaaggtgtaccattatttgatctctctcaacttttggcttatagaaatggacattttttccctgaacaagtgctaaataaaattgaagatcacagtatcagagaattggtaactcagatgattcaccgtgagccagataaacgtttagaggcagaagattacttaaaacagcagcgtggcaatgcctttcctgaaatattttacacttttcttcagccctacatggcccagtttgccaaggaaacgtttctttctgcagatgagcgtattctggttatacggaaggatttgggcaacattattcacaatctctgtggacatgatctgccagaaaaagccgaaggagagcctaaggaaaatgggctggttatcttggtatctgttataacatcctgcctacagacccttaaatactgtgattccaaactagctgctttggaactgattcttcatttggctccaagattaagtgttgaaatccttttggatcgtattactccatatcttttgcatttcagcaatgactctgttcctagggtgagggctgaagccttgaggacgttgaccaaagttcttgctctcgtcaaagaggttcctcgtaatgatatcaatatttatccggaatacattctgccaggcatagcccacttagcccaagatgatgctactatcgttagactagcctatgctgaaaacatagctctgctggcagaaacagctctgagattcctggaattagtacagttaaaaaatcttaatatggaaaatgaccccaataatgaagaaatagatgaggttacacatccaaatggaaattatgacacagagctccaagccttacatgaaatggtccagcagaaagttgttactttgctaagtgaccctgaaaatattgtaaaacaaaccttgatggaaaatggaataacacggctgtgtgtattctttggacgtcagaaagccaacgatgttttgttgtcccacatgattactttcctaaatgataagaatgattggcatctacgtggagcattttttgatagtatagttggtgttgctgcctatgttggctggcaaagctcctcaattctcaagcctctgctgcaacaaggtcttagtgatgctgaggaatttgtcattgtgaaagctctttatgcccttacttgtatgtgccagttaggactgctacaaaaaccccatgtttacgaatttgccagtgatattgcccccttcctgtgtcatcccaatttatggatacgttatggtgccgtgggatttatcacagtggtagctcgtcaaataagtacagctgatgtctactgtaaactgatgccttatcttgacccatatattacccaaccaataatacagattgaaagaaaacttgttctgctcagtgttttaaaggaaccagtaagtcgttctatatttgattatgctttgaggtctaaagatattactagcttgttcagacatcttcacatgcgtcagaagaaacgaaatggttctcttcccgactgccctccgccagaggatcctgccatagcacagcttctgaagaagttgctctcacagggaatgacagaggaagaggaagacaaacttctggcactgaaagacttcatgatgaaatctaataaagcaaaggccaatatagtggaccagagccatcttcatgatagtagtcagaaaggtgtaattgacttggcagctttaggcataactgggagacaagttgatcttgttaaaaccaaacaagaaccagatgacaaacgggccagaaaacatgtaaaacaagactcaaatgtaaatgaagaatggaaaagcatgtttgggtcactggacccaccaaacatgccacaggccctacctaaagggagtgatcaggaggtgattcagactgggaaacctcctcgttccgagtcctctgctggcatttgtgtccctttgtcaacttcttcacaggttccagaagtgacaactgtccaaaataaaaaaccagtaataccggttttaagtagtacaatcttaccatccacctatcagattcgaattacaacttgtaaaactgaacttcagcaactcatccagcaaaagcgggagcagtgcaatgctgagagaatagctaagcagatgatggaaaatgctgaatgggagagtaaaccaccaccacctggatggcgtcctaaagggctgttagttgcccatcttcatgagcataaatctgctgtgaatcgaattagagtctctgatgaacactcactttttgcaacatgttcaaatgatggcacagtgaaaatctggaacagtcaaaagatggaggggaagaccaccactaccagatctattcttacatacagccgaattggaggacgagtcaagacgctcacattctgccaaggctcccactatttagccatagcatctgataatggtgctgtccagcttcttggaattgaggcttctaagctgcccaagtctcctaaaatccatcctctacaaagcagaattctagatcagaaggaggacggttgtgttgtggatatgcatcacttcaactctggagcacagtctgttcttgcctatgccactgtgaatggctctctggttggctgggaccttaggtcttcaagcaatgcgtggactttaaagcatgatttaaagtcgggcctcatcacttcctttgctgtggacatccaccaatgctggctctgcattggtacaagcagtggtaccatggcttgttgggacatgaggttccagttgccaatttcaagtcactgtcatccttccagggctcgaatcagacgcctctcaatgcaccctctgtatcagtcctgggtgattgcagctgttcagggcaacaacgaagtgtccatgtgggacatggagactggtgacagaagatttactctctgggccagcagtgcaccaccactttctgaattacagccttctcctcatagcgtccatggtatctactgtagtcctgcagatggaaatcctatcctactaacagctggctcagatatgaaaataaggttttgggacttggcttacccagaaaggtcctatgttgttgcaggaagtactagttccccatctgtgtcctactacaggaaaataattgaaggcactgaagttgtccaggaaattcagaataagcagaaagtaggaccaagtgatgacacccctcgaaggggcccagagtccctgcccgtgggacatcatgacatcatcactgatgtcgccacattccagaccacacagggcttcatcgtaactgcttctagagatgggattgtgaaggtgtggaaataaaacctactgatttgtataaattttaatagttataaatataatactataactcgagaaaaggcatttctagagaacagattcatttgcttaattttcaaaattatgtctccatattactgtttcatgactgactgactaaatgacacccaaaatggttaagatgtacttgactagtttacttatgcatctctttgcaagaatcagccagccaacaatgtctgggatttttattgtatatgttatagaggtgagaaatgtaaaatatgaaaatgaatatgtttattttgtattgaaaaagatggttgaaaagatggttgtaagctattatagtataaacacatttttgctattaaaaatgctattcaaagcagttaaactgt

SEQ ID NO: 1393 - DNA, 1289 bp, Homo sapiens
  source 1..1289: mol_type = genomic DNA
gcctgggaggagactctctgagggtgtagagctagagggagcattcactggccatgccagtagttaccactgatgctgagtcagaaacaggtatcccaaaatccctttccaatgagcctccctcagaaaccatggaggaaatagagcacacatgcccacagcctcgactgaccctgactgcacctgccccatttgctgatgaaaccaactgccagtgtcaagcaccccatgaaaaactgaccattgctcaggcccgcttaggaacaccagctgacaggcctgtcagagtatacgccgatggaatatttgacctcttccactcaggtcatgcaagagcccttatgcaagcaaaaacactgtttcccaacagctacttgttggtaggagtttgcagtgatgatctcacccacaaattcaaaggtttcaccgtgatgaatgaagccgagagatacgaagctctcagacactgtcgctacgtagacgaagttatcagagatgctccctggacactcacgccagagtttctggaaaaacacaagattgactttgtggctcatgatgacattccgtattcctctgctggctctgatgatgtttacaagcacataaaggaagcagggatgttcgttccaacgcagagaacagaaggcatctcaacatcggacatcattaccagaattgttcgtgactatgatgtttatgcccgacgtaacctccagagagggtatacagccaaggaactgaatgtcagctttataaatgagaagaggtaccgtttccagaaccaagtggacaaaatgaaggaaaaagtcaagaatgtggaggaaagatcaaaggaatttgtgaacagagtggaagaaaagagccatgatctaattcaaaagtgggaagagaagtcaagggaattcattggcaacttcctagaactgtttggacctgatggagcatggaagcagatgttccaggagaggagcagccggatgctgcaggccttatccccgaagcagagccctctgaagagttgggcgaggtgcagagacttctagctggacaacctacacaaaccttagcgtctagagtcactctaaccttgctaaggaaggatgcagagttccctagagagacttgcactgatggggtgacttctgctttggtccttccaccacccccaccaagtaaaccacctgtggcagcggctgttccctcaacctgctacttctgcgtccataagggtcctgcacgttgcctcccaccaccccagctctgccagaataaaattgtttccaata

SEQ ID NO: 1394 - DNA, 3466 bp, Homo sapiens
  source 1..3466: mol_type = genomic DNA
gccagcgtcccacaccagccgcaggtgaaaaccggcagaaagacattaagagattttcctgcagtcactgctggcagatgatagagccaggatttgaaagcaggcagcctggctccagaccctgtgctcttaactcccgttttgcatcaagaacagaatcctatgaaaggcttgcacagtgcttggtactgagatagcagcatcaaggagcattgtgtacatgcagaagtgcacagtacctggagtgaaactgcttgtgttcgatttctgataccattcataactggctgtgtgatctcaaaacctctaaaatgcagacctccagctctagatctgtgcacctgagtgaatggcagaagaattacttcgcaattacatctggcatatgtaccggaccgaaggcagatgcataccgtgcacagatattacgcattcagtatgcatgggcaaactctgagatttcccaggtctgtgctaccaaactgttcaaaaaatatgcagagaaatattctgcaattattgattctgacaatgttgaatctgggttgaataattatgcagaaaacattttaactttggcaggatctcaacaaacagatagtgacaagtggcagtctggattgtcaataaataatgttttcaaaatgagtagtgtacagaagatgatgcaagctggcaaaaaattcaaagactctctgttggaacctgctcttgcatcagtggtaatccataaggaggccactgtctttgatcttcctaaatttagtgtttgtggtagttctcaagagagtgactcattacctaactcagctcatgatcgagaccggacccaagacttcccggagagcaatcgtttgaaactccttcagaatgcccagccacctatggtgactaacactgctaggacttgtcctacattctcagcacctgtaggtgagtcagctactgcaaaattccatgtcacaccattgtttggaaatgtcaaaaaggaaaatcacagctctgcaaaagaaaacataggacttaatgtgttcttatctaaccagtcttgttttcctgctgcctgtgaaaatccacagaggaagtctttttatggttctggcaccattgatgcactttccaatccaatactgaataaggcttgtagtaaaacagaagataatggcccaaaggaggatagcagcctgcctacatttaaaactgcaaaagaacaattatgggtagatcagcaaaaaaagtaccaccaacctcagcgtgcatcagggtcttcatatggtggtgtaaaaaagtctctaggagctagtagatcccgagggatacttggaaagtttgttcctcctatacccaagcaagatgggggagagcagaatggaggaatgcaatgtaagccttatggggcaggacctacagaaccagcacatccagttgatgagcgtctgaagaacttggagccaaagatgattgaacttattatgaatgagattatggatcatggacctccagtaaattgggaagatattgcaggagtagaatttgctaaagccaccataaaggaaatagttgtgtggcccatgttgaggccagacatctttactggtttaaggggaccccctaaaggaattttgctctttggtcctcctgggactggtaaaactctaattggcaagtgcattgctagtcagtctggggcaacattctttagcatctctgcttcatccttaacttctaaatgggtaggtgagggggagaaaatggtccgtgcattgtttgctgttgcaaggtgtcagcaaccagctgtgatatttattgacgaaattgattccttgttatctcaacggggagatggtgagcatgaatcttctagaaggataaaaacagaatttttagttcaattagatggagcaacaacatcttctgaagatcgtatcctagtggtgggagcaacaaatcggccacaagaaattgatgaggctgcccggagaagattggtgaaaaggctttatattcccctcccagaagcttcagccaggaaacagatagtaattaatctaatgtccaaagagcagtgttgcctcagtgaagaagaaattgaacagattgtacagcagtctgatgcgttttcaggagcagacatgacacagctttgcagggaggcttctcttggtcctattcgcagtttacaaactgctgacattgctaccataacaccggatcaagttcgacccatagcttacattgattttgaaaatgcttttagaactgtgcgacctagtgtttctccaaaagatttagagctttatgaaaactggaacaaaacttttggttgtggaaagtaagtgggatacttggaatcaaggcatctctgtagtacagtcttctttattttttagcatagaaagttggggatgtgttaattgtatttttaagaatatattctaagttctgtacttcaaataatagcacagattttacatctgattgacatagtgtatgttaatgtaagttttgctttccagtgattacctgatacgtaagcctatttgaacaaagtgagaatgaacttttgtttctaagaagtctttatcttgaagctatataacatgaaaagtgagctcaaattttttttagttgaagattacatataaagttgtgtctgattaatattcatcttttattgaagaaagtgccttctgatggccacataattcttaatgtcagctagtataatggtttacatttggacaaagtattgcttagtgttatttaagtagatttaagatctcaaagctaaagtgccaatttttactttcttcagccaatttgttacctcttttatggtttttaatttttatcaggactaacattttcagaaatagcaaggtgtgatctagtattagattcacagaactgaaaggttaattaagaatgttggttattttcacgggagcgtgtgatatttaacattaatattttatttgacactacagcctgtaatactgctctctttcaaaaacaagttttcagatttttataacagacccattttgttttatgaaacatgttcattacagaaacatgagaaaatagagataagtaaaaagaataaaagtcactattatcctaccactttgcgggacacactattaatatttaagcatagattcttccagatgttttgttttatacagcagtaggattgtgtaatgtattctctcttgtagcctattcttcaaagcgtatcttcactttccatgttaacataaatgtccttttatgattgtctaggattccatggatggatggaatataattgagtcatctggtagagcgcatataggacaggacgctaggttgtttatcttttgtttattgtaaaggaactatgtgggatgcatttggtgatctttttaaaaaatgtataaatttcttgagtaattcctggattaaagaatatgcactttttaaa

SEQ ID NO: 1395 - DNA, 2626 bp, Homo sapiens
  source 1..2626: mol_type = genomic DNA
gctgaaggctcggttcatgccgtgcccccgggcagttctggtgaggctaagcaagaggcctctgcatcttgacacctaggagagcagggacggagtctcccagggtggaggaccatgctgcgccgcaagccctccaatgccagtgagaaggagcccactcagaagaaaaagctctcccttcagcgctccagcagcttcaaggattttgccaaatccaaacccagctcccccgtggtgagcgagaaggagtttaatctggatgataacattccagaagatgactcaggtgtccccaccccagaagatgctgggaagagtggcaaaaagctggggaagaagtggagggcagtgatttcccgaaccatgaacaggaagatgggcaagatgatggtgaaggccctgtcagaagagatggcagacactctggaggagggctctgcctccccgacatctccagactacagcctggacagccctggccctgagaagatggcgctggccttttctgagcaagaggagcatgaacttccggtgctcagccgccaggcatcaacaggcagtgagctctgcagccccagcccaggttctggcagcttcggggaggaaccacctgccccccagtacacagggcctttctgtggccgggcacgagtccacaccgacttcactcccagcccctatgaccacgactcgctgaaactgcagaaaggagatgtgatccagatcattgaaaagccacctgtgggcacgtggctgggcctactcaatggcaaggtgggctctttcaaattcatctatgtggatgtgctgcccgaggaggccgtggggcatgcccgccccagccgccgacagagcaagggcaagaggcccaagcctaagaccctgcatgagctgctggagcgcatcggcctggaggagcacacatccaccctcctgctcaatggctaccagacactggaagacttcaaagagctgcgagaaacacacctcaatgagctgaacatcatggatccacagcaccgggccaagctgctcacggccgccgagctgctgctggactatgacactggcagtgaggaggctgaagagggcgccgagagcagccaggagccagtggcacacacagtgtcggaacccaaggtggacatcccgcgcgactcaggctgctttgagggctcggagagcgggcgcgatgacgcagagctggcaggcactgaggagcagctgcaaggcctctccctggccggggcaccttgaggtggcggtggcaataggccaaggctgggacccagctgcaaaggctgtaggagtgggcccagcctcccgtggtggcccaggtcctgaggactggcactgagcctggccctgcttccccagggacacttagggccacagaggccaggccagggccctacaggttccaggctcagctggagtggttggggagtcgcccaagggcacatcccacctgcctgagccccgccctccaccagcgactgacagcgcagcccctcctggcaccaactgctcccctgccatggccacggccacagcaagtggggcactgggaaaccctgcccatgtccctcaccaacaaggcctccaaatcctcctcacccccacaccacctacccctgtcgcactgctcctgaaaagggggccaagtcaatgtttcaggtcagtctaaaaaccctagggaagctggccatttaaaagaacccaaactgaccatgggtaaatccagttcccctaaataaggcctgaagaaatccacaggtaccattcccactttccttctccctagctttcttagaggtttggccactaaatcttatgagacttgaaccaagtggcttcctctttctaggcttaggacgggttggggttagaaagggtgatcactgaaggccttgcctgctctgacattctgtgacattaaatgtctattctcctgttacctgtggcctgggacaccagtggggtttatcgaggggaccagaggggcctcaggctttcagatgaaatggctcctcctactcacccactttattcctctccatgtaattcaggacaagctgcaacttcccccagcttaacacaatgcccatacctcatacgatatgcgccctcccgttccatccctggccccctcaaacgagacttctcacaaggctgattacagatggtcaaacctggcttccaaggacagaattgcctctcggaagccagctgtggatctgagtccagagttggccacttgtgtgggtcctcacaagcaaagagagcactaaacttgacattgggggtccaccactccaactttgctttctgaaggttttggtgtacattgagccccagaaggaaaggagagtatctgtgagtgggggcctcccttgaccccagtacgaagtctatgccctgaatccccagagtagcccttcctggtgcccaactggcctggggacaaacagcgtccactacatctaggactgccggctaagtggacacacttcttgacctcctaccaggaactttggtaaaagctagctttggggaaggggttgggtgtaaatatgagagggtggagggagaccagctggtagcaataaacatgggtagaactaaa

SEQ ID NO: 1396 - DNA, 2680 bp, Homo sapiens
  source 1..2680: mol_type = genomic DNA
cctgctcctgcaccggtctgcatctcccagcagaaggcgcagccatgaatccgttattcggccccaacctcttcctcctgcagcaggagcagcagggcctggccgggccactgggggactcactgggaggcgaccacttcgccgggggaggagacttgcccccggcgcctctctcgccggccggccctgctgcctactcgccgcccgggccgggcccggccccgcctgccgccatggccctccgcaatgacctgggctccaacatcaacgtgctcaagaccctgaacctccggttccgctgcttcctggccaaggtgcatgagctggagcgccggaaccggctgttggagaagcaactgcagcaagcgctggaggagggtaagcagggccggcggggcctgggtcgtcgcgaccaggcagtgcagaccggcttcgtcagccccatccggcccctggggctgcagctgggcgcccggccggccgctgtctgcagcccttcggcgcgcgtgctgggctcgcccgcgcgctccccggccggccccctcgcgccctccgcggccagcctctcgtcgtcctccacctccacctccaccacctattcctcgtcggcccgcttcatgcccggcaccatctggtcgttctcgcacgcccgccggctcgggccgggactggagcccactctggtgcaagggcctggcttgtcgtgggtgcacccggatggggtgggcgtccagatcgacaccatcacgcccgagatccgcgctctctacaacgtgctggccaaagtgaagcgggagcgggacgagtacaagcggaggtgggaagaggagtacacggtgcggatccagctgcaagaccgtgtaaatgagctccaggaggaagcccaggaggctgatgcctgccaggaggagctggcactgaaggtggaacagttgaaggctgagctggtggtcttcaaggggctcatgagtaacaacctgtcggagctggacaccaagatccaggagaaagccatgaaggtggatatggacatctgccgccgcatcgacatcaccgccaagctctgcgatgtggctcagcagcgcaactgcgaggacatgatccagatgttccagaagaagctggtcccatccatgggggggcggaagcgggagcgcaaggctgccgtcgaggaggacacctccctgtcggagagtgaggggccccgccagcccgatggggatgaggaggagagcacagccctcagcatcaacgaggagatgcagcgcatgctcaaccagctgagggagtatgattttgaggacgactgtgacagcctgacttgggaggagactgaggagaccctgctgctttgggaggatttctcaggctatgccatggcagctgcagaggcccagggagagcagcaggaagatagcctggagaaggtgattaaagatacggagtccctgttcaaaacccgggagaaggagtatcaggagaccattgaccagatagagctggagttggccacggccaagaacgacatgaaccggcacctgcacgagtacatggagatgtgcagcatgaagcgcggcctggacgtgcagatggagacctgccgccggctcatcacccagtctggagaccgaaagtctcctgctttcactgcggtcccgcttagcgacccgccgccgccgccaagcgaggctgaggactccgatcgcgatgtctcatctgacagctccatgagatagagacctgcctcccccttgcacccgaggccctcgcagcagggagctcagcgaggcagagggtggggctgcacagaggggaacatcagctgcagctctgcaccaggccggtccctggggactggggcgctcctccctcaggctttctccctcagtcttggcttctccagggctctggggtgtctggagctaggcttggccctaccattctggggccatttccaccacagttggggctctcctgccttcacgcgtgggtgtctgctacttccccatctttaaaatgctgccagagcgattgcggcccctcaccttgtccacgtatcaggaatgtgaatgtgggacctttcctccatccctgttgtccggagccagctcactgtcttccacactggtgctaactggcccaggcactggagtggaatagaatgcagctggaggctacgcatggcctctgcagcacacgcagctggagagggcttctgtccctgtcagcggcagagggcgttggggctggccggggcaccttgtccctgctatggtccacgtgctcacgctgtccacctgccaggtggagtgtatgtggctgtggccctccctcgtggaggtgccgtgctttaaagaggccttagtgcccgggatgggcacagtgttttgaagggaggtgggagctcttgctctcctggtcactgcagaatgacagagaaggtgaagctccatgcatgtgtgcgcgggtgtatgtgcgctcagggtctctgtttaagtatcagctaaagatgtgcttcctccgtgtctgtcatacactgagaccaacaggctacagtgtccctgattcttggaaaagcctggagaagctggggagatgcggttcacaatgcctcggtataggaggctgtgttgagctgacattcaaatggattctttaataataatgaaactggcgagta

SEQ ID NO: 1397 - DNA, 2264 bp, Homo sapiens
  source 1..2264: mol_type = genomic DNA
gatggaatagcattgacccagtttacaaagccatctgaagtgcctgagttgtatttgaagggtttcaccatgttggccaggctggtctcaaactcctgacctcaagtgatctgcccacctcagcctcccaaagtgttgggattacaggcgtgagccaccacacccagccaagagatacttcttgaatagttttattctgtatctacttgaaatataagtgaactttttgtttatttggaatgcttttcttggcaatcccacagagtattgatgaggaaactgaagtttggagcgatcacatcattttcccaagaattcctagaggacctgtgcaacaacctcttgaggatcgaatcttcactcccgctgtctcagcagtctacagcacggtaacacaagtggcaagacagccgggaacccctaccccatccccttattcagcacatgaaataaacaaggggcatccaaatcttgcggcaacgcccccgggacatgcatcgtcccctggactctctcaaaccccttatccctctggacagaatgcaggtccaaccacgctggtataccctcaaacccctcagacaatgaattcacaacctcaaacccgttctccgtttgcagcggggcctcgacctccccatcatcagtttttccagaggcctcaaatacagcctcctagagctaccatcccgaacagcagtccttccattcgtcctggtgcacagacacccactgcagtgtaccaggctaatcagcacatcatgatggttaaccatctgcccatgccgtacccagtgccccaggggcctcagtactgtataccacagtaccgtcatagtggccctccttatgttgggcccccccaacaatatccagttcaaccaccggggccaggtcctttttatcctggaccaggacctggggacttccccaatgcttatggaacgcctttttacccaagtcagccggtgtatcagtcagcacctatcatagtgcctacgcagcaacagccgcctccagccaagagagagaaaaaaactataagaattcgggatccaaaccagggaggtaaagacataacagaggagattatgtctggaggtggcagcagaaatcctactccacccataggaagacccacgtccacacctactcctcctcagcagctgcccagccaggtccccgagcacagccctgtggtttatgggactgtggagagcgctcatcttgctgccagcacccctgtcactgcagctagcgaccagaagcaagaggagaagccaaaaccagatccagtgttaaagtctccttccccagtccttaggctagtcctcagtggagagaagaaagaacaagaaggccagacatctgaaactactgcaatagtatccatagcagagcttcctctgcctccatcacctaccactgtttcttctgttgctcgaagtacaattgcagcccccacctcttctgctcttagtagccaaccaatattcaccactgctatagatgacagatgtgaactctcatccccaagagaagacacaattcctatacccagcctcacatcttgcacagaaacatcagaccctttaccaacaaatgaaaatgatgatgatatatgcaagaaaccctgtagtgtagcacctaatgatattccactggtttctagtactaacctaattaatgaaataaatggagttagcgaaaaattatcagccacggagagcattgtggaaatagtaaaacaggaagtattgccattgactcttgaattggagattctcgaaaatcccccagaagaaatgaaactggagtgtatcccagctcccatcaccccttccacagttccttcctttcctccaactcctccaactcctccagcttctcctcctcacactccagtcattgttcctgctgctgccactactgttagttctccgagtgctgccatcacagtccagagagtcctagaggaggacgagagcataagaacttgccttagtgaagatgcaaaagagattcagaacaaaatagaggtagaagcagatgggcaaacagaagagattttggattctcaaaacttaaattcaagaaggagccctgtcccagaaacatcgaatgaatgctgaaattcctagtctggtttcttcagtggtgtgtttgtgttttagtacaacctgcaaaagagttactccattgtctaaaaatgcaaatgagaatttccaaatatacaaaatgcctccaaggtatatgtcacgaaa

SEQ ID NO: 1398 - DNA, 2437 bp, Homo sapiens
  source 1..2437: mol_type = genomic DNA
gccttctggcagtttctgggagctgcgaacgcgccgccccggggctcggcggccggaaacgctggcttcggagccttaggcgccgcggcctttccttgttttccgcccagtccacgccgccatggccaagtggggccaggggaacccccactggatcgtggaggagcgggaggacgggaccaacgtgaacaactggcgctggcgcggctggcggcggcctccttccgggatctggggagggccgggccgcgggagccggggctgccctggggtctgtgcggggccgcggggccagggggtcagggggccgccccccctcagctgctggacgcagggctcggccttcgcctctcggctcgggagagtccttgagtacggagaccggctaggagggttgcagctgcctctttttgaaagttgggttgggccccaagagtgacttccgacagacctttccactcccaccgtctgtggcctgagggccttcccttctcctcccgcccacccctctggatgtttcggggagttagaagggagctggattgagagactgtgttaggggcgggggtatggaacgtagtggaaagggcagaaatttggatctcagttcgcgcccaccccgcaggcgcctcccgcgagccgggccctctgtgagtgagacaagctccccttcctttacgcgcctcacctggcgcgtggggagaggtcggcagccctccgccgcagaacctccggaagggatgtcctctgccctgcgcctctggccggggctgtggtccctccaggccgtcgaggggatgctgaggccggtccccagaggagcatgacttggctggtccggaggagctctgagggcatgggcaatcttggctcgctgcaacctcagcttccagagttcaagcgagtctcctgcttcagcctcatgagtagctgggactacagatgcgtgccactacgtccgtctgatgacagagcgggatgccaccagcttgtccaaagggaagttccaggagctcctggtgggcatcgttgtggagaatgacgctggccgcggcgagatcaacgagttgaagcaggtggaaggggaggcttcgtgcagcagccgcaaaggaaagctgattttcttctatgagtggaacatcaaactgggctggaaaggcatcgttaaagaatctggagtgaagcacaagggattgattgaaatacccaatctttctgaggaaaatgaagtagatgacactgagaatttacaacgggaatgattttaccaacgaaagctatggcaacccaggaattgactgtcaaaagaaaactgagtgggaataccctgcaggttcaggcctcatctccagtggcactgggtgtaaggattcccactgtggctcttcacatgatggaactgtttgacacaactgtagagcagctgtatagcatcttcactgtaaaggagttaacaaataagaagatcatcatgaaatggagatgtgggaactggccagaagaacactatgccatggttgcactgaattttgtgcctactctagggcaaacagaattacaattgaaggagttcctatctatctgtaaagaagagaacatgaaattctgttggcagaagcagcattttgaagaaataaaaggttcactgcagctgacccccctaaatggttgaattaaaatttattataaggcattactttttgtaagcggaaaaagtgtcacatttacctcttccctatcttttgtttaaaaggactgtctttattttatattggatgaaatctatgaacatatatacaatgtaaagcattgtttgactctttattataactagacactgcattgatttaaaagtagcaaacaacctgaaattaagtattaacctgaccttccatcgatattcctctggaaataggtaagtcctgagtgcagatagttgatgtttcccaagctgaagcttgtcctatagcaagcttgcttgcagctgtacttttagttcaagatgacaaaaaataaatggcatgttgacactattcctttattttactttagggtttttaaggtgtgtagatcttaggtcgtaaaacagtggtatattgcattcaaaagcatgttgaggtgagggcaaattggctgtgttttgctccacatctccctgcacatctccctgctgtggttttgcacttcggtgtggagaggattgagaagtctgtggggacacattagttctgtggactgctggtaacacttccagtgaaacagcatataatggataaatgtttcccccctctttcacggttttctcactactttcacctgagaagactgaagcaacgtatgtaaacaaatgaaaagtcatcacaatcagtttaattaagtgcacagaatagcaatcaatcaatcagtcatgtcaataaaaataaaacaattattttta

SEQ ID NO: 1399 - DNA, 2617 bp, Homo sapiens
  source 1..2617: mol_type = genomic DNA
cggttcccgtagccttagctctcggccccgggccctttttcctcctcggctgcgccgcgtgtcctcggagcgcggtccctgtattggtctcctgctcctagaggttgagaacaaaaacatgcacctggagtttccccggagccctctgcgtggttgagcttcggtggaatttcggggctcttggctgccagccgcgcttgcctggtagcaacagaaaccagtcctgctcgcctccgtggacatttcattaccatccagaagtgtctcccactgaaggcatccgtggttgtttttaagccacaaaaaagccacacccaagatcacctgacacccaccctgacaagtgtccatgatgctgggccctgagggaggtgaaggctttgtggtcaagctccgtggcctgccctggtcctgctctgttgaggacgtgcagaacttcctctctgactgcacgattcatgatggggccgcaggtgtccatttcatctacactagagagggcaggcagagtggtgaggcttttgttgaacttggatcagaagatgatgtaaaaatggccctgaaaaaagacagggaaagcatgggacaccggtacattgaggtgttcaagtcccacagaaccgagatggattgggtgttgaagcacagtggtcccaacagtgccgacagcgccaacgatggcttcgtgcggcttcgaggactcccatttggatgcacaaaggaagaaattgttcagttcttctcagggttggaaattgtgccaaacgggatcacattgcctgtggaccccgaaggcaagattacaggggaagcgttcgtgcagtttgcctcgcaggagttagctgagaaggctctagggaaacacaaggagaggatagggcacaggtacattgaggtgtttaagagcagccaggaggaagttaggtcatactcagatccccctctgaagttcatgtccgtgcagcggccagggccctatgaccggcccgggactgccaggaggtacattggcatcgtgaagcaggcaggcctggaaaggatgaggcctggtgcctacagcacaggctacgggggctacgaggagtacagtggcctcagtgatggctacggcttcaccaccgacctgttcgggagagacctcagctactgtctctccggaatgtatgaccacagatacggcgacagtgagttcacagtgcagagcaccacaggccactgtgtccacatgaggggcctgccgtacaaagcgaccgagaacgacatttacaacttcttctctcctctcaaccctgtgagagtccatattgagattggcccagatggaagagtgacgggtgaagcagatgttgagtttgctactcatgaagaagctgtggcagctatgtccaaagacagggccaatatgcagcacagatatatagaactcttcttgaattcaacaacaggggccagcaatggggcgtatagcagccaggtgatgcaaggcatgggggtgtctgctgcccaggccacttacagtggcctggagagccagtcagtgagtggctgttacggggccggctacagtgggcagaacagcatgggtggctatgactagttttgttaggaacatttgagttacttcaatcattttcacaggcagccaacaagcaattaagagcagttataatagaggaagctgggggacccattttgcaccatgagtttgtgaaaaatctggattaaaaaattacctcttcagtgttttctcatgcaaaattttcttctagcatgtgataatgagtaaactaaaactattttcagcttttctcaattaacattttggtagtatacttcagagtgatgttatctaagtttaagtagtttaagtatgttaaatgtggatcttttacaccacatcacagtgaacacactggggagacgtgcttttttggaaaactcaaaggtgctagctccctgattcaaagaaatatttctcatgtttgttcattctagtttatattttcatttaaaatcctttaggttaagtttaagctttttaaaagttagttttgagaattgagacacaatactaatactgtaggaattggtgaggccttgacttaaaactttctttgtactgtgatttccttttgggtgtattttgctaagtgaaacttgttaaattttttgttaactaaatttttttcttaaaataaagactttttcacaatgactggcacagattactcagcaaaagatagcaaaacgggtggttgaagataattcattttaatcgtaatgtattttagtgtgaatttaaaaatttcatacatcaaatctatgatctcccttatattcttatgatgaggctaaataaaagtctaataaaaatgttaaatatgtgaatggtggaaatggtgactagcagcacacattctgggaagcatcaaatagacacacggccccagccacctgcaacttatgtgcactgttgtaaaccattcagaattttcctgctaggcccttgatgctggagtcacatctgttgatagctggagaactttagtttcaagtactacattgtgaaagcaattattttgtttctagtttttataaaatgctgatttaaactttt

SEQ ID NO: 1400 - DNA, 1555 bp, Homo sapiens
  source 1..1555: mol_type = genomic DNA
acaagatggcggcgctgcgggacggctagcggccctgcgtgggagttcctgacagctggattctagaagtagaactatgagctcacctttggcctcccttagcaagacccgaaaagtgcccctgccctcggagcctatgaatcctgggaggcgaggaatccgcatctatggagatgtccctgcatcccatgactcggagctgatggccttcatgacgaggaagttgtgggacctggagcagcaggtgaaggcccagactgatgagatactgtccaaggatcagaagatagcggccctagaggacctggtgcagaccctccggccacacccagccgaggcaaccctgcagcggcaggaggaactggagacgatgtgtgtgcagctgcagcggcaggtcagggagatggagcggttcctcagtgactatggcctgcagtgggtgggcgagcccatggaccaggaggactcagagagcaagacagtctcagagcatggcgagagggactggatgacagccaagaagttctggaagccaggggactcattggcgccccctgaggtggactttgacaggctgctggccagcctgcaggatcttagtgagctggtggtagagggtgacacccaagtgacaccagtgcccggcggggcacggctgcgtaccctcgagcccatcccgctgaagctctaccggaatggcatcatgatgttcgacgggcccttccagcccttctacgatccctccacacagcgctgcctccgagacatattggatggcttctttccctcagagctccagcgactgtaccccaatggggtcccctttaaggtgagtgacttgcgcaatcaggtctacctggaggatggactggaccccttcccaggcgagggccgtgtggtgggcaggcagctgatgcacaaggccttggacagggtggaggagcacccaggctccaggatgactgctgagaaatttctgaacaggctccccaagtttgtgatccggcaaggcgaggtgattgacatccggggccccatcagggacaccttgcagaactgctgcccattgcctgcccggatccaggagattgtggtggagacgcccaccttggccgctgagcgagagaggagccaggagtcacccaacacgccggcacccccgctctccatgctgcgcatcaagtctgagaatggggaacaggccttcctactgatgatgcagcctgacaacaccattggggacgtgcgagctctgctagcgcaggccagggtcatggatgcctctgcctttgagatcttcagcacattcccgcccaccctctaccaggacgatacactcacgctgcaggctgcaggccttgtgcccaaagcagcactgctgctgcgggcacgccgagccccgaagtccagcctgaaattcagtcctggtccctgtcccggtcccggtcccggccccagtcccggtcccggtcccggccccagtcccggtcccggtcccggccccagtccctgtcctggacccagtcccagcccccaataaagcacccgccccctc

SEQ ID NO: 1401 - DNA, 1662 bp, Homo sapiens
  source 1..1662: mol_type = genomic DNA
gctgcgggctccgcgcgcgcgggccatgtccgctttctgcctgggcttggtcggccgcgcttcagcacccgccgagccggacagcgcctgctgcatggagctgcccgccgcggccggggacgcagtccggagtcccgccgccgccgccgccctcatcttccccgggggctccggggagctagaactggcgttagaggaggagctggcgctgctggcggccggggagcggccgtccgaccccggggaacaccctcaggccgagctgctgtcggtgatccgacagaaggagaaggatctggtgttggcggcccggctgggtaaggcgctgctcgagaggaaccaggacatgagccggcagtacgagcagatgcataaggagctgacagacaagctcgagcacttagagcaagagaaacatgaattgagaagacgatttgagaaccgagaaggggagtgggaaggccgagtgtcagagctggagagtgatgtgaagcagctacaggatgagttggagaggcagcagattcatctgcgggaagcagatcgagaaaaatcacgggctgtccaggaactgtcggaacagaaccaaaggctattggatcagctcagcagggcatcagaagttgagagacaactctccatgcaggtccacgccctcagagaagactttcgggagaaaaactcatcaaccaaccagcacattatccggctggagagccttcaggccgagatcaagatgctgtcagatcggaaacgggagctggagcatcgtctcagcgctactttagaggaaaatgacctgctccaagggaccgtggaggagctacaggaccgggtgctaatcctggagaggcagggccatgacaaggacctacagctgcaccaaagccagctggagcttcaggaggtgcgtctctcctgccgacagctgcaggtgaaggtggaagaactcactgaggagaggagtctgcagagctctgccgccaccagcacatccctcctgtcagagatcgagcagagcatggaggctgaggagctggagcaggagcgagagcagctgagactgcagctctgggaagcctactgccaggttcgctatctgtgctcacaccttcgaggcaatgacagtgctgactcagccgtctccacggactcctccatggacgagtcttcagaaacctcgtccgccaaggatgtgccagccggcagcttgcgcactgccctcaatgagctcaagagactgatacagagcattgtggatggcatggagcccacgggctcccggagacttgatgatgactccttagaagaacagataaggcagaccagtgaggactcgagagccctaagggagctcatggagggagagagggggaggctgccggaagcctccagatgctgcctgcctgcctgctcacaaccgattcagtctccctccctccctcacgtggggaaagcacagcagggatgcgcggcaagaatgtacctgtagatgtgtacataccacagtgctgtaattttgtatgtagcaatcatgtaaatacatgtatggattttataatatacatatataaaaatctataaaggcatatttttagaaaaacagcacaccactgcttcttttgaaaatagtctgaataagaataaaatgaatttctacag

SEQ ID NO: 1402 - DNA, 1428 bp, Homo sapiens
  source 1..1428: mol_type = genomic DNA
atgacacgtggcaccgggggaactgcccagcgtggaaggtctgggccagattctcaggggctgctagattcatccctgatggcatcaggcactgccagccgctcagaggatgaggagtcactggcagggcagaagcgagcctcctcccaggccttgggcaccatccctaaacggagaagctcctccaggttcatcaagaggaagaagttcgatgatgagctggtggagagcagcctggcaaaatcttctacccgggcaaagggggccagtggggtggaaccagggcgctgttcggggagtgaaccctcctccagtgagaagaagaaggtatccaaagcccccagcactcctgtgccacccagcccagccccagcccctggactcaccaagcgtgtgaagaagagtaaacagccacttcaggtgaccaaggatctgggccgctggaagcctgcagatgacctcctgctcataaatgctgtgttgcagaccaacgacctgacctccgtccacctgggcgtgaaattcagctgccgcttcacccttcgggaggtccaggagcgttggtacgccctgctctacgatcctgtcatctccaagttggcctgtcaggccatgaggcagctgcacccagaggctattgcagccatccagagcaaggccctgtttagcaaggctgaggagcagctgctgagcaaagtgggatcgaccagccagcccaccttggagaccttccaggacctgctgcacagacaccctgatgccttctacctggcccgtaccgcgaaggccctgcaggcccactggcagctcatgaagcagtattacctgctggaggaccagacagtgcagccgctgcccaaaggggaccaagtgctgaacttctctgatgcagaggacctgattgatgacagtaagctcaaggacatgcgagatgaggtcctggaacatgagctgatggtggctgaccggcgccagaagcgagagattcggcagctggaacaggaactgcataagtggcaggtgctagtggacagcatcacaggcatgagctctccggacttcgacaaccagacactggcagtgctgcggggccgcatggtgcggtacctgatgcgctcgcgtgagatcaccctgggcagagcaaccaaggataaccagattgatgtggacctgtctctggagggtccggcctggaagatatcccggaaacaaggtgtcatcaagctgaagaacaacggtgatttcttcattgccaatgagggtcgacggcccatctacatcgatggacggccggtgctctgtggctccaaatggcgcctcagcaacaactctgtggtggagatcgccagcctgcgattcgtcttccttatcaaccaggacctcattgccctcatcagggctgaggctgccaagatcacaccacagtga

SEQ ID NO: 1403 - DNA, 2437 bp, Homo sapiens
  source 1..2437: mol_type = genomic DNA
ctgagcgggtgcgcgggcaacttccggtgtgggtgacgagtggtggccgaagcagggggacagcaagggacgctcaggcggggaccatggcggacggcggctcggagcgggctgacgggcgcatcgtcaagatggaggtggactacagcgccacggtggatcagcgcctacccgagtgtgcgaagctagccaaggcttccgatatggtatcgacatcccgtatcttagttgcagtagtgaagatgtgctatgaggctaaagaatgggatttacttaatgaaaatattatgcttttgtccaaaaggcggagtcagttaaaacaagctgttgccaaaatggttcaacagtgctgtacttatgttgaggaaatcacagaccttcctatcaaacttcgattaattgatactctacgaatggttaccgaaggcaagatttatgttgaaattgagcgtgcgcgactgactaaaacattagcaactataaaagaacaaaatggtgatgtgaaagaggcagcctccattttacaggagttacaggtggaaacctacgggtcaatggaaaagaaagagcgagtggaatttattttggagcaaatgaggctctgcctagctgtgaaggattacattcgaacacaaatcatcagcaagaaaattaacaccaaatttttccaggaagaaaatacagagaaattaaagttgaagtactataatttaatgattcagctggatcaacatgagggatcctatttgtctatttgtaagcactacagagcaatatatgatactccctgtatacaggcagaaagtgaaaaatggcagcaggctctgaagagtgttgtactctatgttatcctggctccttttgacaatgaacagtcagatttggttcaccgaataagtggtgacaagaagttagaagaaattcccaaatacaaggatcttttaaagctttttaccacaatggagttgatgcgttggtccacacttgttgaggactatggaatggaattaagaaaaggttcccttgagagtcctgcaacggatgtttttggttctacagaggaaggtgaaaaaaggtggaaagacttgaagaacagagttgttgaacataatattagaataatggccaagtattatactcggataacaatgaaaaggatggcacagcttctggatctatctgttgatgagtccgaagcctttctctcaaatctagtagttaacaagaccatctttgctaaagtagacagattagcaggaattatcaacttccagagacccaaggatccaaataatttattaaatgactggtctcagaaactgaactcattaatgtctctggttaacaaaactacgcatctcatagccaaagaggagatgatacataatctacaataagggtcttagtgctttagaaaaaagttaaaattggaagtcattaaaaaaagactgttataatggtgtatatgttggggttttttttctaagcttctttgtcttaaattttaaaatagtgaatatgtttgagactccctttgacctttcagttccccaagttcattgttaactttgcatttgcaattggtgcaaaaatacagatttctgtcgtctgaatacacaaaaagttgtgtcataacttacccagatatgtttttctatcatttgaaacctttttagctactgtttgttttcattcaactaacaaacatattccaataataaaagcagtatatacatatttcctttctacagttacctctgattctcaacattttgtggggtagtgatttggcaagtgttttttaaataaaacaaatctcattgtaaagctatcagtcatttagtagaatagaaaagcaacatagagcatacaagaacatttgggatagagttgtgatttgtgaagaatttgtactttgatattgtggcggaaagtctagactgagtgtgtatgctggtaaactgtagacttttttttttttttttttgagtccggctggttccaatcacagtagcttgattgctttcagccctcatcctctcacttgatcagttgttcaacagaatcagctgacataattgacacagtttattgggtgttaagtccgctctatagggatagtgactactttttttttttttttttttttgctcttcttcctctcccctttctttatatgggtttaaatttaacataaagttgtttttataaggcttatttgtggctttaacttgtaagtctgattacatcattattgttccaaattcattatctctgtaggaacttttagttccattatatgaacactggataacctaattttttttaatgctttaaaaaaatggcaaaaagacgtcaggccaccctcatagtaagtggtgtagtattaaaatattttcacggaattaaaagtagcttgctgtcaaagaaacacctg

SEQ ID NO: 1404 - DNA, 1999 bp, Homo sapiens
  source 1..1999: mol_type = genomic DNA
agcgcgagccccgccgccgccgagcatggacgaccccgactgcgactccacctgggaggaggacgaggaggatgcggaggacgcggaggacgaggactgcgaggacggcgaggccgccggcgcgagggacgcggacgcaggggacgaggacgaggagtcggaggagccgcgggcggcgcggcccagctcgttccagtccagaatgacagggtccagaaactggcgagccacgagggacatgtgtaggtatcggcacaactatccggatctggtggaacgagactgcaatggggacacgccaaacctgagtttctacagaaatgagatccgcttcctgcccaacggctgtttcattgaggacattcttcagaactggacggacaactatgacctccttgaggacaatcactcctacatccagtggctgtttcctctgcgagaaccaggagtgaactggcatgccaagcccctcacgctcagggaggtcgaggtgtttaaaagctcccaggagatccaggagcggcttgtccgggcctacgagctcatgctgggcttctacgggatccggctggaggaccgaggcacgggcacggtgggccgagcacagaactaccagaagcgcttccagaacctgaactggcgcagccacaacaacctccgcatcacacgcatcctcaagtcgctgggtgagctgggcctcgagcacttccaggcgccgctggtccgcttcttcctggaggagacgctggtgcggcgggagctgccgggggtgcggcagagtgccctggactacttcatgttcgccgtgcgctgccgacaccagcgccgccagctggtgcacttcgcctgggagcacttccggccccgctgcaagttcgtctgggggccccaagacaagctgcggaggttcaagcccagctctctgccccatccgctcgagggctccaggaaggtggaggaggaaggaagccccggggaccccgaccacgaggccagcacccagggtcggacctgtgggccagagcatagcaagggtgggggcagggtggacgaggggccccagccacggagcgtggagccccaggatgcgggacccctggagaggagccagggggatgaggcagggggccacggggaagataggccggagcccttaagccccaaagagagcaagaagaggaagctggagctgagccggcgggagcagccgcccacagagccaggccctcagagtgcctcagaggtggagaagatcgctctgaatttggaggggtgtgccctcagccagggcagcctcaggacggggacccaggaagtgggcggtcaggaccctggggaggcagtgcagccctgccgccaacccctgggagccagggtggccgacaaggtgaggaagcggaggaaggtggatgagggtgctggggacagtgctgcggtggccagtggtggtgcccagaccttggcccttgccgggtcccctgccccatcggggcaccccaaggctggacacagtgagaacggggttgaggaggacacagaaggtcgaacggggcccaaagaaggtacccctgggagcccatcggagaccccaggccccagcccagcaggacctgcaggggacgagccagccgagagcccatcggagaccccaggcccccgcccggcaggacctgcaggggacgagccagccgagagcccatcggagaccccaggccccagcccggcaggacctacaagggatgagccagccgagagcccatcggagaccccaggcccccgcccggcaggacctgcaggggacgagccagccgagagcccatcggagaccccaggcccccgcccggcaggacctgcaggggacgagccagccgagagcccatcggagaccccaggccccagcccggcaggacctacaagggatgagccagccaaggcgggggaggcagcagagttgcaggacgcagaggtggagtcttctgccaagtctgggaagccttaa

SEQ ID NO: 1405 - DNA, 1705 bp, Homo sapiens
  source 1..1705: mol_type = genomic DNA
agaggcagagacacacgcggagaggaggagaggctgagggagggaggtggagaaggacgggagaggcagagagaggagacacgcagagacactcaggaggggagagacaccgagacgcagagacactcaggaggggagagacaccgagacgcagagacacccaggccggggagcgcgccctcccctcggcgggcacggtatttttatccgtgcgcgaacagccctcctcctcctctcgccgcacagcccgccgcctgcgcgggggagcccagcacagaccgccgccgggaccccgagtcgcgcaccccagccccaccgcccaccccgcgcgccatggaccccaaggaccgcaagaagatccagttctcggtgcccgcgccccctagccagctcgacccccgccaggtggagatgatccggcgcaggagaccaacgcctgccatgctgttccggctctcagagcactcctcaccagaggaggaagcctccccccaccagagagcctcaggagaggggcaccatctcaagtcgaagagacccaacccctgtgcctacacaccaccttcgctgaaagctgtgcagcgcattgctgagtctcacctgcagtctatcagcaatttgaatgagaaccaggcctcagaggaggaggatgagctgggggagcttcgggagctgggttatccaagagaggaagatgaggaggaagaggaggatgatgaagaagaggaagaagaagaggacagccaggctgaagtcctgaaggtcatcaggcagtctgctgggcaaaagacaacctgtggccagggtctggaagggccctgggagcgcccaccccctctggatgagtccgagagagatggaggctctgaggaccaagtggaagacccagcactaagtgagcctggggaggaacctcagcgcccttccccctctgagcctggcacataggcacccagcctgcatctcccaggaggaagtggaggggacatcgctgttccccagaaacccactctatcctcaccctgttttgtgctcttcccctcgcctgctagggctgcggcttctgacttctagaagactaaggctggtctgtgtttgcttgtttgcccacctttggctgatacccagagaacctgggcacttgctgcctgatgcccacccctgccagtcattcctccattcacccagcgggaggtgggatgtgagacagcccacattggaaaatccagaaaaccgggaacagggatttgcccttcacaattctactccccagatcctctcccctggacacaggagacccacagggcaggaccctaagatctggggaaaggaggtcctgagaaccttgaggtacccttagatccttttctacccactttcctatggaggattccaagtcaccacttctctcaccggcttctaccagggtccaggactaaggcgtttttctccatagcctcaacattttgggaatcttcccttaatcacccttgctcctcctgggtgcctggaagatggactggcagagacctctttgttgcgttttgtgctttgatgccaggaatgccgcctagtttatgtccccggtggggcacacagcggggggcgccaggttttccttgtcccccagctgctctgcccctttccccttcttccctgactccaggcctgaacccctcccgtgctgtaataaatctttgtaaat

SEQ ID NO: 1406 - DNA, 3338 bp, Homo sapiens
  source 1..3338: mol_type = genomic DNA
acttccggtgcttgccctgcccatccccgtggcgggggcgtggccatggcgggggcgctccggcgggggcgggccctgggctcccgcccttcgggtcccacagtttccagccgccgctctcctcagtgcccggtggcccaggagggcctgggagcccgaagccgtccccgagtcgctcctaggtcactggcgcgatgcgggccgtcctctcggctgatgggttggaagcccagcgaggctagaggccagtcccaaagtttccaggcatcagggctgcagcccaggagcctcaaggcggcccggcgggcgactggacggccggacaggtcccgagcagcccggcccaccatggacccctctgcccacaggtcccgagcagccccgcccaacatggacccagacccccaggcgggcgtgcaggtgggcatgcgggtggtgcgcggcgtggactggaagtggggccagcaggacggcggcgagggcggcgtgggcacggtggtggagcttggccgccacggcagcccctcgacacccgaccgcacagtggtcgtgcagtgggaccagggcacgcgcaccaactaccgcgccggctaccagggcgcgcacgacctgctgctgtacgacaacgcccagatcggcgtccggcaccccaacatcatctgtgactgctgcaagaagcacgggctgcgggggatgcgctggaagtgccgtgtgtgcctggactacgacctctgcacgcagtgctacatgcacaacaagcatgagctcgcccacgccttcgaccgctacgagaccgctcactcgcgccctgtcacactgagtccccgccagggcctcccgaggatcccactaaggggcatcttccagggagcgaaggtggtgcgaggccccgactgggagtggggctcacaggatggaggggaagggaaaccgggccgtgtggtggacatccgtggctgggatgtggagacaggccggagtgtggccagcgtgacgtgggctgatggtaccaccaatgtgtaccgtgtgggccacaagggcaaggtggacctcaagtgtgtgggcgaggcagcgggcggcttctactacaaggaccacctcccaaggctcggcaagccggcggagctgcagcgcagggtgagtgctgacagccagcccttccagcacggggacaaggtcaagtgtctgctggacactgatgtcctgcgggagatgcaggaaggccacggcggctggaaccccaggatggcggagtttatcggacagacgggcaccgtgcatcgtatcacggaccgcggggacgtgcgcgtgcagttcaaccacgagacgcgctggaccttccaccccggggcgctcaccaagcaccactccttctgggtgggcgacgtggtccgggtcatcggcgaccttgacacagtgaagcggctgcaggctgggcatggcgagtggacggacgacatggcccctgccctgggccgcgtcgggaaggtggtgaaagtgtttggagacgggaacctgcgtgtagcagtcgctggtcagcggtggaccttcagcccctcctgcctggtggcctaccggcccgaggaggatgccaacctggacgtggccgagcgcgcccgggagaacaaaagctcactgagcgtggccctggacaagcttcgggcccagaagagtgacccagagcacccgggaaggctggtggtggaggtggcgctgggtaacgcagcccgggctctggacctgctgcggaggcgcccagagcaggtggacaccaagaaccaaggcaggaccgctctgcaagtggctgcctacctgggccaggtggagttgatacggctgctgctacaagccagggcgggcgtggacctgccggacgacgagggcaacacggcactgcactacgcggccctggggaaccagcccgaggccaccagggtgctcctgagtgctgggtgccgggcggacgccatcaacagcacccagagcacagcactgcacgtggccgtgcagaggggcttcctggaggtggtgcgggccctgtgtgagcgcggctgtgacgtcaacctgcccgacgcccactcggacacgcccctgcactccgccatctcggcgggcactggagccagcggcattgtcgaggtcctcacggaggtgccaaacatcgatgttaccgccaccaacagccagggtttcaccctgctgcaccatgcctccctcaagggtcacgcgctagctgtgagaaagattctggctcgggcgcggcagctggtggacgccaagaaggaggacggcttcacggcgctgcatctggctgccctcaacaaccaccgcgaggtggcccagatcctcatccgggagggccgctgtgacgtgaacgtgcgcaaccggaagctgcagtccccgctgcatctcgccgtgcaacaggcccacgtggggctggtgccgctactggtggacgctgggtgcagtgtcaacgccgaggacgaggagggggacacagccctgcacgtggcgctgcagcgtcatcagctgctgcccctggtggctgatggggccgggggggacccagggcccttgcagctgctgtccaggctacaggcctcgggcctccccggcagcgcggagctgacggtgggcgcggcggtcgcctgcttcctggcgctggagggcgccgacgtgagctacaccaaccaccgcggtcggagcccgctggacctggccgccgagggtcgcgtgctcaaggcccttcagggctgcgcccagcgcttccgggagcggcaggcgggcgggggcgcggccccgggccccaggcaaacgctcgggacccccaacaccgtgacgaacctgcacgtgggcgccgcgccggggcccgaggccgctgagtgcctggtgtgctccgagctggcgctgctggtgctgttctcgccgtgccagcaccgcaccgtgtgtgaggagtgcgcgcgcaggatgaagaagtgcatcaggtgccaggtggtcgtcagcaagaaactgcgcccagacggctctgaggtggcgagcgccgcccccgcccccggcccgccgcgccagctggtggaggagctgcagagccgctaccggcagatggaggaacgcatcacctgccccatctgcatcgacagccacatccgcctcgtgttccagtgcggccacggcgcatgcgccccctgcggctccgcgctcagcgcctgccccatctgccgccagcccatccgcgaccgcatccagatcttcgtgtgagccgcgccgtccgccgcgcccgagctgccttcgcgtgcccccgccctgtgttttataaaaagaaagattctcggacgttg

SEQ ID NO: 1407 - DNA, 2191 bp, Homo sapiens
  source 1..2191: mol_type = genomic DNA
ggacgggggcccggtgggcccgcggaggaaagatactggggagtgggagccgcggggttcagagcgatgattcccccacaggaggcatccgctcgacggcgggagattgaggacaagctgaagcaggaggaggagactctgtccttcatccgagacagcctggagaagagcgaccagctcactaagaacatggtgtctatcttatcatcctttgagagccgccttatgaagctggagaactccatcatccctgtgcacaagcagacggagaatctgcagcggctgcaggagaatgttgagaagacgctgtcctgcctggaccatgtcatcagctactaccatgtggccagtgacactgagaagatcatcagagagggccccacaggtaggctggaagagtacctgggaagcatggccaagattcagaaggcagtggagtatttccaggacaacagcccagacagcccggaactcaacaaagtgaaactgctctttgagcgcgggaaggaggccctggagtccgaatttcgcagcctgatgacgcggcacagtaaggtcgtctcgcccgtgctcatcttggatctgatcagtggtgacgatgatctggaggcccaggaggacgtgaccctggagcacctgcccgagagcgtgctccaggatgtcattcgcatctcccgctggctggtggaatatggccgcaaccaagatttcatgaacgtctactaccagatacgctccagccagctggaccgctccatcaaaggactgaaggagcatttccataagagcagttcttcctctggggttccctactcccctgctatccccaacaagaggaaagacacacctaccaagaagccagtcaagcggccagggacgatccgtaaggctcagaaccttctgaaacagtattcccagcatggtctagatgggaaaaaggggggctctaacctcattcctctggaagggagagatgacatgctggacgtggagaccgatgcctacatccactgcgtcagtgccttcgtcaagctggcgcagagcgagtaccagctgctggccgacatcatccccgagcaccaccagaagaagaccttcgactccctgatacaggatgccctggatgggctgatgcttgaaggggagaacatcgtgtctgctgcccggaaggccattgtgcgacacgacttctccacggtgctcaccgtcttccccatcctgcgacacctcaagcagaccaagcctgagtttgaccaggtgctccagggcacggctgccagcacaaagaacaagctgcctggcctcatcacatccatggagaccatcggtgccaaagcgctggaggacttcgcagacaacatcaagaatgacccggacaaggagtacaacatgccgaaggacggcaccgtacacgagctcaccagcaatgccatcctcttcctgcagcagcttttggacttccaggagacggcaggcgccatgctggcctcccaagagaccagctcttcggccaccagctacagctctgagttcagcaagcggctgctaagcacctatatctgtaaagtgctgggcaacctgcagttgaacttgctgagcaagtccaaggtgtacgaggacccagctctgagcgccatcttcctgcacaacaactacaattacatcctcaagtccctggagaagtctgaactgatccagctggtggcagtgacacagaagactgctgagcgctcctaccgggagcacattgagcagcagatccagacctaccagcgcagctggttaaaggtgactgattacatcgcagagaagaatctacctgtgttccagccgggagtcaagctccgggacaaggagcggcagattatcaaggagcgttttaagggcttcaatgatggcctcgaagaactgtgcaaaatccagaaggcctgggctattccagacacagagcagagggacaggattcgccaggcccagaagaccattgtcaaggagacctacggggcctttctacagaagtttggcagcgtgcccttcaccaagaacccggagaagtacatcaagtacggggtggagcaggtgggcgacatgatcgatcgccttttcgacacctctgcctgagcctgctgctagccctgcctggttccaccagactggcgtgtcattggacagataaaccagtgttagcttg

SEQ ID NO: 1408 - DNA, 3991 bp, Homo sapiens
  source 1..3991: mol_type = genomic DNA
gtcgcggccttcgccgccgccaacggggctgtccctgtagctcccgatggagtttgaggtcgtgaaacctccgccgagctctgccccggcgagacgaggcgcctccgtcgccaagccgcgccgtcgcggggctcccgggagcggcccttagcgaccccgcccgggccccctcagcttacaaaacactacacagcaaaataatgatctgctagactgctaacccgagcatccagcttccacaatgcctgtgcaggcagctcaatggacagaatttctgtcctgtccaatctgctataatgaatttgatgagaatgtgcacaaacccatcagtttaggttgttcacacactgtttgcaagacctgcttgaataaacttcatcgaaaagcttgtccttttgaccagactgccatcaacacagatattgatgtacttcctgtcaacttcgcacttctccagttagttggagcccaggtaccagatcatcagtcaattaagttaagtaatctaggtgagaataaacactatgaggttgcaaagaaatgcgttgaggatttggcactctacttaaaaccactaagtggaggtaaaggtgtagctagcttgaaccagagtgcactgagccgtccaatgcaaaggaaactggtgacacttgtaaactgtcaactggtggaggaagaaggtcgtgtaagagccatgcgagcagctcgttcccttggagaaagaactgtaacagaactgatattacagcaccagaaccctcagcagttgtctgccaatctatgggccgctgtcagggctcgaggatgccagtttttagggccagctatgcaagaagaggccttgaagctggtgttactggcattagaagatggttctgccctctcaaggaaagttctggtactttttgttgtgcagagactagaaccaagatttcctcaggcatcaaaaacaagtattggtcatgttgtgcaactactgtatcgagcttcttgttttaaggttaccaaaagagatgaagactcttccctaatgcagctgaaggaggaatttcggagttatgaagcattacgcagagaacatgatgcccaaattgttcatattgccatggaagcaggactccgtatttcacctgaacagtggtcctctcttttgtatggtgatttggctcataaatcacacatgcagtctatcattgataagctacagtctccagagtcatttgcaaagagtgtccaggaattgacaattgttttgcaacgaacaggtgacccagctaacttaaatagactgaggcctcatttagagcttcttgcaaacatagaccctaatccagacgctgtttcaccaacttgggagcagctggaaaatgcaatggtagctgttaaaacagtagttcatggccttgtggacttcatacaaaattatagtagaaaaggccatgagacccctcagcctcagccaaacagcaaatacaagactagcatgtgccgagatttgcgacagcaagggggttgtccacgaggaacaaattgtacatttgcccattctcaggaagagcttgaaaagtatcgattaaggaacaaaaagatcaatgccactgtaagaacgtttcctcttctaaataaagttggtgtaaacaacactgtcacaaccacagccggaaatgtcatttctgtcataggaagtactgaaacaacagggaaaattgttccaagtacaaacggaatttcaaatgcagaaaacagtgtttcccagctaatctcacgtagtactgacagtaccttaagagctctggagaccgtgaagaaagtgggaaaggttggcgctaatggtcagaatgctgctgggccctctgcagattctgtaactgaaaataaaattggttctccacccaagactcctgtaagtaatgtagcagctacctcagctgggccctctaatgttggaacagagctgaattctgtgcctcaaaaatccagcccatttctaactagagtaccagtatatcctccgcattctgaaaacattcagtattttcaagatccaaggactcagataccctttgaagtcccacagtacccacagacaggatactatccaccacctccaacggtaccagctggtgtggctccctgtgttcctcgctttgtgaggtccaataacgttccagagtcctccctcccacctgcttccatgccatatgccgatcattacagtacattttcccctcgagatcgaatgaattcttctccttaccagcctcctcctccgcagccgtatggaccagttcctccagtaccttctggaatgtatgctcctgtgtacgacagcaggcgcatctggcgcccacctatgtaccaacgagatgacattattagaagcaattctttacctccaatggatgtgatgcactcatctgtctatcagacatctttgcgggaaagatataactcattagatggatattattcggtggcttgtcagccaccaagtgagccaaggacaactgtgcctttaccaagggaaccttgtggtcatttgaagaccagttgcgaggagcagataagaagaaagccagatcagtgggcacagtaccacactcagaaagcacctcttgtctcttcaactcttcctgtggcaacacagtcaccaacaccaccttctcctctgttcagtgtagactttcgtgcggatttctcagagagtgtgagtggtacaaaatttgaagaagatcatctttcccattattctccctggtcttgtggcaccataggctcctgtataaatgccattgattcagagcccaaagatgtcattgctaattcaaatgctgtgttaatggacctggacagtggtgatgttaagagaagagtacatttatttgaaacccagagaaggacaaaagaagaagatccaataattccctttagtgatggacccatcatctcaaaatggggtgcgatttccagatcttcccgtacaggttaccataccacagatcctgtccaggccactgcttcccaaggaagtgcgactaagcccatcagtgtatcagattatgtcccttatgtcaatgctgttgattcaaggtggagttcatatggcaacgaggccacatcatcagcacactatgttgaaagggacagattcattgttactgatttatctggtcatagaaagcattccagtactggggaccttttgagccttgaacttcagcaggccaagagcaactcattacttcttcagagagaggccaatgctttggccatgcaacagaagtggaattccctggatgaaggccgtcaccttaccttaaaccttttaagcaaggaaattgaactaagaaatggagagttacagagtgattatacagaagatgcaacagatactaaacctgatagggatatcgagttagagctttcagcacttgatactgatgaacctgatggacaaagtgaaccaattgaagagatcttggacatacagcttggtatcagttctcaaaatgatcagttgctaaatggaatggcagtggaaaatgggcatccagtacagcagcaccaaaaggagccaccaaagcagaagaaacagagtttaggtgaagaccatgtgattctggaggagcaaaaaacaattctgccggtaacttcttgctttagccagccactcccagtgtctattagcaatgcaagttgcctccccatcaccacatctgtcagtgctggcaacctcattctgaaaactcatgttatgtctgaagataaaaacgactttttaaaacctgttgcaaatgggaagatggttaacagctgaaaggaggttcatctttcaaatttgtgaccacaccatggaagcatttacactagctttttatatatataatatatattatataatgtatattttttttaaaaaaaagatattactgggggcatccatttcctgtggactctttgatacttcaagccctcttgcattagcattatg

SEQ ID NO: 1409 - DNA, 8695 bp, Homo sapiens
  source 1..8695: mol_type = genomic DNA
gctggcggagcccgggaggcggagaaggctgtcgttgccttggccgtcgcatccccgagggagtcgtgtcggcgccaccccggcccccgagcccgcagattgcccaccgaagctcgtgtgtgcacccccgatcccgccagccactcgcccctggcctcgcgggccgtgtctccggcatcatgtgtggtatatttgcttacttaaactaccatgttcctcgaacgagacgagaaatcctggagaccctaatcaaaggccttcagagactggagtacagaggatatgattctgctggtgtgggatttgatggaggcaatgataaagattgggaagccaatgcctgcaaaatccagcttattaagaagaaaggaaaagttaaggcactggatgaagaagttcacaagcaacaagatatggatttggatatagaatttgatgtacaccttggaatagctcatacccgttgggcaacacatggagaacccagtcctgtcaatagccacccccagcgctctgataaaaataatgaatttatcgttattcacaatggaatcatcaccaactacaaagacttgaaaaagtttttggaaagcaaaggctatgacttcgaatctgaaacagacacagagacaattgccaagctcgttaagtatatgtatgacaatcgggaaagtcaagataccagctttactaccttggtggagagagttatccaacaattggaaggtgcttttgcacttgtgtttaaaagtgttcattttcccgggcaagcagttggcacaaggcgaggtagccctctgttgattggtgtacggagtgaacataaactttctactgatcacattcctatactctacagaacagctaggactcagattggatcaaaattcacacggtggggatcacagggagaaagaggcaaagacaagaaaggaagctgcaatctctctcgtgtggacagcacaacctgccttttcccggtggaagaaaaagcagtggagtattactttgcttctgatgcaagtgctgtcatagaacacaccaatcgcgtcatctttctggaagatgatgatgttgcagcagtagtggatggacgtctttctatccatcgaattaaacgaactgcaggagatcaccccggacgagctgtgcaaacactccagatggaactccagcagatcatgaagggcaacttcagttcatttatgcagaaggaaatatttgagcagccagagtctgtcgtgaacacaatgagaggaagagtcaactttgatgactatactgtgaatttgggtggtttgaaggatcacataaaggagatccagagatgccggcgtttgattcttattgcttgtggaacaagttaccatgctggtgtagcaacacgtcaagttcttgaggagctgactgagttgcctgtgatggtggaactagcaagtgacttcctggacagaaacacaccagtctttcgagatgatgtttgctttttccttagtcaatcaggtgagacagcagatactttgatgggtcttcgttactgtaaggagagaggagctttaactgtggggatcacaaacacagttggcagttccatatcacgggagacagattgtggagttcatattaatgctggtcctgagattggtgtggccagtacaaaggcttataccagccagtttgtatcccttgtgatgtttgcccttatgatgtgtgatgatcggatctccatgcaagaaagacgcaaagagatcatgcttggattgaaacggctgcctgatttgattaaggaagtactgagcatggatgacgaaattcagaaactagcaacagaactttatcatcagaagtcagttctgataatgggacgaggctatcattatgctacttgtcttgaaggggcactgaaaatcaaagaaattacttatatgcactctgaaggcatccttgctggtgaattgaaacatggccctctggctttggtggataaattgatgcctgtgatcatgatcatcatgagagatcacacttatgccaagtgtcagaatgctcttcagcaagtggttgctcggcaggggcggcctgtggtaatttgtgataaggaggatactgagaccattaagaacacaaaaagaacgatcaaggtgccccactcagtggactgcttgcagggcattctcagcgtgatccctttacagttgctggctttccaccttgctgtgctgagaggctatgatgttgatttcccacggaatcttgccaaatctgtgactgtagagtgaggaatatctatacaaaatgtacgaaactgtatgattaagcaacacaagacaccttttgtatttaaaaccttgatttaaaatatcaccccttgaagcctttttttagtaaatccttatttatatatcagttataattattccactcaatatgtgatttttgtgaagttacctcttacattttcccagtaatttgtggaggactttgaataatggaatctatattggaatctgtatcagaaagattctagctattattttctttaaagaatgctgggtgttgcatttctggaccctccacttcaatctgagaagacaatatgtttctaaaaattggtacttgtttcaccatacttcattcagaccagtgaaagagtagtgcatttaattggagtatctaaagccagtggcagtgtatgctcatacttggacagttagggaagggtttgccaagttttaagagaagatgtgatttattttgaaatttgtttctgttttgtttttaaatcaaactgtaaaacttaaaactgaaaaattttattggtaggatttatatctaagtttggttagccttagtttctcagacttgttgtctattatctgtaggtggaagaaatttaggaagcgaaatattacagtagtgcattggtgggtctcaatccttaacatatttgcacaattttatagcacaaactttaaattcaagctgctttggacaactgacaatatgattttaaatttgaagatgggatgtgtacatgttgggtatcctactactttgtgttttcatctcctaaaagtggtttttatttccttgtatctgtagtcttttattttttaaatgactgctgaatgacatattttatcttgttctttaaaatcacaacacagagctgctattaaattaatattgatatattcagtattctcttcaactttgtcacgaggaagaatttcctgtagttaattttaactttccttcattacattgttgcataaaactagtcccttagtgccagtttggaagttacttgcaattgtttggaagatttgcaggtcgctgacctcatcatttcactctaagtatatgtggtaggctaagctcagaaaaaggtatgtatgctttacactgataggcaccaaatttagtattgtatcctaagtatttttcctcttctgtattttctgtgctctacccctgaaatatatttaggaataaagaagatataaataaagtgatattggggtatgttcagcttgtaagtgtcagaaatggaagttgacaatttggattaaaatatttaaagtagaatgttattatttgatacccccaaaattgtgagtaataatttcttaatggagcttttctggccagatcttcagggctataggagagtgtgtttgtttttggtgaagtccttctttttcaaaggtttttacttttaaattgtgaagataagctatttagcacaattatttaagtaagctgttttttcctttcttttctttcttttcttgttttaacttctgggtgaggttaagattttctaatagttattgttgttgccagagaagcatagaattctgcttgtgtcttagggttagagaaagatttgttatattttgaggtaatttggaaggactttcatacatggtgactagaaacctgatctttttaagaataaaatagggtcactatttacattatatataatatatggctattatagctatattaatctactttaattgtttctaagattattttgtgtaagtcagctagcgtgtgtatagtgtcatttcttatgttttgtatattaacgttttacaaacacaatttgtgtgggtttgtagcatttcttatagtttaaagtatgattcagcattctaagttaaaactaatatgtgaagtcagtcattagtctgcataatctctgtctccctctgtgtgtgtctttctataaagcacatgtgtacacacacacacacaaatatactgaaagctagggtaagttctaaactgaatatcaaaaaccaaaatcaagaacaaagaagtgatattttccaaacaaacatggattctctgccgggtgcagtggctcagcctgtaataccagcctccactttgggagtctgaggtgggagtattgcttgagctcaagagttggagaacagcctgggcaacatggtgagacctggtctttacaaaaatttttttggccggacgcagtggctcacacctgtaatcccagcactttgggaggccgaggcaggttgatcatgaggtcaagagatcgagaccatcctggccaacatggtgaaaccccgtctttactaaaaatacaaaaattagctgggagtggtggcgtgcgcctgtagtcccaactacttgggaggctgaggcaggagaatcgcttgaacccaggaggcggaggttgcagtgaggcgagatcacgccactacactccagcctggcgacagagcaagactctctcaaaaaaaaaaaaaaaaaattttttttttaaatgggctgggcatggtggcttgtgcctgtagtctcagcaacttgggaggcttaagtagtaggatcgcttgagcctgggaggttgaggctgcagtgagctgtgattgtgccactgtgcttcagcttgagtgacagagtgagaccctcctgactcaaaacaaaaaacatggtttctcctctctctcctgtcttcttactctctatcccatttgatgtagtgatttttaaatgcttttgtaagttaattcttaacacaaaagagacattgtaatgaggcacaccactaaagtgagcatgcccaattaaaaccagtgtaatataggataagaaaatctgatttttcaaaaaagatactctacataaagaatccttcatataaaaagttctttcttgtagtacatttaaagttttaattcactcatgtataactgagagttcctttgagccctttttaggcagggaggcatgtctgtcatctagcgtgtggcccagtaagtgattattacattggaatcagtttttcagtcttttaaaataaattctgtgccataagaataaaagataaagagaaaaattaatgttaactatttttagcttattataactatgtcaacaagtgtttattaatacctattatgggaaagtcactgtggttggcattgaaaattacatcatctttaaagcagtatttgtccccagatggactcatcactagcaaagactaggttcattggaaggcatagggtgagagaatgggaagatgaagtggaggcgggttgttaaagtgctgtcagtgagtgattttgtctacttgaataatggtccatgtttgggggcatattgtgtttcataagaagtgaaaggtatttgcaaagtaagctacaaatgacccataaatctgttaacaacagtccttaatatgcaaagatgaaaaacaagcattactgctacccaaagggaactggtgcttggtgatgtgcagatggggctgttggttaagagagctattacaggttttctctcttaggtttcataggaggtagttactgagatgagattgttttatctttttgaatacagatctcttgtcttgagttagttctgaggatgggagtaataaaggagttttttgtttttttgtttgtttgtttgttttggctccttagtaatactcctctgacatttatttctattattcttcaaagaaaggaaaccaactgaaatgtttgctttaacaaacattttaataagttctctgggtttttttttccccttttaaaaaaattagcatataccatagcaataaaagaactaatgttaactattgtatgctacaacttaagtgatttttctaaagaagcacaatgtcattgaaagtattattgaaaaggatcatagtcacattgaatttgtgaaggccaaagaaattgaagggagtgatattttcattttatgatattcacatatttagtaaattttgtgtacaagaataccaggcagagtgttttacccatggaaacaggtttcagattactttatttttactgttagagtctcaagtttagaaatgctaacacttaaatcagtttttttctcactatacttgaagattgttaatattttgatatcttcctagcttgatgaatttaaacatatcttcagatctgtgacagtgacagccaataggactgataatattagcttcaaaccaataatatccagggttaaaataaaaatcatagtgaaagtacgattgtaaaattatgctatattaacttttaagtctgtaataacttgacatcaaaatgttatgtaattaccataaataatggctagcgagaacatctttggaaattctcaaattacctttcttactacactgtttgcagaatgaatgtagaaatgatcctgttagctttctgaatgttctgtggttgaatgtgtttttgcttaaataaagcttttggtatttgtttaaattacacttcttgagaagtggaaattttaggatcatctttgctttgtttcagttttgtgatttttgaaatgaatgtttagtttactgagccagttggtcatttcttcctcatgtcgttaagtccagtgagtaagcctgaactgtgaataaattaccaaaaacttgcttagaatttcattttgaagcaatttgctaatatttgaagtgtatacacatttgtagttatgttagaaattgtattgtactaagaatgtaatcaatgtctactttagttgtaaacatttctgatgtcaaaactttattcattactgttgattttaagaataagaaatcactgcctaaatattaccaaaagccactgtctctacccgaacttcccagtttgggaaagaatcgttagataaaacaaaggctctgccctttctgataccaaactccacagatactttctcacatcttttaaaacattttgcaataacatattgtttataggaagtttacggggtatgcaatgattaaaacttttaagtgaattgatagttgcaaaagaaaggataatatttaaggtcagtgagtagcaagacaatctaaagtttctgtaatatctggctctctgttaattatagagcaaagtttcccttacagaatccttttatgaacagcaagctagagtctatccctagtggttatagcacctgctgcgtttttcaggagacagttaggccagggtgatttgaatggatagatgtgctgttttgcctgcttgtagaattcagcccagtctttggtctctctctctctctccctcctccacctctccctctctcttcttctgcaccagagcctaaggctgcgccaccaagatgcgtcattttttccagaggcttcttttttttttttttgagatggagttttgctctgttgcccaggctggcatgcagtgctgcaatcttggctgactgcaacttccacctcccgtgttcacacgagtcttttgcctcagcctctggattagctgggattacaggcacgtgccaccatgcctagctaatttttgtgtttttagtagagacggggtttcaccatgttggccaggctagtctcaaactcctgaccttaagtgatctgcccgccttggcctcccaaagtgctgggattacaggcatgagtcaccgtgtcctgcccagacatatcaaatttgacaggtattgtataccctttggatctttaggaattaatttttgcctctgtcactcagctttgtatattttgaaatggagataagtatagggaggtcttggaaggaaaattgccagaattcccaaaccatgtaacactcattgagaattccagatccattatatctaaagggcaagtgaaggaaacagtattgtgaactgggtataactccttggttcttaactagtacattcttaatctgtgagacccaaaggttgataaacaataatttaagattgtacagtactctaaacgtctgcaaaggtctagatgttatcagtatcactagtttttatttctgccagtagctcccttttaggttacattgttgtcctctttccagtgtcgcatctgtcattggtttttcactatggcaagttcattaaaaagcttgctccattgttatcttcaagtaatgcccataaggagatggaagatatctgagacaattaaggctttagcttctaggcaagagaaataacgttgcattaaatttcaagtttctttctgctagacttgaatgtgtctagccactctaatttatgggggcttttggttttttcctattgtactttgtatgtagaattgttttgaaatatcaagcatatttactttgaatttgaactctttcttaattttgtatttatcctttgaataaaatgtaaatccaatatttat

SEQ ID NO: 1410 - DNA, 3700 bp, Homo sapiens
  source 1..3700: mol_type = genomic DNA
ccattgaatcccagtcctaacagaagtactgcgaatcttgtggcctcattctgaacaaaagggattagagaagaaaaatctcttgatataaggcttgaaagcaagggcaggcaatcttggttgtgaatattttctgatttttccagaaatcaagcagaagattgagctgctgatgtcagttaactctgagaagtcgtcctcttcagaaaggccggagcctcaacagaaagctcctttagttcctcctcctccaccgccaccaccaccaccaccgccacctttgccagaccccacacccccggagccagaggaggagatcctgggatcagatgatgaggagcaagaggaccctgcggactactgcaaaggtggatatcatccagtgaaaattggagacctcttcaatggccggtatcatgttattagaaagcttggatgggggcacttctctactgtctggctgtgctgggatatgcaggggaaaagatttgttgcaatgaaagttgtaaaaagtgcccagcattatacggagacagccttggatgaaataaaattgctcaaatgtgttcgagaaagtgatcccagtgacccaaacaaagacatggtggtccagctcattgacgacttcaagatttcaggcatgaatgggatacatgtctgcatggtcttcgaagtacttggccaccatctcctcaagtggatcatcaaatccaactatcaaggcctcccagtacgttgtgtgaagagtatcattcgacaggtccttcaagggttagattacttacacagtaagtgcaagatcattcatactgacataaagccggaaaatatcttgatgtgtgtggatgatgcatatgtgagaagaatggcagctgaggccactgagtggcagaaagcaggtgctcctcctccttcagggtctgcagtgagtacggctccacagcagaaacctataggaaaaatatctaaaaacaaaaagaaaaaactgaaaaagaaacagaagaggcaggctgagttattggagaagcgcctgcaggagatagaagaattggagcgagaagctgaaaggaaaataatagaagaaaacatcacctcagctgcaccttccaatgaccaggatggcgaatactgcccagaggtgaaactaaaaacaacaggattagaggaggcggctgaggcagagactgcaaaggacaatggtgaagctgaggaccaggaagagaaagaagatgctgagaaagaaaacattgaaaaagatgaagatgatgtagatcaggaacttgcgaacatagaccctacgtggatagaatcacctaaaaccaatggccatattgagaatggcccattctcactggagcagcaactggacgatgaagatgatgatgaagaagactgcccaaatcctgaggaatataatcttgatgagccaaatgcagaaagtgattacacatatagcagctcctatgaacaattcaatggtgaattgccaaatggacgacataaaattcccgagtcacagttcccagagttttccacctcgttgttctctggatccttagaacctgtggcctgcggctctgtgctttctgagggatcaccacttactgagcaagaggagagcagtccatcccatgacagaagcagaacggtttcagcctccagtactggggatttgccaaaagcaaaaacccgggcagctgacttgttggtgaatcccctggatccgcggaatgcagataaaattagagtaaaaattgctgacctgggaaatgcttgttgggtgcataaacacttcacggaagacatccagacgcgtcagtaccgctccatagaggttttaataggagcggggtacagcacccctgcggacatctggagcacggcgtgtatggcatttgagctggcaacgggagattatttgtttgaaccacattctggggaagactattccagagacgaagaccacatagcccacatcatagagctgctaggcagtattccaaggcactttgctctatctggaaaatattctcgggaattcttcaatcgcagaggagaactgcgacacatcaccaagctgaagccctggagcctctttgatgtacttgtggaaaagtatggctggccccatgaagatgctgcacagtttacagatttcctgatcccgatgttagaaatggttccagaaaaacgagcctcagctggcgaatgccttcggcatccttggttgaattcttagcaaattctaccaatattgcattctgagctagcaaatgttcccagtacattggacctaaacggtgactctcattctttaacaggattacaagtgagctggcttcatcctcagacctttattttgctttgaggtactgttgtttgacattttgctttttgtgcactgtgatcctggggaagggtagtcttttgtcttcagctaagtagtttactgaccattttcttctggaaacaataacatgtctctaagcattgtttcttgtgttgtgtgacattcaaatgtcatttttttgaatgaaaaatactttcccctttgtgttttggcaggttttgtaactatttatgaagaaatattttagctgagtactatataatttacaatcttaagaaattatcaagttggaaccaagaaatagcaaggaaatgtacaattttatcttctggcaaagggacatcattcctgtattatagtgtatgtaaatgcaccctgtaaatgttactttccattaaatatgggagggggactcaaatttcagaaaagctaccaagtcttgagtgctttgtagcctatgttgcatgtagcggactttaactgctccaaggagttgtgcaaacttttcattccataacagtcttttcacattggattttaaacaaagtggctctgggttataagatgtcattctctatatggcactttaaaggaagaaaagatatgtttctcattctaaaatatgcattataatttagcagtcccatttgtgattttgcatatttttaaaagtacttttaaagaagagcaatttccctttaaaaatgtgatggctcagtaccatgtcatgttgcctcctctgggcgctgtaagttaagctctacatagattaaattggagaaacgtgttaattgtgtggaatgaaaaaatacatatatttttggaaaagcatgatcatgcttgtctagaacacaaggtatggtatatacaatttgcagtgcagtgggcagaatacttctcacagctcaaagataacagtgatcacattcattccataggtagctttacgtgtggctacaacaaattttactagctttttcattgtctttccatgaaacgaagttgagaaaatgattttccctttgcaggttgcacacagttttgtttatgcatttccttaaaattaattgtagactccaggatacaaaccatagtaggcaatacaattttagaatgtaatatatagaggtatatttagcctcttttagaagtcagtggattgaatgtctttttattttaaattttacattcattaaggtgcctcgtttttgactttgtccattaacatttatccatatgcctttgcaataactagattgtgaaaagctaacaagtgttgtaacaataatccattgtttgaggtgcttgcagttgtcttaaaaattaaagtgttttggtttttttttttcc

SEQ ID NO: 1411 - DNA, 2301 bp, Homo sapiens
  source 1..2301: mol_type = genomic DNA
ggcggccgagcggcgggcgacgggggcgggcgacgggggcgggcgacgcgggccgcggcacgggcggagccggggccatggagccgccgctgccgggctaggcaggtcgtgccccgccgggccggcggcgatgtcgggctaccagcgccgcccgggcgccaccccgctgtcccgagcccggagcctcgccattcccgacgctccagcgttctatgagcgccggtcttgtctcccccagctaaattgtgagcgcccccatggcagggacctggactcccccttcttcggcattcggccggcctttatgtgctatgtgcccagcccggtgctggcttccgtgggagacacagattttggctatggaaaggggaaatgttctaagcagagcccgtcaggagcccacgggacacattttggagatgacagatttgaagatctggaagaggcaaatccattctcttttagagagtttctgaagaccaagaacctcggcctctcgaaagaggatccggccagcagaatttatgcaaaggaagcctcgaggcattccctgggacttgaccacaactccccaccctcccaaaccggcgggtatggcctggagtatcagcagccatttttcgaggatccgacaggggctggtgacctcctggatgaggaggaggatgaggacaccggatggagtggggcctacctgccgtccgccatcgagcagactcaccccgagagggtccctgccggcacgtcgccctgcagcacatacctttcctttttctccaccccgtcggagctggcagggcctgagtctctgccctcgtgggcgttgagtgacactgattctcgcgtgtctccggcctctccggcagggagtcctagcgcagactttgcggttcatggagagtctctgggagacaggcacctgcggacgctgcagataagttacgacgcactgaaagatgaaaattctaagctgagaagaaagctgaatgaggttcagagcttctctgaagctcaaacagaaatggtgaggacgcttgagcggaagttagaagcaaaaatgatcaaggaggaaagcgactaccacgacctggagtcggtggttcagcaggtggagcagaacctggagctgatgaccaaacgggctgtaaaggcagaaaaccacgtcgtgaaactaaaacaggaaatcagtttgctccaggcgcaggtctccaacttccagcgagagaatgaagccctgcggtgcggccagggtgccagcctgaccgtggtgaagcagaacgccgacgtggccctgcagaacctccgggtggtcatgaacagtgcacaggcttccatcaagcaactggtttccggagctgagacactgaatcttgttgccgaaatccttaaatctatagacagaatttctgaagttaaagacgaggaggaagactcttgaggacccctgggtgttctcagcatgaagctccgtgtataccctgaggtcaccaccgctcgatctaaatgtgcagttgtgtccttaaatatgcagtcttcacccagagtaaagtgttgatcgcaagagtccagtgtcgtgccctcagccagttcttggccaccacaatgggagcagccctggccgagttgtctctgtggtttctatgcagcccttcttggcgaaattcctgcgatcttatagattctaatgagctcttggaagacattgtcataaaagccagtgattttaagaaaaagagtggttctggaatcaatgttttccagtcccatcccagaacatcagttgtaagataagtacaattggttgtccttgatttcataagtagaacaaacactaaatgtgcctctgagatggccaccccgggcagggacctgtgccttccgccgatgctcagggctccctctggctcccgggtcactcttgtggccccagtgggtggtccctgcagtcatggcctgagtgcgcaggggccaccgcgtggctgctgctgtcctcctccgggacccacggggaccaaggtcacacgttccgtgctgtgaagctgtccagatgtgcctctttggctgggggttctggtggacgtttcaagtggcattttgtacaatgcaggttagaattcaggaatttcaagtatgtgcccgggtctgtcaggtcccagttgcctttctgacggcccccctcagagggacggcgatgagcactaaatgcttttttgactattttcctatagattttttttaaaacttttttttcctcctgttccaattgatagctttcttatttaataaattctgtagttcacc

SEQ ID NO: 1412 - DNA, 1130 bp, Homo sapiens
  source 1..1130: mol_type = genomic DNA
gtgcgcactggcgtgcgagactcggcgggcgctgttgagggagtcgggccgcgactgtggtcgtttttataccttcccgcgcggacgccggcgctgccaacggaagggcgggtagggcggtgcgtgattaggttggcgaaggctctgctgccatgaaggtgaagattaagtgctggaacggcgtggccacttggctctgggtggccaacgatgagaactgtggcatctgcaggatggcatttaacggatgctgccctgactgtcctctccatggagaaagcatttctaggtgtttgggctggtgcccgcagcctgtgcctgtcctgggaggcagggcccatccacaggtgcccatcaacacagcttccccaacgcctgggcagcacaccggatccctgatgtctagggaagagtcttctaggtccccagaccccacccctcctgcccttgatcaagagaccagttcactactcagatgcacgtctccttggtgccttgaccattcatgtgacctttttggcatcacagatcaagtgtctgcagatgggcccagggcctgtaggcaaggtgcccggcgacgactgcccgctggtgtggggccagtgctcccactgcttccacatgcattgcatcctcaagtggctgcacgcacagcaggtgcagcagcactgccccatgtgccgccaggaatggaagttcaaggagtgaggcccgacctggctctcgctggaggggcatcctgagactccttcctcatgctggcgccgatggctgctggggacagcgcccctgagctgcaacaaggtggaaacaagggctggagctgcgtttgttttgccatcactatgttgacacttttatccaataagtgaaaactcattaaactactcaaatcttgctggaggcctctgggtgcctgtgttctcggcatatagatgtggtctcggtgtgttttgatatgaaaactctcatgaataaacatctccgtgaaacgccaaggccctcgtcaaaccctgagtcatgactgggaggagaaggagcaggatcagacggtagagcctggggcatgctcttcaggcatgctcttgcctgctggattgccggcggcggccctgggaccctccctcagg

SEQ ID NO: 1413 - DNA, 9543 bp, Homo sapiens
  source 1..9543: mol_type = genomic DNA
gtttccggtgttgtgactgaaacccgtcaatatggcggcgatcggccgcggccgctctctgaagaacctccgagtacgagggcggaatgacagcggcgaggagaacgtcccgctggatctgacccgagaaccttctgataacttaagagagattctccaaaatgtggccagattgcagggagtatcaaatatgagaaagctaggccatctgaataactttactaagcttctttgtgatattggccacagtgaagaaaaactgggctttcactatgaggatatcataatttgtttgcggttagctttattaaatgaagcaaaagaagtgcgagcagcagggctacgagcgcttcgatatctcatccaagactccagtattctccagaaggtgctaaaattgaaagtggactatttaatagctaggtgcattgacatacaacagagcaacgaggtagagaggacacaagcacttcgattagtcagaaagatgattactgtgaatgcttccttgtttcctagttctgtgaccaactcattaattgcagttggaaatgatggacttcaagaaagagacagaatggtccgagcatgcattgccattatctgtgaactagcacttcagaatccagaggtggtggcccttcgaggtggactaaacaccatcttgaaaaatgtgatcgattgccaattaagtcgaataaatgaggccctaattactacaattttgcaccttcttaatcatccaaagactcgacagtatgtgcgagctgatgtagaattagagagaattttagcaccctatactgattttcactacagacatagtccagatacagctgaaggacagctcaaagaagacagagaagcacgatttctagccagtaaaatgggaatcatagcaacattccgatcatgggcaggtattattaatttatgtaaacctggaaattctgggatccagtctctaataggagtactttgcataccaaatatggaaataaggcgaggtctacttgaagtgctttatgatatatttcgtcttcctctacctgttgtgactgaggagttcatagaagcactactcagtgtagatccagggaggttccaagacagttggaggctttcagatggctttgtggcagctgaggcaaaaactattcttcctcatcgtgccagatccaggccagacctcatggataattatttggcactgatactctctgcatttattcgtaatggacttttagagggtctagttgaagtgataacaaacagtgatgatcatatctcagttagagctaccatccttttaggagagcttttacatatggcaaacacaattcttcctcattcacatagccatcatttacactgcttgccaaccctaatgaatatggctgcatcctttgatatccccaaggaaaagagactgcgagccagtgcagccttgaactgtttaaaacgcttccatgaaatgaagaaacgaggacctaagccttatagtcttcatttagaccacattattcagaaagcaattgcaacacaccagaaacgggatcagtatctccgagttcagaaagatatatttatccttaaggatacagaggaagctcttttaattaaccttagagatagccaagtccttcaacataaagagaatcttgaatggaattggaatcttatagggaccattcttaagtggccaaatgtaaatctaagaaactataaagatgaacagttacacaggtttgtacgaagactactttatttttacaagcccagcagtaaattatatgccaacctggatctggattttgccaaggccaaacagctcacggttgtaggttgccagtttacagaatttcttcttgaatctgaagaggatgggcaaggctacttagaagatctagtaaaggatattgttcagtggctcaatgcttcatctggaatgaaacccgaaagaagtcttcaaaataatggtttattgaccacccttagtcaacactactttttatttattggaacactttcttgccaccctcatggagttaaaatgctggaaaaatgcagtgtatttcagtgtctccttaatctttgctccttgaaaaaccaagatcacttgctaaaacttactgtttctagcttggactatagcagagatggattggctagagtcatcctttccaaaattttaactgcagctactgatgcctgcagactctatgcaacaaaacatttaagggtattattgagagctaatgttgaattctttaataattggggaattgagttgttagtgacccagctacatgataaaaacaaaacgatttcctctgaagctcttgatatcctcgatgaagcatgtgaagacaaggccaatcttcatgctctcattcagatgaaaccagcgttatcccaccttggagacaagggtttgcttctcctgctgagatttctctccattccaaaaggattttcctatctgaatgaaagaggttatgtagcaaaacaattggaaaagtggcacagggaatacaactccaaatatgttgacttgattgaggaacaactcaatgaagcacttactacttaccggaagcctgttgatggtgataactatgttcgtcggagtaaccaaagattacagcgtcctcacgtctacctgcctatacacctttatggacaactagtacaccataaaacaggctgccatttgttggaagtacagaatattattacagaactctgtcgtaatgttcgtacaccagatttggataagtgggaagaaattaaaaaactgaaagcatctctttgggccttgggaaatatcggctcatcaaattggggtctcaatttgctacaggaagaaaacgtgattccagatatactaaaacttgcaaaacagtgtgaagttctttccatcagagggacctgtgtatatgtacttgggctcatagctaaaaccaaacaaggctgtgatattctaaaatgtcacaactgggatgctgtgaggcatagtcgcaaacatctgtggccagtggttccagatgatgtggaacaactctgtaatgaactttcatctatcccaagcactctaagtttgaactcggagtcaaccagctctagacataatagtgaaagtgaatctgtgccatcgagtatgttcatattggaggatgaccggtttggcagcagctctactagcacatttttccttgatatcaatgaagatacagagccaacattttatgaccgatctggacccataaaggataaaaattcattccctttctttgcttctagtaaacttgtgaagaatcgtatcttaaattcgcttactttgcctaacaaaaaacatcgtagtagcagtgatccaaaaggagggaaattatcatctgaaagtaagacaagcaacaggcgaatcagaacacttacggagcccagtgttgattttaatcatagtgatgattttacacccatatccactgtacagaaaacattacaattagagacttcatttatggggaataagcacattgaagacactggtagtacaccaagcattggagaaaatgacttaaaattcaccaagaattttggtacagagaatcacagagaaaatacaagccgagagaggttagtagtagaaagttcaacgagctcacatatgaagatacgtagccaaagtttcaatacagacactacaacaagtggcataagttcaatgagctcaagtccttcacgagagacagtaggtgtagatgctacaactatggacacagactgtggaagcatgagtactgtggtaagtactaaaactattaagacaagccactatttgacgccacagtctaaccatctgtctctctccaaatcaaattcggtgtccctggtgcctccaggttcttctcatacgcttcctagaagagcacagtcccttaaagcaccctctattgctacaattaaaagtctagcagattgtaactttagttacacaagttctagagatgcttttggctatgctacactgaaaagactacagcaacaaagaatgcatccatccttatctcactctgaagctttggcatctccagcaaaagatgtgctatttactgataccatcaccatgaaggccaacagttttgagtccagattaacaccaagcaggttcatgaaagccttaagttatgcatcattagataaagaagatttattgagtcctattaatcaaaataccctgcaacgatcttcctcagtgcggtccatggtgtccagtgccacatatgggggttcagatgattacattggtcttgctctcccggtggatataaatgatatattccaggtaaaggatattccctattttcagacaaaaaacataccaccacatgatgatcgaggtgcaagagcatttgcccatgatgcaggaggtcttccatctggaactggaggtcttgtaaaaaattcttttcacttgctacgacagcagatgagtcttacggaaataatgaattcaatccattcagatgcctctctgtttttagaaagtacagaagacactggactacaggaacatacagatgataactgcctttattgtgtctgtattgaaattctgggtttccagcccagcaaccaactgagtgcaatatgtagtcattcagactttcaagatattccatattctgattggtgtgagcagactatccataatcctttagaagtggttccctctaagttttcggggatttctggatgcagtgatggggtgtctcaagaaggctcagctagcagcaccaaaagcacagaattgttactaggtgttaaaacaattccagatgatacaccaatgtgccgtatactccttcgcaaagaagttctaagattagtcattaatttgagtagttcagtttcaactaaatgtcatgagactgggcttttaacaattaaggagaagtatcctcaaacatttgatgacatatgcctttactctgaggtttcccatttgctgtcacactgcacattcagacttccgtgtcggaggttcatacaagaattatttcaagatgtacagtttctacaaatgcatgaagaagcagaggctgtgttggcaacaccaccaaagcaacctatagttgatacatctgctgaatcctgacctcatatttatgatggatatagatacatactatatatattcatatttgtggatttcctaaaagcctcagaaaatacgactgactaggcagcaaagacaggagtatcttctgtacactgttccgcagttactggtacatgaacagttggaactgctgactttcctaaccaaaacaacttccttctctcctttgttgagccttttgaggggttcatgattcattaccacagttttaagagtttcagttaccattgtatgcaagagccaagcactgaatacctacataggttttctattttctttcattttaaaagcataatgacagtggaacaataatgggatatgcagaagcacccttcacaagttatttctgaatgatttttagggtaaataatacagatgccttgtttgttaactaacttgtggaaagcaggaatcagtgtctctaaggctgcatcctattaccacaatggggtgtgctataactgctggtattagagagggaactttggccctttcacgtttttcttaatgtttgtaacactacttcagaggtttataacctcaaagcagaagaagagcctcaacaacccgggacttataagttatttttatgttactagacttgcataaagattcttgttttccaactcttcattttgttgcaatgtgttattacaggatatatgaaccaattaaggtttttcactacagttcttgaataaaatttaaaaatcattttttattttaattaaaaatatttcccatttatagaatgcatatatttgcaatggacttccactttcatcaactttccatctcatcgctttaaacaggaacttgaacaagcactgttagtttagacctaaaggataggaaagcattaaataatactttggatctcctgaggaaaagataagtttgcttgcaatttacacattccatggggaaagaagagccatatttccttaaaaaaaacattaataaagcttgttattgagaaaaattgtagtgaaaagccttaagtaccaaattttaaagcagcagtaacttaatttttatatcagtgtttttgttttgcacaaactaaatgcagtggtaggtgggtttatgagtatattaattgcctttatccatttgtgaagttaagttgatgagggcaaggtttttgtttgtttaatttgtatatgtctaaaggtatttggaactttttacaggaattaaacatatatgcaaatttgtatataaaaatagcatggccatcatttgaatgcttgtaaatgaaaggattatcttttttgagatctatatataaatagaaatagaaaatccagctggactgattaggattcttttttaattcatttgtgtataacatttttattacaattacacatcagttttgacacagtcatagcaacattaatattttcccatgatgcagatcctttttgtaatgggcttgttctttgagatctctgtaaagaaccctgtgaactagaaaacataactcacagagatacttttttaaaaaatttatttactggaactgaaagttccagttgggatgaagcatttcatctcacttcataacacctctttgactgcacttcagtgaattgttcttatgtgcactgtgtagcaacttacattataacaaagcagataagggctgtaagctgctgcttatgttgaaaagtggttcttcagattttctctcataaaatccagttgaagataaataatttttttatactttatcactgaacccaagtgtttatttaaatgtcaacagtacttctaagaacgttgcctgtcatcgtggtctttggtcttggataactaaactgcctttccagagaaccaaatgtcagagttactagaccaaatagtggttaaaacctccaaaggaagtaatgtaatcttattcataatgggattaacatattttagacattcattttaaacactacctcagttaatatagagtataaaaatctgtggtttaatccctcaaaagttaacagtaattttttttttgtcttacacacacacacaccccctcccccaccatcactatccctgtaccctcaccttggtcatctatcctgaaataaggcttagttagtattggcctgaatgttttgtgtttttttttttgttttttttttttactgttactttgaaaaatatgtatgtataccttatcatatctgcctatatcacttactttggggagatactcagagctttgtggttatcagtatactaaaaaaaaaaaaaagtctacgcttaaatttatagtgctatttggtttctccatgatttcactgacaggtctaatacattttctttgagtacttgtttgtaaaaagtagactttatggtgaaaaatacatgcagtgccaagtgattaacttaagtgtttaaaaatattaaattatagcagaagaggttaggaatgatatcagcagtaatagaaataattgagaaaatcatctataaataatagatattacagactatagaataccaaaataatgtcaatactgtagtttttaaagattttaggattaatcttagtccatataaatttgtactattggtaattattgaataattgggaggaatctgggcagttgtgctggttgtaaactatgaatttctaatcgtaaagtgaattgttatttctaattgaactttttttcaagaacagatttcagcctcacatactaagtaaatactgataaataaggaaattagaaatttagtattcataattaaatatgctctaaaatttcctatacttttatttcctgtttattcttaggtagattggaagggggaaacagtctgttctccctaattaaattttttctaataacgattagtagaatatggacattctatatgacagtgacattaaaagaggctctttggaagtatatacattattaacataatgtgtacaagtccttttgaaatgacaactttaatgggtttcagctcttttatctagagcttgagataattcaagctgagtttttcagggcatatcacaacggccaagtgttcagcagtgggatatcaatgcttatttacattttcctactgctatttatataaaatgttattccattcagaggatgccttttatccccacattaaagcacagatcattaagcaataaaaaccaaattgtctgtcattcaaattataactgcagttatttttgcatggtaagagtgaggtgctaattttgtgtgagatgaactttgtaaactactttgggaaatgttctttggaagtaaggttttttctcctttagtcttatgcttccacttttgtctcagattcacaatccattaaaacatggggaaaaaagaaaaggtaaaattgagagacttttgttagaggagctatttggaatgaaccaacatttcagattttccaaaatgtaagttaggaagtctccattgtctctgcattaacaaaatacactgttactatcttaatctcaagagtgtcattacagtgagaatctcatttaaaagcataccagtgaaattaatagcagtgcttatcaaagaacactgaaatctgtgagaatctttctaggagcattcttttcttcttttagttccaagttccagggtatttttcattcctagtaggtttatatgactcacagaatgtggacttttttcctgtttggagtatttttgtaatgtaagtatcggatagctgcaccacagcatgcataaattgcacattttgttttactttctttatagaatatttaatttcaaaaatataatttatgccaaaaaaagcatacctttcaattttgctacttggttgatttagcacaaaatgcaaagtcttggggcagagagggggagtgaaaaaaattttataggtaattgttacaaaaatacctgtcagaaaccctaaagctgcattgtaaaacaaatggtgtaaactagttttgaaaagtggtaaggaattgtgaaaaaaatctcagacttaatgctctctaaccacatgagtttcttcttttttatttagtaatacgctgctacatatttggaggttctggtgtttgtaggtcactgaacagacattgaaatctgatttatattgtataactgtaacatagaaagaaaaagtatttatattttttctgtaagaatatttcattgagttgtgtataatttaaataagatttgtccccaaatggttttgctcaccttgattttttttgttgtgattttcttgtttttgtataatgtgtatagtttatgtcaagggcattaaaagcctcctgaagcataatcttatcaaagggatacattgttaataaaatgtacttaaaattcttaaac

SEQ ID NO: 1414 - DNA, 5471 bp, Homo sapiens
  source 1..5471: mol_type = genomic DNA
gccctcttctgaagaggcgtttctggaccactgagccccgcctcccactgtgagcggaaccctaccgtttttaaaaaaatctttttcaaaacttgccaggttgtctttccaaatatttttaataatagtgctgctgctgtagaccacagagaaaagaatccctcgctcttccttttcacttagtagaaacttctaccgcgtaggtcccgccaggagttcgcgcatgcgcaggagcgacaataagatggcggtgataatcgccgcactttttttcaaattagtggatcccagaaatcattgcgcgcatttgtaacgaatttccgttcgagtttgtattttaggcgccattttcgagtgaaggacccggagccgaaacaccggtaggagcggggaggtgggtactacacaaccgtctccagccttggtctgagtggactgtcctgcagcgaccatgccccgtaaaggcacccagccctccactgcccggcgcagagaggaagggccgccgccgccgtcccctgacggcgccagcagcgacgcggagcctgagccgccgtccggccgcacggagagcccagccaccgccgcagagactgcaagtgaggaacttgataatagaagtttagaagagattttgaacagcattcctcctcccccgcctccagcaatgaccaatgaagctggagctcctcggcttatgataactcatattgtaaaccagaacttcaaatcctatgctggggagaaaattctgggacctttccataagcgcttttcctgtattatcgggccaaatggcagtggcaaatccaatgttattgattctatgctttttgtgtttggctatcgagcacaaaaaataagatctaaaaaactctcagtattaatacataattctgatgaacacaaggacattcagagttgtacagtagaagttcattttcaaaagataattgataaggaaggggatgattatgaagtcattcctaacagtaatttctatgtatccagaacggcctgcagagataatacttctgtctatcacataagtggaaagaaaaagacatttaaggatgttggaaatcttcttcgaagccatggaattgacttggaccataatagatttttaattttacagggtgaagttgaacaaattgctatgatgaaaccaaaaggccagactgaacacgatgagggtatgcttgaatatttagaagatataattggttgtggacggctaaatgaacctattaaagtcttgtgtcggagagttgaaatattaaatgaacacagaggagagaagttaaacagggtaaagatggtggaaaaggaaaaggatgccttagaaggagagaaaaacatagctatcgaatttcttaccttggaaaatgaaatatttagaaaaaagaatcatgtttgtcaatattatatttatgagttgcagaaacgaattgctgaaatggaaactcaaaaggaaaaaattcatgaagataccaaagaaattaatgagaagagcaatatactatcaaatgaaatgaaagctaagaataaagatgtaaaagatacagaaaagaaactgaataaaattacaaaatttattgaggagaataaagaaaaatttacacagctagatttggaagatgttcaagttagagaaaagttaaaacatgccacgagtaaagccaaaaaactggagaaacaacttcaaaaagataaagaaaaggttgaagaatttaaaagtatacctgccaagagtaacaatatcattaatgaaacaacaaccagaaacaatgccctcgagaaggaaaaagagaaagaagaaaaaaaattaaaggaagttatggatagccttaaacaggaaacacaagggcttcagaaagaaaaagaaagtcgagagaaagaacttatgggtttcagcaaatcggtaaatgaagcacgttcaaagatggatgtagcccagtcagaacttgatatctatctcagtcgtcataatactgcagtgtctcaattaactaaggctaaggaagctctaattgcagcttctgagactctcaaagaaaggaaagctgcaatcagagatatagaaggaaaactccctcaaactgaacaagaattaaaggagaaagaaaaagaacttcaaaaacttacacaagaagaaacaaactttaaaagtttggttcatgatctctttcaaaaagttgaagaagcaaagagctcattagcaatgaatcgaagtagggggaaagtccttgatgcaataattcaagaaaaaaaatctggcaggattccaggaatatatggaagattgggggacttaggagccattgatgaaaaatacgacgtggctatatcatcctgttgtcatgcactggactacattgttgttgattctattgatatagcccaagaatgtgtaaacttccttaaaagacaaaatattggagttgcaacctttataggtttagataagatggctgtatgggcgaaaaagatgaccgaaattcaaactcctgaaaatactcctcgtttatttgatttagtaaaagtaaaagatgagaaaattcgccaagctttttattttgctttacgagataccttagtagctgacaacttggatcaagccacaagagtagcatatcaaaaagatagaagatggagagtggtaactttacagggacaaatcatagaacagtcaggtacaatgactggtggtggaagcaaagtaatgaaaggaagaatgggttcctcacttgttattgaaatctctgaagaagaggtaaacaaaatggaatcacagttgcaaaacgactctaaaaaagcaatgcaaatccaagaacagaaagtacaacttgaagaaagagtagttaagttacggcatagtgaacgagaaatgaggaacacactagaaaaatttactgcaagcatccagcgtttaatagagcaagaagaatatttgaatgtccaagttaaggaacttgaagctaatgtacttgctacagcccctgacaaaaaaaagcagaaattgctagaagaaaacgttagtgctttcaaaacagaatatgatgctgtggctgagaaagctggtaaagtagaagctgaggttaaacgcttacacaataccatcgtagaaatcaataatcataaactcaaggcccaacaagacaaacttgataaaataaataagcaattagatgaatgtgcttctgctattactaaagcccaagtagcaatcaagactgctgacagaaaccttcaaaaggcacaagactctgtcttgcgtacagagaaagaaataaaagatactgagaaagaggtggatgacctaacagcagagctgaaaagtcttgaggacaaagcagcagaggtcgtaaagaatacaaatgctgcagaggaatccttaccagagatccagaaagaacatcgcaatctgcttcaagaattaaaagttattcaagaaaatgaacatgctcttcaaaaagatgcacttagtattaagttgaaacttgaacaaatagatggtcacattgctgaacataattctaaaataaaatattggcacaaagagatttcaaaaatatcactgcatcctatagaagataatcctattgaagagatttcggttctaagcccagaggatcttgaagcgatcaagaatccagattctataacaaatcaaattgcacttttggaagcccggtgtcatgaaatgaaaccaaacctcggtgccatcgcagagtataaaaagaaggaagaattgtatttgcaacgggtagcagaattggacaaaattacttatgaaagagacagttttagacaggcatatgaagatcttcggaaacaaaggcttaatgaatttatggcaggtttttatataataacaaataaattaaaggaaaattaccaaatgcttactttgggaggggacgccgaactcgagcttgtagacagcttggatcctttctctgaaggaatcatgttcagtgttcgaccacctaagaaaagttggaaaaagatcttcaacctttcgggaggagagaaaacacttagttcattggctttagtatttgctcttcaccactacaagcccactcccctttacttcatggatgagattgatgcagcccttgattttaaaaatgtgtccattgttgcattttatatatatgaacaaacaaaaaatgcacagttcataataatttctcttcgaaataatatgtttgagatttcggatagacttattggaatttacaagacatacaacataacaaaaagtgttgctgtaaatccaaaagaaattgcatctaagggactttgttgaactttatgctgaagattcttcaagttgattcagtgtattactgatttttttctatttgtaaaggattatgagttgtataaaatacatactccctaaactagatcatgaaactggtttctgttttatgcagttgtcatttgtaaagtctaataaaatattctctataattgcttctagattacaaaaatatgacaatcttgtaagtagcagactatggagaaaaatgagttacctggagggtcaggtaacttgccaaactaaaaagtatgttagttgaggcaaagtcctaagcaaggttgtgctatcaaggctcagcataccttcgtgggcctttgatttaccaacactggaaatgcctgccaactaatcttggatagattctttaaggcattccacttagcttgccagttgagacaatcaccacagttattacccaaatactatgaacatatttttgtaaaccagtcattctgaattatagtgatgagaatttaaatatatgcttttctagaatttgatgtttgaccatttatgacttaattaccagagagccagtaaattaggacagtgtttcaacaagcctaggctatctcgtaagttgaaaaatatcccactatagttgcttcatgagtatgaagtaagatggcctctgatttacactggttcaatttacaaattttcaactttatgataggtttatccgggtactaaatgcatttcaacttgatagtttcaacttatgataggtttaccaggatgtagtcccactgttgaggagcatctatttaggggttaattactttagtaataagtggaaagtaagataccttgagtaatgtttgcctataaaattgtcagcgtatttttacactattggctcaagaatgttataatgctaagggacataagttggcaaccacttggtttttggaaggactttcggtattgtattagaagtctgccctagctgttaaatttctgggtatttatcctaaggaattaattaaagagttaattgttcctttcttcagtgggccattgttttagatatttaaaaaatccaacagtttctatcataatgtaactgtaaaaatgtaaacacattattagcatggacttttaaataaagatttaaagaaagcaagatcggaaa

SEQ ID NO: 1415 - DNA, 4155 bp, Homo sapiens
  source 1..4155: mol_type = genomic DNA
atgacaggatcaaattcacacataacgatattaaccttaaaggtgttacctcattttgaaagtcttgggaaacaggaaaaaattcctaacaaaatgtcagcttttcgaaatcattgtccacatttggattcagttggtgaaataacaaaagaagatttgatacaaaaatcccttggtacttgtcaggattgtaaagtccaaggaccaaatctttgggcatgtctggagaatagatgttcatatgttggctgtggtgaatcacaagtagatcacagcaccatacattctcaggagacaaagcattatctaactgtgaaccttaccactcttcgagtatggtgttatgcttgcagcaaagaagtatttttggataggaaattaggaactcagccttcattgcctcatgtaagacaacctcaccaaatacaagaaaacagtgtccaggattttaaaatacccagtaatacaacattaaaaactcctctggttgccgtatttgatgatctggatatagaagcggatgaagaagatgaacttagggccagaggtcttacaggtttgaaaaatattggaaatacttgttacatgaatgcagctttgcaggctctttctaattgcccacctttgacacagttttttcttgattgtggaggactagctcgaacagataagaaacctgccatttgtaaaagttatctcaaactaatgacagagctgtggcataaaagcaggccaggatctgttgtgcctactactctgtttcaaggaattaaaactgtaaatccaacatttcgggggtattctcagcaggatgctcaagaattccttcgatgtttaatggatttgcttcatgaagaattgaaagagcaagtcatggaagtagaagaagatccgcaaaccataaccactgaggagacaatggaagaagacaagagccagtcggatgtagattttcagtcttgtgaatcttgtagcaacagtgatagagcagaaaatgaaaatggctctagatgcttttctgaagataataatgaaacaacaatgttaattcaggatgatgaaaacaattcagaaatgtcaaaggattggcaaaaagagaagatgtgcaataagattaataaagtaaattctgaaggcgaatttgataaagatagagactctatatctgaaacagtcgacttaaacaaccaggaaactgtcaaagtgcaaatacacagcagagcttcagaatatatcactgatgtccattcgaatgacctgtctacaccacagatccttccatcaaatgaaggtgttaatccacgtttatcggcaagccctcctaaatcaggcaatttgtggccaggattggcaccaccacacaaaaaagctcagtctgcatctccaaagagaaaaaaacagcacaagaaatacagaagtgttatttcagacatatttgatggaacaatcattagttcagtgcagtgtctgacttgtgacagggtgtctgtaaccctcgagacctttcaagatctgtccttgccaattcctggcaaggaagaccttgctaagctgcattcatcaagtcatccaacttctatagtcaaagcaggatcatgtggcgaagcatatgctccacaagggtggatagcttttttcatggaatatgtgaagaggtttgttgtctcatgtgtccctagctggttttggggtccagtagtaaccttgcaagattgtcttgctgccttctttgccagagatgaactaaaaggtgacaatatgtacagttgtgaaaaatgcaaaaagttgagaaatggagtgaagttttgtaaagtacaaaactttcctgagattttgtgcatccaccttaaaagattcagacatgaactaatgttttccaccaaaatcagtacccatgtttcatttccgctagaaggcttggatcttcagccatttcttgctaaggatagtccagctcaaattgtgacatatgatcttctgtcagtcatttgccatcatggaactgcaagtagtggacactatatagcctactgccgaaacaatctaaataatctctggtatgaatttgatgatcagagtgtcactgaagtttcagaatctactgtacaaaatgcagaagcttacgttcttttctataggaagagcagcgaagaggcacaaaaagagaggagaaggatatcaaatttattgaacataatggaaccaagcctccttcagttttatatttctcgacagtggcttaataaatttaagacctttgccgaacctggccctatttcaaataatgactttctttgtattcatggaggtgttcctccaagaaaagctggttatattgaagacctggttttgatgctgcctcagaacatttgggataacctatatagcaggtatggtggaggaccagctgtcaaccatctgtacatttgtcatacttgccaaattgaggcggagaaaattgaaaaaagaagaaaaactgaattggaaatttttattcggcttaacagagcgttccaaaaagaggactctccagctactttttattgcatcagtatgcagtggtttagagaatgggaaagttttgtgaagggtaaagatggagatcctccaggtcctattgacaatactaagattgcagtcactaaatgtggtaatgtgatgcttaggcaaggagcagattctggccagatttctgaagaaacatggaattttctgcagtctatttatggtggagggcctgaagttatcctgcgacctccggttgttcatgttgatccagatatacttcaagcagaagaaaaaattgaagtagaaactcggtctttgtaatttttaggatgtagagagttctaatgaggaatcattttcatgtgccctgacatgtacacatgcgaaaacattcctaaaagcgtgtttatttgctttattttttttcatcatttatcccatttatttcttcttagtgggcattatggaagaatatattaaaatgtgtaatataccacaggttggtatatttagttttaaatacttaccataaagtctttcagtgtaatttttttttgagacagagtcttgctttgtcacccaggctggagtgctgtggtgttacctcagctcactgcagcctccacctcctgggttcaagcgattctcctgcctcagcctctcgagtagctgggattacaggcacctgccaccatgcccggctaatttttgtattttagtagagatggggtttcaccatgttggccaggctagtctcaaactcctgacctcaggtgatccacccacctcggcctcccaaagtgctgggattacaggtgtgagccacagcgcctggcccagtgtaatatttttgaaagaggagggacaattgtgaaatcagtaggttatctttaatctttacactacatgcagatccatagtatcctttgtagtgttgtaaatacttttgctttgaaaactttttcattgtcctaaatcaccctgactctgaccagtctttcagttctccaaaagcccaatttaattgtatagttttgtcatggcttcatataataaagagcctattttaagttgaaagtagtagtcagaaaattgttaatttcctaaagctcaggaaactagggtgtcactttttttgcactgcagcatatacactaactagcttattaaaatttacaaaatgtctttttgaatgtatcaaggatatatttagtttgagtggaatttgtcagcagatatcagtaacttattgccgcttatattgtacaatgttaaacttcaattcctgtaacctggttagtattaatgtcagtgactaaaaaacttagagttagttttagggcactttttattttgagagcatgaagtgtggaatgtgtcactacgattgttgataaagctgaggccacttgcaacttgattttttaaatgaaatagataaagtctttttgaataatatagtatgcactgctatttgcttgattatgtaatgtcaaaagtttaactatattccaagtacaaaaacatactggattacattgaggatgttgaatagcattcatgatggctttgttttggtttggggcagctgtcaccagctaaagcaatgttgttaaaattagctcaataaaaatgtctttaaaatgt

SEQ ID NO: 1416 - DNA, 2852 bp, Homo sapiens
  source 1..2852: mol_type = genomic DNA
aacctgtggacggccgcggccggcggacacacagcagcgggggcccggccgggggtcgcccgggggcccggaagccggggaagagcgaggaaaccaacttggagagaggagtgacctgggggccgggggcggagtcgtgagcgggggaggagagagccggccgccagcaagagccgcgcggcggcccaggaagcgagagcgccgcccacccatccggggcaagagccgcgccgcaggagaggcaggctggaccgggggctccccgggcccgcgacccccgccgtgaccccgcagcccccagctcgcccccaagatgatgaagaggcagctgcaccgcatgcggcagctggcccagacgggcagcttgggacgcaccccggagaccgctgagttcctgggtgaggacctgctgcaggtagaacagcggctggagccggccaagcgggcagcccacaacatccacaagcggctgcaggcctgtctgcagggccagagcggggcagacatggacaagcgggtgaagaagcttcccctcatggctctgtccaccacgatggctgagagcttcaaggagctggaccctgattccagcatggggaaggccttggagatgagctgtgccatccagaatcagctggcccgcatcctggccgagtttgagatgaccctggagagggacgtcctgcagccactcagcaggctgagtgaggaggagctgccagccatcctcaaacacaagaaaagcctccagaagctcgtgtccgactggaacacactcaagagcaggctcagtcaggcaaccaagaattcaggcagcagtcaaggcctaggaggcagcccgggtagtcacagccatacgaccatggccaacaaggtggagacgctgaaggaggaggaggaggagctgaagaggaaagtggagcaatgcagggacgagtacttggctgacctgtaccactttgttaccaaggaggactcctatgccaactacttcattcgtctcctggagattcaggccgattaccatcgcaggtcactgagctcgctggacacagccctggctgagctgagggagaaccacggccaagcagaccactccccttcgatgacagccacccacttccccagggtgtatggggtgtcgctggcaacccacctgcaagagctgggccgggagattgccctgcccatcgaggcctgcgtcatgatgctgctttctgagggcatgaaggaagagggtctcttccgtctggctgctggggcctcggtgctgaagcgtctcaagcagacaatggcctcggacccccacagcctggaggagttctgctccgacccgcacgctgtggcaggtgccctcaagtcctatctgcgggagctgccagagcctctgatgaccttcgacctctatgatgactggatgagggcagccagcctgaaggagccaggggcccggctgcaggccctccaagaggtgtgcagccgcctaccccccgagaacctcagcaacctcaggtacctgatgaagttcctggcacggctggccgaggagcaggaggtgaacaagatgacacccagcaacatcgccatagtcctgggacccaacttgctgtggccacctgagaaagaaggggaccaggcccagctggatgcagcctccgtgtcttccatccaggtggtgggcgtcgtcgaggcgctgatccagagcgcagacaccctcttccctggagacatcaacttcaacgtgtcaggcctcttctcagctgttaccctccaggacacagtcagtgacaggctggcctctgaggaacttccgtccactgccgtgcccaccccagccaccaccccggctccggctccggctccagctccagctccggccccagccttggcttcagcagctaccaaggaaaggacagagtctgaggtgcctcccagaccagcctcccccaaggtcaccaggagtcccccggagacagctgccccagtggaggacatggctcggaggaccaagcgcccggcgccagcccggcccaccatgccgcccccccaggtctccggctcccgctcctcccctccagccccgcccttgccccctggctctggcagccctgggaccccccaagccctgccccgacgtctggttggcagcagcctccgagcccccacagtgccacccccgttaccccccacaccccctcagcctgcccggcgccaaagccggcgttcaccagcctcccccagcccggcctccccaggtccagcctcccccagcccagtctctttgagtaaccctgcacaggtggacctgggggctgccacagcagagggaggagcccctgaggctatcagtggggtccccactcccccagctatcccccctcagccccgccccaggagccttgcctcagagaccaactgagtggctggtttctccctaagcagccctcagcaccccctccctccccacctggccctcccaggacagctctcgccccccacaaaggggcatgggcctccagcctttgcccacaagtgcctcagtgcccactgggtcggcccccatggccaggagggctcaggacaatcctctatttcctgaccttttcctcgtccaccctgggcttggggacccccccaccggactctccactctccggcaggtcctaggggagccaccggaaggaaggagaggtttgcctgctcctacgggactgattcttctcttgccgacatgttttttgtaaggctggtaaataaattattttggacaaaactggagcagctgcccaaatgatagttttattttctgtccttgaaataaagaagccaattttataaaggggaaaacaata

SEQ ID NO: 1417 - DNA, 2605 bp, Homo sapiens
  source 1..2605: mol_type = genomic DNA
ggcctggacgagcgcgcttccgacccgccgccaccgcctcctcccctccttctcggcccgccccctccctcgcctcttcctgccaggcggcccttctcccctcccctctcagttccctccgccctcctcgggctccagcggtggcggagcgaacgggaccggcccggcttcagagcgcgaggtggagggtggaacgcgggcgcctgaaggagttgttgtctcggcagcgcccgcggagacgtgaagaggtggttgtgggaagagaagtttgcagaactgaaatggaggtcagagcttcattacagaagatagtttctaatggtgatgaacaattggaaaaagccatggaagagattttgagagattccgagaaaaggccaagcagtcttcttgttgattgtcaaagttccagtgagatttcagaccattcgtttggagatattccagccagccaaacaaataagccatctcttcagttaattttggatccgtctaacacagaaatttctacacccagaccatcttctccaggtggactacctgaagaagatagtgttttatttaataaactgacctacttaggatgtatgaaggtttcttccccacgtaatgaagtagaggctttacgggcaatggcaaccatgaaatcttccagtcaatacccctttcctgttaccctgtatgtaccaaatgttccagaaggttctgtgagaattatagaccaatccagcaatgtggagatagcatcttttccaatctataaggtgttattctgtgcacgtggacatgacggaacaacagagagcaattgctttgcatttacagagagttcccatggttcggaagaatttcagatacatgttttctcctgtgaaattaaagaggcagtaagcagaattttgtacagtttctgtacagcattcaaacgttcttccagacaagtgtctgatgttaaagactcagttattcctacccccgacagtgatgtgtttaccttcagtgtctccttggaggtaaaagaagacgatggaaaaggaaactttagccctgtgcctaaggatagagataaattttatttcaaattaaagcaaggaatagagaagaaggttgtgattacagtgcagcaactttctaacaaagaattagctattgaaagatgttttggaatgttattaagcccaggtcgaaacgtgaagaacagtgacatgcatttactggatatggaatccatgggaaagagctatgatgggagagcttatgtcatcactggcatgtggaaccccaatgcaccagtatttctggcacttaacgaggaaaccccaaaagataagcaagtatacatgactgtggcagtggatatggtagtcacagaggtggtggagcctgttcgctttctcctggagacagtagtccgtgtgtaccctgcaaatgagcgattttggtatttcagcagaaagactttcacagagactttcttcatgagattgaaacagtctgagggaaaaggccataccaatgctggagatgcaatatatgaggtggtgagtctacagcgagagtctgacaaggaggaaccagtcactcctactagtggagggggtccaatgtcaccccaggatgatgaagcagaagaggagagtgataatgaactctcaagtggaacaggtgatgtgtctaaggattgtcctgagaagatcctgtattcttggggagagttgctaggaaaatggcacagtaaccttggtgcacgaccgaaagggctgtctactctggtgaagagtggtgtccctgaagcattgagggcagaggtatggcagttattggcaggctgccatgacaaccaggcaatgctggatagataccgaattcttatcacaaagcaacagatgaaatttagtcttacaccgagacagactattcacctagttaaatatgaagggtctatgaaggtctccatgacaccctgtaaccagctgcaatttgacattagacttgatgttctgattacttatactttttgttttagttcctttcctgagcctgaattgtacaaatatgtcctaaaacaccaacttattaagaggcttaatgcctgttaaatgcgtcagtgctcttggcagcttagcatgagtgctttctttgcatgggaggttgcagtttagaagcaactttatggatcatttcccaggttgatgttacatatgttcattttacaacctgtgtgcataatctctcagggtgaaggtaattaagagaaagcataatctacagaattgaagccaagtaatctaagattctgtttttaaactctttgctatataacattagttaagttgtttaccctcttaatttatccatttgtaaaatgatagtttttgtttttaaagtgctctattacccttactttaaaagtcctgtctaccatatatttaaaactataagtggaaataatgaagaaactctgaacttgcttttgcttatatatggatatatcatattatatgcctaagattggagataaattttataacctgattttctcatggcagtgtacaaatgaaattattctgtaagtttttcaaaacagtaaaatcactatttttca

SEQ ID NO: 1418 - DNA, 6815 bp, Homo sapiens
  source 1..6815: mol_type = genomic DNA
gaacgctcacagaacaggcagtgcaattccatgttcctcttaagtatgttagccctaccgggagctgagctggccagtctacttggagaggaaaagtagatctggggaaggtggaagggtcagttcctaagtgacttcctcctcggggatggtaagggcatttgctgatctccagtgactgcctggtgcctcatggtcagactcggctgtctcactcccagatatctgattttgcaaaaagggacacacctatctgcagcaaagaagacactgaccagattgcgagcggtgcttttggatgctctgtagccacccggggcccaggaggactgactcggcagcaggattcgtgcatgggaatcggagaccatggcagtgcagctggtgcccgactcagctctcggcctgctgatgatgacggagggccgccgatgtcaagtacatcttcttgatgacaggaagctggaactcctagtacagcccaagctgttggccaaggagcttcttgaccttgtggcttctcacttcaatctgaaggaaaaggagtactttggaatagcattcacagatgaaacgggacacttaaactggcttcagctagatcgaagagtattggaacatgacttccctaaaaagtcaggacccgtggttttatacttttgtgtcaggttctatatagaaagcatttcatacctgaaggataatgctaccattgagcttttctttctgaacgcgaagtcctgcatctacaaggagcttattgacgttgacagcgaagtggtgtttgaattagcttcctatattttacaggaggcaaagggagatttttctagcaatgaagttgtgaggagtgacttgaagaagctgccagcccttcccacccaagccctgaaggagcacccttccctggcctactgtgaagacagagtcattgagcactacaagaaactgaacggtcagacaagaggtcaagcaatcgtaaactacatgagcatcgtggagtctctcccaacctacggggttcactattatgcagtgaaggacaagcagggcataccatggtggctgggcctgagctacaaagggatcttccagtatgactaccatgataaagtgaagccaagaaagatattccaatggagacagttggaaaacctgtacttcagagaaaagaagttttccgtggaagttcatgacccacgcagggcttcagtgacaaggaggacgtttgggcacagcggcattgcagtgcacacgtggtatgcatgtccggcattgatcaagtccatctgggctatggccataagccaacaccagttctatctggacagaaagcagagtaagtccaaaatccatgcagcacgcagcctgagtgagatcgccatcgacctgaccgagacggggacgctgaagacctcgaagctggccaacatgggtagcaaggggaagatcatcagcggcagcagcggcagcctgctgtcttcaggttctcaggaatcagatagctcgcagtcggccaagaaggacatgctggctgccttgaagtccaggcaggaagctctggaggaaaccctgcgtcagaggctggaggaactgaagaagctgtgtctccgagaagctgagctcacgggcaagctgccagtagaatatcccctggatccaggggaggaaccacccattgttcggagaagaataggaacagccttcaaactggatgaacagaaaatcctgcccaaaggagaggaagctgagctggaacgcctggaacgagagtttgccattcagtcccagattacggaggccgcccgccgcctagccagtgaccccaacgtcagcaaaaaactgaagaaacaaaggaaaacctcgtatctgaatgcactgaagaaactgcaggagattgaaaatgcaatcaatgagaaccgcatcaagtctgggaagaaacccacccagagggcttcgctgatcatagacgatggaaacattgccagtgaagacagctccctctcagatgcccttgttcttgaggatgaagactctcaggttaccagcacaatatcccccctacattctcctcacaagggactccctcctcggccaccgtcgcacaacaggcctcctcctccccagtccctggagggactccgacagatgcactatcaccgcaacgactatgacaagtcacccatcaagcccaaaatgtggagtgagtcctctttagatgaaccctatgagaaggtcaagaagcgctcctctcacagccattccagcagccacaagcgcttccccagcacaggaagctgtgcggaagccggcggaggaagcaactccttgcagaacagccccatccgcggcctcccgcactggaactcccagtccagcatgccgtccacgccagacctgcgggtccggagtccccactacgtccattccacgaggtcggtggacatcagccccacccgactgcacagcctcgcactgcactttaggcaccggagctccagcctggagtcccagggcaagctcctgggctcggaaaacgacaccgggagccccgacttctacaccccgcggactcgtagcagcaacggctcagaccccatggacgactgctcgtcgtgcaccagccactcgagctcggagcactactacccggcgcagatgaacgccaactactccacgctggccgaggactcgccgtccaaggcgcgccagaggcagaggcagcggcagcgggcggcgggcgcactgggctcagccagctcgggcagcatgcccaacctggcggcgcgcgggggtgcggggggcgcggggggcgcggggggcggtgtgtacctgcacagccagagccagcccagctcgcagtaccgcatcaaggagtacccgctgtacatcgagggcggcgccacgcccgtggtggtgcgcagcctggagagcgaccaggagggccactacagcgtcaaggctcagttcaagacgtccaactcctacacggcgggcggcctgttcaaggagagctggcgcggcggcggcggcgacgagggcgacacgggccgcctgacgccgtcgcgatcgcagatcctgcggactccgtcgctgggccgcgagggcgcccacgacaagggcgcgggccgtgccgccgtctcagacgagctgcgccagtggtaccagcgttccaccgcctcgcacaaggagcacagccgcctgtcgcacaccagctccacctcctcggacagcggctcgcagtacagcacctcctcccagagcaccttcgtggcgcacagcagggtcaccaggatgccccagatgtgcaaggccacgtcagctgccttacctcaaagccagagaagctcgacaccgtcaagtgaaattggagccacccccccaagcagcccccaccacatcctaacctggcagactggagaagcaacagaaaactcacccattctggatgggtctgagtctccacctcaccaaagtactgatgaatagaggagctacaatgatagctgtttcctggattcctccctctatccagaactagctgatgtccagtggtacgggcaggaaaaagccaagcccgggaccctcgtgtgagccagcccggcctaatctgaccgcctcaacgccattctgagatcacctcactgcctctcatttgccttacccagacgcaccgtcaccctgcaccagctttggccctcagcactttttttctcctgtctccgcattccctcccccttgaaaacctgactgaggagacattctggaaggttccggtcccactgtgtgtcccctggcgctcttgcccatagagagccagacaccaatcctcaatggcaccttggtggcttccctctgccatgacagcccctaggccaggaaccatcaggggggccagccggcatccaattcctgcggataagtagcgttgggagagaacgggaaaggggacttgagttacagggtgacccagaaagacgattcagctgtgtccagcctgccacccatacgtaggccaaccaagcacttcatgaagaggaggcctcgtggcatattcagtttacacctgaaatattccttgatgggacagcttgtggggatggctatgggggaaggggaggttgagaaaggaagttctcgacaccagaaatgcatcggaggaccacaatcagttctatgctgccaaagattaaaaataaataaaaacataaaaaattaagaggggccaagaggaagacattctttctgcaaggaaatttcttttaaattctgaactgctactacacacaagtgaaagtcaaccctatgtaaactggtgtcctctctctagccctctcccttactggcccacttctctctccgtagagagcctgaaaaactgccccaatgccacggtaaaggcgaggaagtcttggctggcgttgctgactcacagtcgccatccatctggacacaaagagagacctgtgggagtcgtagagggtactgttagccccggtccatgcagggggttcagccgagcccaagactcaaagctgctttcctttcaggatttgtagtaacgtaaggtgataatggccaaaagtggttctctctcattaaaccaaccagtaaaagcgtatcctatttttttgcacaaggtgtttcattttcgtttttatgggaaaccaagggaaaagcacattgcgatccattcagtgtttaactgtcgtggctcattttctgttcgttagcacttgtgtgacaaaagagctcagatccgacttctcctatgtgtcacttattccaagaacccaactatgcccttaggtagaaagatttgactcgtgtgtctactagccaacaggcagagcagggttgaaaaaaatatcagctcccaaagggcccatgtgtctacatcatcagttactgtcatgcaccacatttgtgtgcagataccaaaagaggaggaaagaagaaaaaaattaatgtgtgggagctgcacgtttacatgttttgagctatgcttcaaacacaactggaaagccatcaatcttcaaaggcctcaaaaatacttttatagtaacaagtgcacgactttagttgggttattcaagatggcacaaaaaggtttccgcagaggtggtatgctgtgcttttggcgcaagtggtggggggatggggtgggggtggaatttttttctcactctaatgacttcctattggaaaggcattgacagccagggacaggagccagggtgggggtagttttgtgggaaagcagaactgaagttagcttaagcataaaaacaaagaaaaatcttcgcttttcatgtatgtggaatccaagaataaccataggctctaccagaccagaagggtaaggatggacactaaaatgaaacaaataccaaggtattccttctgctgcagcctggagaccaccgagagtcgagctggggcacacacacacctggccgggacccggcagggacaaggcgggccgtggcctcctccaccaagtctctctagacaattcagggcctgctttccccagctccatgcatggctggactggtgattccagggtgcagaagggattcatattcccagaacgctttaagtgtacacctgcaggataaagagataccggttacattattaaatgattctagggattcactgggggatatttttgttgcttttactttcatggttagagctacaaagaacagtgattttttttttttctcccttccccattcagaaacattatacattgggccatttttctttctcccaaagaagattcatggatagtcagactgaactgtgtgcaacaggaaaagtcaaaagggaaaaggtagctgatgaggttacatggttacatgttctacatcatgcatagtagcttgaaatctagtctggagaaaactggatcaagattctagcccactggagttgcaaggaatgagaggcaaaaattctaaagatttgggttatattttcaacttgggggacagagagaaatggagagcaggaattacagttccaacaaacatcatgatagtctggtagtcaagacagagattaagtaaaacaggttttactgtttagctgagttcagttaatacaaaatgtacataaaacgttagtcctttgagactgacatgattaatgatcagtgtggtgggaaatgatgtagttattgtacacaagcacttgcaaactctttatccctatttctttaaaacaaaataaggtgaaatacgaagtccttggtctgatataaagcccctattggattcttcggatgcgtaaaagaaattgcctgtttcagccagaagactggtgaaaacacatacatcagactatgttgtgagccaggttgattttttattttattatatgcaggtgagtgttgaaactgttaaaattccaatttgttttcattcagtattagtttagttctaaatatagcaaaccccatccaggtgctatcagatgaccagttactgcttagttaactaggtgtaaagttttacatatacattaatgtcaatagtttattacaagttgtgtaaaatggactctagtttaataatgggggaaaaaagattaggttgctcctgaaactgactgtagagcatgtaaaatgattttactggattctgttcaactgtaatcaatgaaaaagatgtacgttgtagacaaagttgcagaattaaaaaaagaaatctgcttttaatttattctttttgtattaagaatttgtatagtacctttacattttgcaaaacagtgttgtcaacacttattaaagcattttcaaaatg

SEQ ID NO: 1419 - DNA, 4031 bp, Homo sapiens
  source 1..4031: mol_type = genomic DNA
gattggaaacccggagttacctgctagttggtgaaactggttggtagacgcgatctgttggctactactggcttctcctggctgttaaaagcagatggtggttgaggttgattccatgccggctgcctcttctgtgaagaagccatttggtctcaggagcaagatgggcaagtggtgctgccgttgcttcccctgctgcagggagagcggcaagagcaacgtgggcacttctggagaccacgacgactctgctatgaagacactcaggagcaagatgggcaagtggtgccgccactgcttcccctgctgcagggggagtggcaagagcaacgtgggcgcttctggagaccacgacgactctgctatgaagacactcaggaacaagatgggcaagtggtgctgccactgcttcccctgctgcagggggagcagcaagagcaaggtgggcgcttggggagactacgatgacagtgccttcatggagcccaggtaccacgtccgtggagaagatctggacaagctccacagagctgcctggtggggtaaagtccccagaaaggatctcatcgtcatgctcagggacactgacgtgaacaagcaggacaagcaaaagaggactgctctacatctggcctctgccaatgggaattcagaagtagtaaaactcctgctggacagacgatgtcaacttaatgtccttgacaacaaaaagaggacagctctgataaaggccgtacaatgccaggaagatgaatgtgcgttaatgttgctggaacatggcactgatccaaatattccagatgagtatggaaataccactctgcactacgctatctataatgaagataaattaatggccaaagcactgctcttatatggtgctgatatcgaatcaaaaaacaagcatggcctcacaccactgttacttggtgtacatgagcaaaaacagcaagtcgtgaaatttttaattaagaaaaaagcgaatttaaatgcactggatagatatggaagaactgctctcatacttgctgtatgttgtggatcagcaagtatagtcagccttctacttgagcaaaatattgatgtatcttctcaagatctatctggacagacggccagagagtatgctgtttctagtcatcatcatgtaatttgccagttactttctgactacaaagaaaaacagatgctaaaaatctcttctgaaaacagcaatccagaacaagacttaaagctgacatcagaggaagagtcacaaaggttcaaaggcagtgaaaatagccagccagagaaaatgtctcaagaaccagaaataaataaggatggtgatagagaggttgaagaagaaatgaagaagcatgaaagtaataatgtgggattactagaaaacctgactaatggtgtcactgctggcaatggtgataatggattaattcctcaaaggaagagcagaacacctgaaaatcagcaatttcctgacaacgaaagtgaagagtatcacagaatttgtgaattactttctgactacaaagaaaagcagatgccaaaatactcttctgaaaacagcaacccagaacaagacttaaagctgacatcagaggaagagtcacaaaggcttaaaggcagtgaaaatggccagccagagaaaagatctcaagaaccagaaataaataaggatggtgatagagagctagaaaattttatggctatcgaagaaatgaagaagcacagaagtactcatgtcggattcccagaaaacctgactaatggtgccactgctggcaatggtgatgatggattaattcctccaaggaagagcagaacacctgaaagccagcaatttcctgacactgagaatgaagagtatcacagtgacgaacaaaatgatactcagaagcaattttgtgaagaacagaacactggaatattacacgatgagattctgattcatgaagaaaagcagatagaagtggttgaaaaaatgaattctgagctttctcttagttgtaagaaagaaaaagacatcttgcatgaaaatagtacgttgcgggaagaaattgccatgctaagactggagctagacacaatgaaacatcagagccagctaagagaaaagaaatatttggaggatattgaaagtgtgaaaaaaaggaatgataatcttttaaaggctctacaattgaatgagctcaccatggatgatgataccgctgtgctcgtcattgacaacggctctggcatgtgcaaggccggctttgcgggcgacgatgccccccgggctgtcttcccttccatcgtggggcgccccaggcagcagggcatgatggggggcatgcatcagaaagagtcctatgtgggcaaggaggcccagagcaaaagaggcatcctgaccctgaagtaccccatggaacacggcatcatcaccaactgggatgacatggagaagatctggcaccacaccttctacaacgagctgcgtgtggctcccgaggagcaccccgtcctgctgaccgaggccaccctgaaccctaaggccaaccgcgagaagatgacccagatcatgtttgagaccttcaacaccccagccatgtacgtggccatccaggctgtgctgtccctgtacacctctggccgtactactggcatcgtgatggactctggtgacggggtcacccacactgtgcccatctatgaggggaatgccctcccccatgccaccctgcgcctagacctggctgggcgggaactgcctgactacctcatgaagatcctcaccgagcatggctataggttcaccaccatggccgagcgggaaatcgtgcgtgacatcaaagagaagctgtgctatgttgccctggacttcgagcaggagatggccacggtggcctccagctcctccctagagaagagctacgagctgcccgatggccaggtcatcaccatcggcaacgagcggttccgctgccccgaggcgctcttccagccttgcttcctgggcatggaatcctgtggcatccatgaaactaccttcaactccatcatgaagtctgatgtggacatccgcaaagacctgtacaccaacacagtgctgtctggcggcaccaccatgtaccctggcatggcccacagaatgcagaaggagatcgctgccctggcgcctagcatgatgaagatcaggatcattgctcctcccaagcgcaagtactccgtgtgggtcggtggctccatcctggcctcgctgtccaccttccagcagatgtggatcagcaagcaggagtatgatgagtcaggcccctccattgtccaccgcaaatgcttgtaggtggactctgacttagttgcgttacaccctttcttgacaaaaccaaacttctcagaaaacaacatgagattggcatggctttatttgttttcttgtttcattttttgttttgttttttattggcttgactcaggatttaaaaaccggaatggtgaaggtgacagcagtcggttggaggaagcttcctccaaagttctacaatgtggccaaggactttgattgtaccttgttcttcttttcaatagtcattccaaatattgtgagacgcattgtttcaggaagccccttgccctgctaaaagccaccccacttctctctaaggagaatggcccagtcctctccctagttcacacaggggaggtgatagcattgcttttgtgcaaattacataatgcaaaattttttgaatcttcgccttaatactttttaattttgttttattttgaatgatcagccttcgtggcccccctcttttgtaccccaacttggggtgtatgaaggcttttggtctccctgagagtggctggaggcagccagggcttacctgtactctgacttgaggagagttggataaaagtgcacaccttaaaacaaattgaggaagcacagtatttcagtacagtggacagcttagcatgttgacaactgagaataaaatgctcagttctgaactggacaatgtaagacacaacgaggaaacactggaaat

SEQ ID NO: 1420 - DNA, 2563 bp, Homo sapiens
  source 1..2563: mol_type = genomic DNA
ctcccctgctgcagcaaggccctcccccatccgcacacacaggctgctgggtaagtggcaagatggctcccctgcatgtctccggctgatcgctgccgctccgccaatacaatagagccagccactaccagcagcctggccctcttcctccttctccagagagaccaatccagccgaactcggggtttgccaaagggataaacagcacttccagggggagaaaaaaaatcatgttatcagaaagcaaagaaggtgaggagaaggaggaagtgaccatggacacaagtgaaaacagacctgaaaatgatgttccagaacctcccatgcctattgcagaccaagtcagcaatgatgaccgcccggagggcagtgttgaagatgaggagaagaaagagagctcgctgcccaaatcattcaagaggaagatctccgttgtctcagctaccaagggggtgccagctggaaacagtgacacagaggggggccagcctggtcggaaacgacgctggggagccagcacagccaccacacagaagaaaccttccatcagtatcaccactgaatcactaaagagcctcatccccgacatcaaacccctggcggggcaggaggctgttgtggatcttcatgctgatgactctcgcatctctgaggatgagacagagcgtaatggcgatgatgggacccatgacaaggggctgaaaatatgccggacagtcactcaggtagtacctgcagagggccaggagaatgggcagagggaagaagaggaagaagagaaggaacctgaagcagaacctcctgtacctccccaggtgtcagtagaggtggccttgcccccacctgcagagcatgaagtaaagaaagtgactttaggagataccttaactcgacgttccattagccagcagaagtccggagtttccattaccattgatgacccagtccgaactgcccaggtgccctccccaccccggggcaagattagcaacattgtccatatctccaatttggtccgtcctttcactttaggccagctaaaggagttgttggggcgcacaggaaccttggtggaagaggccttctggattgacaagatcaaatctcattgctttgtaacgtactcaacagtagaggaagctgttgccacccgcacagctctgcacggggtcaaatggccccagtccaatcccaaattcctttgtgctgactatgccgagcaagatgagctggattatcaccgaggcctcttggtggaccgtccctctgaaactaagacagaggagcagggaataccacggcccctgcaccccccacccccacccccggtccagccaccacagcacccccgggcagagcagcgggagcaggaacgggcagtgcgggaacagtgggcagaacgggaacgggaaatggagcggcgggagcggactcgatcagagcgtgaatgggatcgggacaaagttcgagaagggccccgttcccgatcaaggtcccgtgaccgccgccgcaaggaacgtgcgaagtctaaagaaaagaagagtgagaagaaagagaaagcccaggaggaaccacctgccaagctgctggatgaccttttccgaaagaccaaggcagctccctgcatctattggctcccactgactgacagccagatcgttcagaaagaggcagagcgggccgaacgggccaaggagcgggagaagcggcgaaaggagcaagaagaagaagagcaaaaggagcgggagaaggaagccgagcgggaacggaaccgacagctggagcgagagaaacgtcgggagcacagtcgggagagggacagggagagagagagagaaagggagcgggacaggggggaccgagatcgggatagggaaagggaccgagaacgaggcagggaaagggatcgcagggacaccaagcgccacagcagaagccggagtcggagcacacctgtgcgggaccggggtgggcgccgctagctgggaaaacactagagctgcaggtaccagccactcggccccagggggttatggccacagagggataggcacagtctccaccaccctggagccaagggtctttcacatcacctatccctacatacataccaaatggaaaagtggccatccttttccccccaaacacacccccttaacctatctcttgggacttagcccgaccctccctctcatttcccattaagtctgagaggcaagagctaggttaggcaaggaggtggttggccagagatggggaacagccaggtgccccagtcctctgatttttcctccatcctgcttaccacctccctgggtacttacagccttctcttgggaacagccggggccaggactgggtcacctatgagctgaatcagcatctcctcctgagtcccagggcccctgcagttcccagtctcttctgtcctgcagcccttgcctctttcccacaggttccactttatatccaccttttccttttgttcaatttttatttttattttttttattattaaatgatgtggtctatggaaaaaaaaataaaaatctgacttagtttt

SEQ ID NO: 1421 - DNA, 1348 bp, Homo sapiens
  source 1..1348: mol_type = genomic DNA
ttttctgcccgtggacgccgctgaagaagcatcgttaaagtctctcttcaccttgccgtcatgtctaagtcagcgtctccaaaagagcccgaacagctgaggaagctcttcattggagggttgagctttgaaacaactgatgagagcctgaggagccattttgagcaatggggaacgctcacagactgtgtggtaatgagagatccaaacaccaagcgctccaggggctttgggtttgtcacatatgccactgtggaggaggtggatgcagctatgaatacaacgccacacaaggtggatggaagagttgtggaaccaaagagagctgtctccagagaagattctcaaagaccaggtgcccacttaactgtgaaaaagatatttgttggtggcattaaagaagacactgaagaacatcacctaagagattattttgaacagtatggaaaaattgaagtaattgaaatcatgactgaccgaggcagtggcaagaaaaggggctttgcctttgtaacctttgacgaccatgactccgtggataagattgtcattcagaaataccatactgtgaagggccacaactgtgaagttagaaaagccctgccaaagcaagagatggctagtgcttcatccagccaaagaggtcgaaggggttctggaaactttggtggtggtcgtggagatggtttcggtgggaatgacaactttggtcgtggaggaaacttcagtggtcgtggtggctttggtggcagctgtggtggtggtggatatggtggcagtggggatggctataatggatttggtaatgatggaagcaattttggaggtggtggaagctacaatgattttggcaattacaacaatcagtcttcaaattttggacccatgaagggaggaaattttggaggcagaagctctggcccctatggcggtggaggccaatactttgcaaaaccacaaaaccaaggtggctatggcgtttccagcagcagcagtagctatggcagtggcagaagattttaattaggaaacaaagcttagcaggagaggagagccagagaagtgacagggaagctacaggttacaacagatttgtgaactcagccaagcacagtggtggcagggcctagctgctacaaagaagacatgttttagacaaatactcatgtgtatgggcaaaaaactcgaggactgtatttgtgactaattgtataacaggttattttagtttctgttctgtggaaagtgtaaagcattccaacaaagtgttttaatgtagatttttttttttgcacccatgctgttgattgctaaatgtaatagtctgattgtgacgctgaataaatgt

SEQ ID NO: 1422 - DNA, 4335 bp, Homo sapiens
  source 1..4335: mol_type = genomic DNA
gatacttgctgtaagtagcaaaaagatgggaaggaaagtctacagaccaaatcatatctgaatctccccattctccctctccacaaatattggtttaggaattctccgaagtttgaaggttatgaatggttatcactcaaggattcagaactaagcagaggaaagaaattcctaagggaacactgctcagaaagtactgcagcatgtcttcaaatgcctgaggatcaagttggaaaactagaagcaacagaaaacacaataagccccaggcgtgagtcactggagagcgcgacgggaggaaggggcgccctgagtccacagccctgggggaggtcggagggtctgaaagcgagaagtccgtgagtagaagcgcaatggcggcggccgcggcggagcagcaacagttctacctgctcctgggaaacctgctcagccccgacaatgtggtccggaaacaggcagaggaaacctatgagaatatcccaggccagtcaaagatcacattcctcttacaagccatcagaaatacaacagctgctgaagaggctagacaaatggccgccgttctcctaagacgtctcttgtcctctgcatttgatgaagtctatccagcacttccctctgatgttcagactgccatcaagagtgagctactcatgattattcagatggaaacacaatctagcatgaggaaaaaagtttgtgatattgcggcagaactggccaggaatttaatagatgaggatggcaataaccagtggcccgaaggtttgaagttcctttttgattcagtcagctctcaaaatgtgggactgcgggaagctgcccttcacattttctggaactttcctggaatttttgggaaccagcaacaacactatttagatgtcatcaaacgaatgttagttcagtgtatgcaagatcaggaacacccgtcgatcaggacgttatctgctagagctacagctgcatttatacttgcaaatgagcataatgttgctctgttcaaacattttgcagacttgctaccgggattcctacaggcggtaaatgactcgtgctaccagaatgatgattctgtcctaaaatccctcgttgagattgcagatactgttccaaagtatttgcgtcctcacttggaagcaactctacagctaagtctaaagttgtgtggagacactagcctcaacaatatgcaacgccagcttgcccttgaagtgatcgtcaccctctctgagactgcagctgctatgttaagaaaacataccaatattgttgcacagactattcctcagatgttagcaatgatggttgatttggaagaagatgaggactgggcaaatgcagatgaactagaagatgatgattttgacagcaatgcagttgcaggcgagagtgctctagatcgaatggcttgcggacttggtggaaagctcgttctgccgatgatcaaggaacacattatgcaaatgcttcaaaatcctgactggaaataccggcatgcaggattgatggccttatctgccattggtgaagggtgccaccagcaaatggaaggaattctaaatgagatcgtaaattttgttttactttttctccaggatcctcatccaagagtaaggtatgcagcctgtaatgccgtgggacagatggctacagattttgcacctggtttccaaaagaaatttcatgagaaggtgattgcagctctgctgcagaccatggaagaccaaggcaatcaacgtgtgcaggcccatgcagctgctgccctcattaactttactgaagactgtcccaagtcactacttattccatacttggataatttggtgaaacatctgcattccattatggtactgaagcttcaagagctgattcagaaaggcaccaagttagttttggaacaagttgtgacatccattgcatcagttgccgatactgcagaagaaaaatttgtcccctactatgatttatttatgccatcactgaagcacatcgttgagaatgcggttcaaaaagaactgagacttctgagaggaaaaactattgaatgcattagcctcattggtctggctgttgggaaggaaaaattcatgcaggatgcatcagatgtgatgcagcttttgttaaagacccagacagacttcaatgatatggaagatgatgatcctcagatctcttacatgatctcagcatgggccagaatgtgcaaaatccttggaaaagaatttcagcaataccttccagtggttatggggcctttaatgaagacggcttcaattaagcccgaagtagcccttttagatacccaagacatggagaatatgagtgatgatgatggttgggaatttgtgaaccttggagatcagcaaagctttggtattaaaactgcaggactagaagaaaaatcaactgcttgccagatgttggtttgctatgctaaggagttaaaggaaggctttgtggagtacaccgaacaggttgtcaaactgatggtccctttactgaaattttatttccacgatggtgttcgagtggcagcagcggaatccatgcctcttctcctggagtgtgcaagagtccgtggtcctgagtatctcacacagatgtggcattttatgtgtgatgctctaattaaggccattggtacagaaccagattcagacgtcctctcagaaataatgcattcttttgcaaagtgcattgaagtaatgggagatggatgccttaataatgaacactttgaagaactgggaggtatattgaaagcaaagcttgaagaacattttaaaaatcaagaattacgacaagttaaaagacaagatgaagactatgatgaacaggtcgaagagtcactacaagatgaggatgataatgatgtttatattctgaccaaagtgtcagatattttacactcaatattcagtagctacaaagaaaaggtgttaccatggtttgaacagctgcttccattaattgtcaacctcatttgtccacatagaccatggccagacagacaatggggattatgcatctttgatgatgtcatagaacactgtagtccagcctcatttaaatacgcagaatatttcttaagaccaatgctccaatatgtatgtgacaacagcccagaagtcaggcaagcagctgcatatggcctgggagtcatggcacagtacggtggagataattatcgccctttttgtacagaagcacttcccctgctggtaagagttattcagtctgcggattctaagaccaaagaaaatgtcaatgctacagagaactgcatctcagcagtagggaaaatcatgaagttcaagcctgactgtgtaaacgttgaagaggtccttccacactggttgtcttggcttccactacatgaagataaagaagaagctgttcagactttcaattatctgtgtgacctgattgaaagtaatcatccaattgttcttggcccaaacaataccaatctgcccaaaatatttagtataattgcggaaggagaaatgcacgaggcaattaaacatgaagatccttgtgccaaacgtctggccaatgtcgttcgccaagtacagacttctggaggactgtggactgagtgcatagcacagctcagtcctgagcagcaggccgccattcaggagctcctgaactctgcgtgaagggccttaatgtcacccaccagaaaactaactccaaataaacgcttaccctttcctttaggtttctttgttttgtttttgagcaaaagagatcggtagtgttgtgtgtaggccattcttctggagagccacaagcaggaagagcagcgctgtgttgcagaatggagtttccatggatttctaccagaccactgaaggagttcctggaagccctgcggtagctagcactgaagactatttttctattggtataacccgcccacctgaaggggaaagggaaatcaaattaatttttctcgttagacataaggaaatttaaggaaaaacagctttaagaacagttactcagcgtagatgtgtgttcacacaaattgctctgcattcagtgttcattgtgaattgggagtgtgagtctttctgtagggtagaaagaagcctcctacccagcaaaccagtagacccaaaagttgaaaaaaactgatgacagacaacaagcatgaagatggcatatttgatgtcactttggttctttttcccagaaggcttatacagtgactcagtcgggaagctttccagcttccagcccttgaatgtgaagtgtcattggcatgtctggcagtagtctctcattcactcctcaataaacaacattgaatacaaaagaggc

SEQ ID NO: 1423 - DNA, 3395 bp, Homo sapiens
  source 1..3395: mol_type = genomic DNA
cttctcttgtgtaatcagctgcctatttggaaattgggcagggtttgcgactggatgctaatgtcactgactagttttcagcctaccatccagaagtaacatgttcccagctttggaaacgcacctaaagcagactattcctgatccttatgaagactttatgtaccgtcacctccaatattatggctactttaaagctcagagaggcagtttaccaaactctgctacgcatcagcatgttcggaagaataaccctcaatgcctgttgaatggctctcttggggaaaaagatgatttgataccagacaccctgcaaaaggagaagcttctatggcctatcagtttatcttcagctgtgcacagacagatagaagccatcaacagagactttcactcttgcctgggctggatgcagtggcgcggcctcagctcactgcaacctccacctcccagattcaaggattctcctgcctcagctttccgagtagctgggattacagattcacatatgctgagtttaccacatcttaggagcagacagcttctttatgatgagttggatgaagtaaacccacgtcttcgagaaccccaagagctcttttccattttgtctaccaagaggccactgcaggctccaagatggccaattgaatgtgaggtcatcaaggaaaacatccatcatattgagtgggctccacctcaaccagaatatttctatcagcctaaaggaaatgaaaaggtaccagagattgtaggagagaaaaaaggaacagttgtctatcaattagattcagtgcctatagaaggttcctattttaccagttccagagtgggaggcaaacgaggaattgtcaaggaacttgctgtcacgttgcaaggaccagaagataatactctactgtttgaatcaaggtttgagagtgggaatctgcaaaaagctgtcagagtagacacctatgagtatgaactcaccttgcgaactgacctctacactaacaaacacactcagtggttttattttcgtgttcagaacaccagaaaagatgctacctatcgcttcaccattgtcaacttgctaaaacccaagagtctttatactgtagggatgaagccactcttgtactcccaattggatgccaacacccgcaatattggctggaggagagaaggaaatgaaatcaagtactacaagaacaacacggatgatgggcagcagcccttctactgtctcacgtggaccattcagtttccatatgaccaggacacttgcttctttgcacacttctacccatatacatacactgatttgcaatgctacctcctgtcagtggcaaacaaccctatccagtctcagttctgcaagctccaaactttatgcaggagcctagcaggaaataccgtttacttgctcaccatcaccaacccatcccagacccctcaagaggcagctgcaaagaaagctgtggtcttgagtgccagagttcaccctggagaaagtaatggctcctgggttatgaaaggctttttggacttcatccttagcaactccccagatgcccagctcctcagagatatttttgtcttcaaggtgcttcccatgttaaatccagatggtgtgattgtggggaattatcggtgttccttggccggaagggatttgaacaggcattataaaaccattctgaaggagtctttcccttgtatttggtacaccaggaacatgatcaaaagacttcttgaagaaagagaggttctgttgtattgtgatttccatggccacagtcgtaagaataatatcttcctgtatggctgtaataacaacaatcgcaaatactggcttcatgaacgagtctttcctttaatgttatgcaaaaatgcaccagataagttctcttttcacagttgtaattttaaggtccaaaaatgcaaagaaggaacaggacgagttgttatgtggcggatgggaatcctaaacagctacaccatggagtctacctttggcgggtccaccctgggtaataaaagagacacccactttaccatcgaagatctgaagtccttaggttatcatgtctgtgacacccttctggacttttgtgatcctgaccaaatgaagttcactcagtgtctagcagagcttaaggagcttttacgacaggaaatccacaagaaattccatgaacttggacaagatgtagatttagaaggaagttggagtgacatctctttgtctgacattgaatccagaaacagcaccagtggctctgacagttctctctcagatggtcttcctgttcacctagcaaacatagcagatgagctgactcagaaaaagaagatgtttaagaagaaaaaaaagaagtcacttcagactaggaaacagcgaaatgagcagtatcagaaaaaaaatttgatgcagaagttaaagttaacagaagatacctcagaaaaggcaggatttgcttctactctgcaaaagcagccaacctttttcaaaaactcagagaattccagttttttaccaatgaaaaatgaaaacccaaggttaaatgagacaaatttaaatagaagagacaaagacacccccctggacccatcaatggccaccctgattctgcctaagaataaagggagaatgcagaataagaagccaggctttacagtatcatgctctccaaagagaaccataaactccagccaagagccagctccaggtatgaagccaaactggcctaggagcagatatcctgccacaaagagaggctgtgctgccatggcggcatacccatccttgcacatatacacatacccgtaggtgagcctgggctgtgccacacaagcacttcatcgggggttttgagattagacacattttataatgggggagatgtatgactgggaactgcatttacttgtggtatactgtgttgtgcactcatgcactgaccttacactttgtacttacactgtgggcatgtggtcaagatgcatacctcatgaattcaactattttttcataaaatgaaattttattatgatgtgtaaaaatgctttatcagaaactgaagtgtgttctcatggcacacttcatggcagcacagatatacctcattttaaccaatagatattctctctaaaattatgtgcaaatcaatttttaaaaatcaaaatctatgttaaacacattttggcagtgtgctataataaaaaaaagtgttgtgtcaaagctttctagtgacggtcagtcctactgctgtatgtcaggtttgctcacaatgaggtattcccacatagaaataacaatgcatgtattacccagaatttaatgttgcgtaccttatgttcaatgaggttttgtaatttttttaggctgatgattaaaattctttctctct

SEQ ID NO: 1424 - DNA, 6128 bp, Homo sapiens
  source 1..6128: mol_type = genomic DNA
agtctagtgggataccaggccctgagagacccctacgatcccaggacactgatgtggggtaactaacacccactggaagtctacgctgagttcacaggctatagtcagaggttccggttgagatcaagttgggagacacacccttgttcattctccttgagaagcagctattatcaacagaacattgacagaacctgtgtttggggaaaggactgatggctttgagtctaggttggaaagcacacaggaaccactgtggtctcctcttgcaggctctgcgaagcagtggtcttctcttgtttccctgtggccagtgtccctggagaggagctggaagctttttggaccctgagataaaggctttcctggaggagaacactgaagtcaccagcagtggtagcctcacccctgaaatccagttgcggcttttgacccccagatgcaaattctggtgggagagagctgacctgtggccccacagtgatccttactgggcaatctactggccaggaggccaagccctgtctaggtatcttttggataatcctgatgttgtcagaggaaaatctgtattagatcttgggagtggatgtggagctacagctattgctgctaagatgagtggggcatcaaggatcttggccaatgacatagaccctattgcaggaatggctattacactaaattgtgaattgaacagactgaatccttttcctattttaatccaaaacattttgaatttggaacaagataagtgggaccttgttgttcttggcgatatgttttatgatgaagaccttgcagatagtcttcatcagtggctgaagaagtgcttctggacctatagaactcgagtactgattggtgaccctgggcggccccagttcagtggacacagcattcagcatcacctgcacaaagtggtagaatattcacttttggagtctactaggcaggaaaacagtggactgacaacaagcacagtgtggggttttcagccttgagttgtcaaagtgcttccaagtatgaatatagtaatgtttggatctgactctaaaagttttctctataggagatactctccagtttaatgaatgtaattcttgttaaatggaaaatcttgtttttaaaatatgaaggtttagagttttgtttacttttgtcatgtaactggttctgtatttctatgcatgccaattatacacatctctatctgcatttttttttctattttaaccgctgaaggaatatgattatacaatgccatactcaatggtggcagcatttaatttaagtaatggagaagaattaaacattgtagctggatctgtttctgtagtcgaggacaactgtgatgtaactttgaattaaacaaacaaaacaaaacagaagaagactatatatatattttttctttttttagagacagtctcactttgctcccaggctggaatgcagtggctattcagaggcttaatcattgggcactgcagccttgaactctgggcttttttttttttttgagatggagtctcagctctgtcgtccaggctggagtgcagtgactcatgtctcggctcactgtagcctccacctcccccaatcaagcgattgtcctgtctcagcctccagagtagctgggattttaggtgtgcaccaccatgcctggctaatttttgtatttttagtagagacggggttttgccatgttggccaggccggtctcaaactcctgacctcaggtgatccacccgccttggcctcccaaagtgctaggattacaggtgtgagccaccacgccagcctgacgatgttttttacttctatcacttccttttgattttttcttatagcttctatctctgcttacgtcacccatcattcttgcgtgttgtatgcttttcgcattagagccctttgcatgttaatcagttattttaaatttatgatctggtaattctaaaatgtctgccataactgagtctggttctgatgcttgttttcttttcagactgtttttttgtcttttagcatgccttgtaattttttgttgatagctagacatgatgtattgcataaataaacaagtaaactaaggtagcatgaggttttaaaatctgggtagggctactgtttgctgtagagtagatattacaggctaaattttcctctagtgtcctggctattgtctcctctgttatctttgagtttccctagagattccttcttatatagagtctgaagcttgcagtttttttcacctgtaattccctgttattatacagtagcctaactgatgtgataaggtatgggagaaggtatgttctatagtcctgtgattaagtctcagtcagttaagtcagcctgtgcccctgctgtgaccttcacaagtgctttcagcttttcttttgtcactttggtgagacaggaaggctagaggcagctggagttgggtgcttcctttcccccaggtcaacgaggctctggtaaaatagtttcccttgagaactggcttttgttaaggagaactgaacacttgggcatatttcaaaatggttactttccctatcctcataccagaagaggggatttttctctgatcctcaccctgagaacctggtaggtatcctggaggtaaaactatgaaagtgtggtgtctcccctaggagtgggccccctggagtttgtttgttttaatttaacaaagtttaattgagcaaagaacaatctgtgaattgggcagctcccaaaagcagaataggttcagagtgactgcagggttgccacacctggttagataacgtttatggacagattcctagagcttttgattcttttttttttttttttgaggcagagtttcactcttattgcccaggctggagtgcaatggcgtgatcttggctcactgcaacctccacctcctgggttaaagtgattctcctgcctcagcctcctgagtagctgggattacaggtatacaccaccaaacccagctgggattacaggcatgcaccaccatgcccagctaatttttgtatttttagtaaagacagggcttcgccatgttggccaggctggtctcgaactcctgacctcaggtgatccacctgcctcagcctccccaagtgctgggattacacgtgtgagccactgtgccaggctggagcttttgattcttaagtccatccacatggagcctccagcaactcaggaattacagcataaatgttcctattggtactggctccagcaacaggcttctgctccctgtaagctatggttctttgtatttgcgtttctaatttgtgaggcattctctctttaaccttaattctctaatggatctaagtgttgttgacttttcagtttattgagcttttttcttattgtgaggatgggaatgatgacttccaatctctttatattagaaaatataaatcagactagagactggaaatttttgttgttgttgttgggtgttttgttttgtttgtttttagacaggtcttgctctctcatccaggctggagttcagcaatgcgaccgtgctcactgcagcctcgactttctaggctcaggtaatcctcccacttcagcctccttagtagctaggactgtaggcatgcaccaccatgatgcctggctagtttttttattttgtattttttgtagacatggagtcttgctacattggccaggctgggtattactgggtatttctttctttcctcctttatttctttccatatttacttattcaatgaatatttgagtgcttattatataccaggcactgttctaggcactggggatatggggatacagcaatgaaaaaaaaagataaatactttgtccttatgaaatttgtattctagagtagggagacataatgaacaaatgaaaacaggcatcagatggtgataggtagtaaggagaaaaagaagtaagggtaatagggaatactgggtactggatggggtacagatattttaaacagagtggtgagaaatagttaatacagctagcaacataaaaaaggagaaatatcaaactgcaaactgttttaggaagataaatccttcatagacccaaagaagctcacaatttagatgtcgaaactagtttctgcaaaaaggggaaaatgtgattgacttggttaaatattcagtattaaattttattgaatttgtctttagaaaaatttcatagttagaacaggccttacccattttgcacatatatacatatgcaccacctttgcagtggcaacatatatatccacactataaacataccacatttataaatcttgtaaggacaagaaatggagttgaataagtaccccccaacatatacaagaaagttagcatacttaccccgtttttcactacatcagaggcaaaataagaaatcttttaagaaaatctcaagactggctcatggcaaaatgaatatgctaaatttgggggttggtttaagcgtggtatgtgtcaggtaattttgtgattaccaaaaagttttcacttgaaaactaagacctttgctgtttatttcacaatgtgaaatcaataaacctgaggatacaagtctctgtagtgatattctgtatttactcatttttacacatttttgaatgcaattttgctaaggaaggaaagcttacagatgcataaaatgtaactgggaagagtagccataaaaatcaatgaatggatgtggctgggcaagagcctctgtaatactaatacgctgaatggctaataagtcacttcatttcggtgaaacaaatacctaaattctttgaagaattaacaggcttgatgttcaggtctgcttttggcaaatgggcatttaaatactccaagaaggtaagagccagaaaataggaaggtaactatgcttttagaaatatgtttacttagattctcccaaggtttatacttacaggtaaacttagaacaatagctcaaatacctacataggagaaggaaatctcaagggaaaacagttaattttaaagttatttaagaaacagaatccaacaccatagatcagagttcatgctaggattatcatttcaaaaataatgactcatccaacagatatagaataatagcactttaaagatgtttaagagtaaagcacaaaccatgtatataccaagacttagctaattctctgagagttataacttaagacaataaaataattaaaaatagtgttaacattaagtagaatgcaaatctctatagatggtttcctgggaaagtagttttgataagctttcctagcattgatcatcttcaaaaaagcatcaataaacagtccatgtcacttgctttagtttgtttgggcctactaattgctccaacacttctcgggaatgatctataaaagaaaacaatgacaatatattaattgacaataaaaaatgtttaatgtttcctcatgtctaactggaggtgatgttaattattatacagttatttaaaggattaaaggaggtgatctataaagcacaatatacaactaactcactaataattaattaatggtagccctcactattattaggtgtagtgcacctatcatggtattacttgtttaaaaaaaaaaaacaggcatttgttgttttctctgtaatttcatcataattccaccaaccagagtaatggtctaatttcaccattaacctgtgttaatggttaataacttttttcaggatcttagccggaaatagatgattcactaaagtggggtgactgaacagcatttaatgaagggaatatttaccaaaaaagtaggattaaagaaagccaataggtacggtaaaccaccttgggaagctgcaacacacccaaagggttaaaggaggtagtagtcaccgaacgtgacaagttgacctgtagctgaacatttttccatgtctgtataatactactataaagcatgattttaaatagataaccattatataaatacactgtaatttaaccaatctatattattggacatttagatgttttcagtttttcacaatgtacagtcgtgattttgatatggtttccatcctagttttaggatgtcttttaaaaatctgaattaaagcaaaaatactgataaaa

SEQ ID NO: 1425 - DNA, 5603 bp, Homo sapiens
  source 1..5603: mol_type = genomic DNA
aacgcagctgcggcggctgcgggtctcgtgggggcggagcggtcgccgctgccgccgcagctcgggtcgggatttgaaagattagaaacttcgggtggagagggcggcggcgttgaatgtgtggcggaagcgctgggggtcacggctccgcgcgccgccggacagccggcggcgtctccacagcatgaattacccgggccgcgggtccccacggagccccgagcataacggccgaggcggcggcggcggcgcctgggagctgggctcagacgcgaggccagcgttcggcggcggcgtctgctgcttcgagcacctgcccggcggggacccggacgacggcgacgtgcccctggccctgctgcgcggggaacccgggctgcatttggcgccgggcaccgacgaccacaaccaccacctcgcgctggacccctgcctcagtgacgagaactatgacttcagctccgccgagtcgggctcctcgctgcgctactacagcgagggtgagagcggcggcggcggcagctccttgtcgctgcacccgccgcagcagcctccgctggtcccgacgaactcggggggcggcggcgcgacaggagggtcccccggggaaaggaaacgtacccggcttggcggcccggcggcccggcaccgctatgaggtagtgacggagctgggcccggaggaggtacgctggttctacaaggaggacaagaagacctggaagcccttcatcggctacgactcgctccgcatcgagctcgccttccggaccctgctgcagaccacgggtgcccggccccagggcggggaccgggacggcgaccatgtgtgctcccccacgggcccagcctccagttccggagaagatgacgatgaggaccgcgcctgcggcttctgccagagtacgacggggcacgagccggagatggtggagcttgtgaacatcgagcctgtgtgcgtgcggggcggcctctacgaggtggatgtgacccaaggagagtgctacccggtgtactggaaccaggctgataaaataccagtaatgcgtggacagtggtttattgacggcacttggcagcctctagaagaggaagaaagtaatttaattgagcaagaacatctcaattgttttaggggccagcagatgcaggaaaatttcgatattgaagtgtcaaaatccatagatggaaaagatgctgttcatagtttcaagttgagtcgaaaccatgtggactggcacagtgtggatgaagtatatctttatagtgatgcaacaacatctaaaattgcaagaacagttacccaaaaactgggattttctaaagcatcaagtagtggtaccagacttcatagaggttatgtagaagaagccacattagaagacaagccatcacagactacccatattgtatttgttgtgcatggcattgggcagaaaatggaccaaggaagaattatcaaaaatacagctatgatgagagaagctgcaagaaaaatagaagaaaggcatttttccaaccatgcaacacatgttgaatttctgcctgttgagtggcggtcaaaacttactcttgatggagacactgttgattccattactcctgacaaagtacgaggtttaagggatatgctgaacagcagtgcaatggacataatgtattatactagtccactttatagagatgaactagttaaaggccttcagcaagagctgaatcgattgtattcccttttctgttctcggaatccagactttgaagaaaaagggggtaaagtctcaatagtatcacattccttgggatgtgtaattacttatgacataatgactggctggaatccagttcggctgtatgaacagttgctgcaaaaggaagaagagttgcctgatgaacgatggatgagctatgaagaacgacatcttcttgatgaactctatataactaaacgacggctgaaggaaatagaagaacggcttcacggattgaaagcatcatctatgacacaaacacctgccttaaaatttaaggttgagaatttcttctgtatgggatccccattagcagttttcttggcgttgcgtggcatccgcccaggaaatactggaagtcaagaccatattttgcctagagagatttgtaaccggttactaaatatttttcatcctacagatccagtggcttatagattagaaccattaatactgaaacactacagcaacatttcacctgtccagatccactggtacaatacttcaaatcctttaccttatgaacatatgaagccaagctttctcaacccagctaaagaacctacctcagtttcagagaatgaaggcatttcaaccataccaagccctgtgacctcaccagttttgtcccgccgacactatggagaatctataacaaatataggcaaagcaagcatattaggggctgctagcattggaaagggacttggaggaatgttgttctcaagatttggacgttcatctacaacacagtcatctgaaacatcaaaagactcaatggaagatgagaagaagccagttgcctcaccttctgctaccaccgtagggacacagacccttccacatagcagttctggcttcctcgattctgcattggagttggatcacaggattgattttgaactcagagaaggccttgtggagagccgctattggtcagctgtcacgtcgcatactgcctattggtcatccttggatgttgccctttttcttttaaccttcatgtataaacatgagcacgatgatgatgcaaaacccaatttagatccaatctgaactctcttgaaggacatgaatggcctaaaactgattttttttttttccgttaaaatgtgtgtgtcaagatacggagatttcagggttaaagtatatttcagttttctttagggcaacatatatttgaatttaaaagcactttatttaaaaaaaaaagaagttttcagttctgaagaagtcatttacagtttgcatcattttaattatgagtctgacaaaaccttctccagagaatcaagcaagacctggatgtgaagaaggtttgggtaaactgcatgtaaaggctacaaatcacaatctgattcctcccaaatataaaggcatatggaacataatgtattaaccaaagtatgttataaatcaaaaatggtcaaggttcagcatattctatatgaagatcacaaggtggtatcgttttagatttctatgaaggctttcatttgtacatccctttgaaaaaatataacagatttaaaatgttttgaatttaacttgtttagaaaaactaatgcttaaaacaatatttgaactactgtatttataatttattacctctaattgctttatttcagtgtatgagacattactgttttaatgtttgctttgaacataatttaagaaccagatttattttctatagtgataaacccttttttctcagaactccatctttgtactcttcagatgaatatatagacactgtggcatacattttttttcattaaaaacttatggcttcatacaacactagttcaattttttaaataaactttttattatgttacatgtacttcagagaaagctaaagtttctctaaacttgacacggagtactccataatgggtacatttcattagctttattagaaaactagtaaatgcttttgaataggtagtatgacagctattttaaatgtataaacatttgtgtgccaaacaacatatatgaagggatgtgatgccactaactagtgcacattgtttctcaatgtgccattgagacacaaggcacagtaagtcaggattctgaggcattggaagggttttcttcagctgtaattgtttccacagtgcttttcatctgaggggctcaaagtttaagagtgcattcaataacccatgtactagcttcttgaggtaagtaaataaatcttgttctcatgttacatgttaatacaccaaggcaccaaaacatttaaagtgccatgaattagattacatcagaaatcagaaaagcttggattgagctagtcaccgtggttcacgcctgtaatcccaacacttcgggaggccaagatgggaggatctcttgagcccaggatttcaagaccagcttgggcaacatagtgagaccctcttctctgcaaaaactgacaaaaattagccacttgtagtggtgtacacctgtagtcccagctactcaagaggctgaggtgggaggatcacccgagcccagaagttcaaagctgcagtgagctctgatcacaccaatgcactccagcctgggtgacagagccagaccctgtctctaaaaaacaaaaaagaaaagcttgggttgaagccaggccatattcttttatatgctgttcaatgacttgattcacatgtgaccttttagtagtttgcaaacaataataacagaagttgcaattcataattcagagaaatgaccatgaagccggtgtttccctgcttgatttctatgttcttggattctcacacaaaagaggagttacctagaggggatcagtagccatccctgttgcacacaaccctcacttctgagtggtttccactaggttccacttaaggtgctgtcttttcttaacttgcaaggaattgcttagcttcccaataatcattgtcaaactgggagcaaagttggtcagctgtatctctcacctcctcctttcttcataagatagtagaatctgtggcttacttgtaggttttacttagtgcttcagtactgttggctgttttggccttttgctgaatttgcacaacaacataaagcacttctttttaatgtttaaaaaaaattccaaggctccatgaccaagtatgtgactcactaagaaacccttgctataaaaggcttttgatgaaatcttagcaaagctaaattatctctaacttagagattcctatgaactcaggtcattttcatagcctgtttattttgtaggtctaatttagttctcaggaaaattaaactcatgctatatgactgtatcgttaaaggtacttgagcgtatgttgctgtaggtggtatgacactcaaatgcataagaacttgaagggatttattcttaaccactagaatatgaagagccctttttacctgagaagagtgaaattatgtcagaccttttaatttgatatcactgagtaaaaggtatgttcctatagccataggaatatgtctgcttcctttttttcatgttgagaaaacagtcaaatttaaccatttggagtttatttgaattcttggaaagagcaatattcaaaaccttttcaaaaataagatattctggactactggatggatgttttgttttcagttcatttttcatcagtagagatggtgatttcggttttgtagtatccttgtttctatgtctgtgcatgttaacattggatgtatttgtatatacttaattaatatacagactgtgtgtcattctggcttgattagaagctaagtcagttactgagtaacattttgcaactttattccagcaagtactaaatcggccaaaaaaagttttgtttttgataccattaaaattttattctct

SEQ ID NO: 1426 - DNA, 1883 bp, Homo sapiens
  source 1..1883: mol_type = genomic DNA
aagatggttgattcacagaacccaggctggacgggacttgtggcgagcagtccagcacagcctcacagtgcagagcatgagctttggagcctgcccccaccctagctttgtgaccttaagtgagctacatagcttctcatgtgtaaactactcatcataatggttctgacctcagtggtttgttgtgttctaggaaatgatgccagtgaatgcgtagtcccagcctcagcacaggggagccaccttgaagctctcaaatatcactgttgtgaatacagagagggaaaaccaactgtaacgtgccacccaaataaagctcattactagtcctgtccagcaacgtgcctctcctggccctagagttcttggaaatagcccaggccaaagagaaggcctttctccccatggtcagccacacgttccacatgcgcacagaggagtctgatgcctcacaggagggcgatgacctacccaagtcctcagcaaacaccagccatcccaagcaggatgacagccccaagtcctcagaagaaaccatccagcccaaggagggtgacatccccaaggccccagaagaaaccatccaatccaagaaggaggacctccccaagtcctcagaaaaagccatccagcccaaagagagtaacatccccaagtcctcagcaaaacccatccagcccaagctgggcaatattcccaaggcctcagtgaagcccagccagcccaaggagggtgacatccccaaggccccagaagaaaccatccaatccaagaaggaggacctccccaagtcctcagaagaagccatccagcccaaagagggtgacatccccaagtcctcagcaaaacccatccagcccaagctgggcaatattgccaagacctcagtgaagcccagccagcccaaggagagtgatatccccaagtccccagaagaaaccatccagcccaaggagggtgacatccccaagtcctcagcaaagcccatccagcccaagctgggcaatattcccaaggcctcagtgaagcccagccagcccaaggagggtgacatctccaagtccccagaagaagccatccagcccaaggagggtgacctccccaagtccctagaggaagccatccagcccaaggagggtgacatccccaagtccccagaagaagccatccagcccaaggagggtgacatccccaagtccctagaggaagccatccagcctaaggagggtgacatccccaagtccccagaagaaaccatccagcccaagaagggtgacatccccaagtccccagaagaagccatccagcccaaggagggtgacattcccaagtctccaaaacaagccatccagcccaaggagggtgacattcccaagtccctagaggaagccatcccacccaaggagattgacatccccaagtccccagaagaaaccatccagcccaaggaggatgacagccccaagtccctagaagaagccaccccatccaaggagggtgacatcctaaagcctgaagaagaaacaatggagttcccggagggggacaaggtgaaagtgatcctgagcaaggaggactttgaggcatcactgaaggaggccggggagaggctggtggctgtggacttctcggccacgtggtgtgggccctgcaggaccatcagaccattcttccatgccctgtctgtgaagcatgaggatgtggtgttcctggaggtggacgctgacaactgtgaggaggtggtgagagagtgcgccatcatgtgtgtcccaacctttcagttttataaaaaagaagaaaaggtggatgaactttgcggcgcccttaaggaaaaacttgaagcagtcattgcagaattaaagtaaacatgtattctgaaaaca

SEQ ID NO: 1427 - DNA, 1480 bp, Homo sapiens
  source 1..1480: mol_type = genomic DNA
ctcccataccctataactttgtttgttctatttcacacatataattttccgagacaagatgttctcatttaagcaacaagaagattcgtctctcgctattactgtaactgctgtttatatcgtcatgtcccggaaaggtccctgtcttccctgaatggtctctaccaacttcacctccggttctaggtgtcatggctgccccaagagtctaggtaagagtttgttcccgtggtgcggagggtcaaggcccacacccggaaacctagcgaggtaaagttgcgtcttggttgtagagacgacaacttctccgcttcctcggcgatggcggcgtccgggagcggtatggcccagaaaacctgggaactggccaacaacatgcaggaagctcagagtatcgatgaaatctacaaatacgacaagaaacagcagcaagaaatcctggcggcgaagccctggactaaggatcaccattactttaagtactgcaaaatctcagcattggctctgctgaagatggtgatgcatgccagatcgggaggcaacttggaagtgatgggtctgatgctaggaaaggtggatggtgaaaccatgatcattatggacagttttgctttgcctgtggagggcactgaaacccgagtaaatgctcaggctgctgcatatgaatacatggctgcatacatagaaaatgcaaaacaggttggccgccttgaaaatgcaatcgggtggtatcatagccaccctggctatggctgctggctttctgggattgatgttagtactcagatgctcaatcagcagttccaggaaccatttgtagcagtggtgattgatccaacaagaacaatatccgcagggaaagtgaatcttggcgcctttaggacatacccaaagggctacaaacctcctgatgaaggaccttctgagtaccagactattccacttaataaaatagaagattttggtgtacactgcaaacaatattatgccttagaagtctcatatttcaaatcctctttggatcgcaaattgcttgagctgttgtggaataaatactgggtgaatacgttgagttcttctagcttgcttactaatgcagactataccactggtcaggtctttgatttgtctgaaaagttagagcagtcagaagcccagctgggacgagggagtttcatgttgggtttagaaacgcatgaccgaaaatcagaagacaaacttgccaaagctacaagagacagctgtaaaactaccatagaagctatccatggattgatgtctcaggttattaaggataaactgtttaatcaaattaacatctcttaaacagtctctgagaagtactttacctgaaagacagtatgagaaaaatattcaagtaacactttaaaaccagttacccaaaatctgattagaagtataaggtgctctgaagtgtcctaaatattaatatcctgtaataaagctctttaaaatgaaa

SEQ ID NO: 1428 - DNA, 2609 bp, Homo sapiens
  source 1..2609: mol_type = genomic DNA
ccttgtcgcacgtcgcagcgcctggcgcccgggaagaggtggttgtgaggcagacgaactcgcggctctccggcttccgaggcttccgagttgtcggaggaagggggcggcgagcaataagaacccgccgcacccggtcctcagcgactcttctgacctccgcgcgacgtacccgccgccgccgttggctggagcatttgacattgtgcagcaaagaaatggttatggagaagcccagtccgctgcttgtagggcgggagtttgtgaggcaatattatactttgctgaataaagctccggaatatttacacaggttttatggcaggaattcttcctatgttcatggtggagtagatgctagtggaaagccccaggaagctgtttatggccaaaatgatatacaccacaaagtattatctctgaacttcagtgaatgtcatactaaaattcgtcatgtggatgctcatgcaaccttgagtgatggagtagttgtccaggtcatgggtttgctgtctaacagtggacaaccagaaagaaagtttatgcaaacctttgttctggctcctgaaggatctgttccaaataaattttatgttcacaatgatatgtttcgttatgaagatgaagtgtttggtgattctgagcctgaacttgatgaagaatcagaagatgaagtagaagaggaacaagaagaaagacaaccatctcctgaacctgtgcaagaaaatgctaacagtggttactatgaagctcaccctgtgactaatggcatagaggagcctttggaagaatcctctcatgaacctgaacctgagccagaatctgaaacaaagactgaagagctgaaaccacaagtggaggagaagaacttagaagaactagaggagaaatctactactcctcctccggcagaacctgtttctctgccacaagaaccaccaaagccaagagtcgaagctaaaccagaagttcaatctcagccacctcgtgtgcgtgaacaacgacctagagaacgacctggttttcctcctagaggaccaagaccaggcagaggagatatggaacagaatgactctgacaaccgtagaataattcgctatccagatagtcatcaactttttgttggtaacttgccacatgatattgatgaaaatgagctaaaggaattcttcatgagttttggaaacgttgtggaacttcgcatcaataccaagggtgttgggggaaagcttccaaattttggttttgtggtttttgatgactctgaaccagttcagagaatcttaattgcaaaaccgattatgtttcgaggggaagtacgtttaaatgtggaagagaaaaaaacaagagctgcaagagagcgagaaaccagaggtggtggtgatgatcgcagggatattaggcgcaatgatcgaggtcccggtggtccacgtggaattgtgggtggtggaatgatgcgtgatcgtgatggaagaggacctcctccaaggggtggcatggcacagaaacttggctctggaagaggaaccgggcaaatggagggccgcttcacaggacagcgtcgctgaagctccactgttggcaaagtcttggcagtggtacattattcatcgtgtttgcattcttgttaattttttttttggctttggaatgtgacacagcctttttgatcatttctttgatgtgaaaagcatctttggttatcagttaaattgaggtggacattatttccccaatttcacaacaggattcacattgttaatttataaatctagacttggagaattaaggactgagaaatgaccatatcttaaactatctacgacaaagtgaacttaaaaggacatgcccactgaattcaggtcctttgagtaaaaaaaaaatcttctgctgcacattttgtttaagtgttactgtttctgcctgttaatgctgggaacacaaatagtgcaatttgtgcaattggagaatcttgccttttttcttggctccccccaaaaatacaaaccaacagaaacttgttatgcactcatcaaaatgtactaatgggtactctgaactcattaacattgacatctgcaacaggaggcaacagggaaaaaatctcatcttcttttccagtagaaaatagtttgtgaaatgatgagggcattttatctgcttgctgtgaccagcgtgtgtacacataaaccttaacaagactacaagtatattccagaaggaaatcattttagttatgaactaaataataaaaattagaacttcaaatgcgatggtcttgactattagaccagatttagtagctccatatctaagatttttctacctgcccctcttcagtacagggatggctggctgctcaacacactcctcctccccttttttcctttctttaagctgtgtacagtgaaaattgtctttactgtatttttgttctctggtaatgtaataagcatgatggtgccttctattaatacatcattccagtcttgctggtaattttgtacagtatagtgtatgaattgctgtgctgcaaagccaaacagctgcaaaatgttgaaaaatcatcgaaatgtataaaaattgcagtatctttaaaatcagtaaaa

SEQ ID NO: 1429 - DNA, 1370 bp, Homo sapiens
  source 1..1370: mol_type = genomic DNA
cagtgagttagcatggagggcagtgggaccggaaaaagacgtggaaaagctgcgaaaacgagccttcgaatcatggacgcgcgggcccagctcctcctccgagttcctcatccggggccgtcactcacatccggggccctcactcacatccgggaccctcatccggggctctcacccacatccgggaccctcatgcctgggcggaggagggggggccctcattcgggaccctgcactccgtcgccggaagtgccaccgagaagcgccggcctcggggctgtctacagcggcccgggagaggctgtggtggccccgagcgcgagtgtgtaggtgacaggacagcggccaggcccgcccctcccctcgtgatggtcattgtcctccagagcagtgatggaggaaataccagcccaggaagcagcagggtcaccaagggtccagtttcagtctttggagacccagtctgagtgtctgtccccagagcctcagtttgtgcaggacaccgacatggaacagggactcactgggggcatacttctccgccttcccaccacccggattcatagtgtgaattcctgcccggccctgagtcatacccaggcaagtgctttctctggagaaacacttgccgtccttacagcaggaatctccaagagatggcccaagtatcggcttcccatcgatattgctcgtccctgctcggaaactccttttccacgattgtgagatattaaaattgactgatggaatagaagctccccaggatgccaccactgtgtaaaatcgcagctcctcaaattacctctgtttaatttcaaatgttagggtccaaggaagccctctgttgcaaccagatatgttttgaacccagttcattcagaaaccatggttggtggtcatcatctacttgtattgtgaaaaaccagaaattccaaattcagctcttcagttatggtcttttcatattattttagaatgtgaaacttatgctgtgtgcccctccttttatgtggcgaacacaacctgccccgtatggtgcctaactctcctgtgaaccctgggcttccctcatgtttaacattctggtttcctccttccttgaagtccctgtggccctcttcaaggtcctaccttcctaccctttattctttgtggttctgtacagattgatgcaattatattgcctttcctgattaagtgttccttactctgtccttgatggaggggagaagggagggcaaagaagttaaatttatttcagggcatcaaattgaatatctacttaataactttgtaaactgtaaagtgacatacatataattgtaaagtactgttaattttatctaataattacagagtttccaacagtt

SEQ ID NO: 1430 - DNA, 1439 bp, Homo sapiens
  source 1..1439: mol_type = genomic DNA
ccctctctggaacactgtctccactgagttttaggtaagtgtgtgacagacaaacgagcagaagcttggagaagctcagggtggatcttggtggccggagctactgtctcggcgcatgagcttggaagcttcaggaagcagggctggggaagcaccctccaggctgcagttccagggaaggcaatactgaacactgcgcagcttgcagaggtctcctggcagccctcattaggaattctgtctggccccgatcagaatactggagacgagaccacgagattgatgagtttgccttgggagtcggtaagaaggtgaagccaggggcgaacatgggtcagaaggtcactggagggatcaagactgtggacatgagggaccccacgtacaggcccctgaagcaggagctccagggtctggattactgcaagcccacccggctggatctgctactggacatgccccctgtgtcctatgatgtccagctgctgcattcatggaacaacaacgaccgatcgctcaatgtctttgtgaaggaggacgacaagctcatctttcaccggcatccggtggcccagagcacggacgctatcaggggcaaagtcgggtatacccgtgggctgcacgtgtggcagatcacgtgggccatgagacagcggggcacacacgccgtggtgggggtggcgacggcagacgcccccctgcactctgtcgggtacacaaccctcgtggggaataaccacgagtcctggggctgggacttggggcgcaaccggctctaccacgatggcaagaaccagccaagcaaaacatacccagcctttctggaaccagatgagacattcattgtccctgactccttcctggtagccctggacatggacgacgggactctgagcttcattgtggatggacagtacatgggagtggcttttcggggactcaagggcaaaaaactgtatcctgtagtgagtgccgtctggggccactgtgagatccgaatgcgctacttgaacggactcgatcccgagccgctgccgctcatggatttgtgccgtcgctcggtgcgcctggccctggggagggagcgcctgggggagatccacacgctgccgctgccggcttccctcaaggcctacctcctctaccagtgacgttcgccatcataccgccagcgcgacagccacctggtgccaactcactgagccgcctgccgctggggccgccgcaccctgcaccttggaccggcatccgtagccatggacagaggtccctggtcttccctcatcctccgtggctgcctccatgggacaaggaccgattccaacacaggctcctctttcccccttcccgacatcagcagaaggcagcatccctgcatgccgtccgtatacaacccctctttgaaaaaagacacagagaataaactcctacgaaagccc

SEQ ID NO: 1431 - DNA, 4295 bp, Homo sapiens
  source 1..4295: mol_type = genomic DNA
aggccgccgcctgggtcgctcaacttccgggtcaaaggtgcctgagccggcgggtcccctgtgtccgccgcggctgtcgtcccccgctcccgccacttccggggtcgcagtcccgggcatggagccgcgaccgtgaggcgccgctggacccgggacgacctgcccagtccggccgccgccccacgtcccggtctgtgtcccacgcctgcagctggaatggaggctctctggaccctttagaaggcacccctgccctcctgaggtcagctgagcggttaatgcggaaggttaagaaactgcgcctggacaaggagaacaccggaagttggagaagcttctcgctgaattccgagggggctgagaggatggccaccaccgggaccccaacggccgaccgaggcgacgcagccgccacagatgacccggccgcccgcttccaggtgcagaagcactcgtgggacgggctccggagcatcatccacggcagccgcaagtactcgggcctcattgtcaacaaggcgccccacgacttccagtttgtgcagaagacggatgagtctgggccccactcccaccgcctctactacctgggaatgccatatggcagccgagagaactccctcctctactctgagattcccaagaaggtccggaaagaggctctgctgctcctgtcctggaagcagatgctggatcatttccaggccacgccccaccatggggtctactctcgggaggaggagctgctgagggagcggaaacgcctgggggtcttcggcatcacctcctacgacttccacagcgagagtggcctcttcctcttccaggccagcaacagcctcttccactgccgcgacggcggcaagaacggcttcatggtgtcccctatgaaaccgctggaaatcaagacccagtgctcagggccccggatggaccccaaaatctgccctgccgaccctgccttcttctccttcatcaataacagcgacctgtgggtggccaacatcgagacaggcgaggagcggcggctgaccttctgccaccaaggtttatccaatgtcctggatgaccccaagtctgcgggtgtggccaccttcgtcatacaggaagagttcgaccgcttcactgggtactggtggtgccccacagcctcctgggaaggttcagagggcctcaagacgctgcgaatcctgtatgaggaagtcgatgagtccgaggtggaggtcattcacgtcccctctcctgcgctagaagaaaggaagacggactcgtatcggtaccccaggacaggcagcaagaatcccaagattgccttgaaactggctgagttccagactgacagccagggcaagatcgtctcgacccaggagaaggagctggtgcagcccttcagctcgctgttcccgaaggtggagtacatcgccagggccgggtggacccgggatggcaaatacgcctgggccatgttcctggaccggccccagcagtggctccagctcgtcctcctccccccggccctgttcatcccgagcacagagaatgaggagcagcggctagcctctgccagagctgtccccaggaatgtccagccgtatgtggtgtacgaggaggtcaccaacgtctggatcaatgttcatgacatcttctatcccttcccccaatcagagggagaggacgagctctgctttctccgcgccaatgaatgcaagaccggcttctgccatttgtacaaagtcaccgccgttttaaaatcccagggctacgattggagtgagcccttcagccccggggaagatgaatttaagtgccccattaaggaagagattgctctgaccagcggtgaatgggaggttttggcgaggcacggctccaagatctgggtcaatgaggagaccaagctggtgtacttccagggcaccaaggacacgccgctggagcaccacctctacgtggtcagctatgaggcggccggcgagatcgtacgcctcaccacgcccggcttctcccatagctgctccatgagccagaacttcgacatgttcgtcagccactacagcagcgtgagcacgccgccctgcgtgcacgtctacaagctgagcggccccgacgacgaccccctgcacaagcagccccgcttctgggctagcatgatggaggcagccagctgccccccggattatgttcctccagagatcttccatttccacacgcgctcggatgtgcggctctacggcatgatctacaagccccacgccttgcagccagggaagaagcaccccaccgtcctctttgtatatggaggcccccaggtgcagctggtgaataactccttcaaaggcatcaagtacttgcggctcaacacactggcctccctgggctacgccgtggttgtgattgacggcaggggctcctgtcagcgagggcttcggttcgaaggggccctgaaaaaccaaatgggccaggtggagatcgaggaccaggtggagggcctgcagttcgtggccgagaagtatggcttcatcgacctgagccgagttgccatccatggctggtcctacgggggcttcctctcgctcatggggctaatccacaagccccaggtgttcaaggtggccatcgcgggtgccccggtcaccgtctggatggcctacgacacagggtacactgagcgctacatggacgtccctgagaacaaccagcacggctatgaggcgggttccgtggccctgcacgtggagaagctgcccaatgagcccaaccgcttgcttatcctccacggcttcctggacgaaaacgtgcactttttccacacaaacttcctcgtctcccaactgatccgagcagggaaaccttaccagctccagatctaccccaacgagagacacagtattcgctgccccgagtcgggcgagcactatgaagtcacgttgctgcactttctacaggaatacctctgagcctgcccaccgggagccgccacatcacagcacaagtggctgcagcctccgcggggaaccaggcgggagggactgagtggcccgcgggccccagtgaggcactttgtcccgcccagcgctggccagccccgaggagccgctgccttcaccgccccgacgccttttatccttttttaaacgctcttgggttttatgtccgctgcttcttggttgccgagacagagagatggtggtctcgggccagcccctcctctccccgccttctgggaggaggaggtcacacgctgatgggcactggagaggccagaagagactcagaggagcgggctgccttccgcctggggctccctgtgacctctcagtcccctggcccggccagccaccgtccccagcacccaagcatgcaattgcctgtcccccccggccagcctccccaacttgatgtttgtgttttgtttggggggatatttttcataattatttaaaagacaggccgggcgcggtggctcacgtctgtaatcccagcactttgggaggctgaggcgggcggatcacctgaggttgggagttcaagaccagcctggccaacatggggaaaccccgtctctactaaaaatacaaaaaattagccgggtgtggtggcgcgtgcctataatcccagctactcgggaggctgaggcaggagaatcgcttgaacccgggaggtggaggttgcggtgagccaagatcgcaccattgcactccagcctgggcaacaagagcgaaactctgtctcaaaataaataaaaaataaaagacagaaagcaaggggtgcctaaatctagacttggggtccacaccgggcagcggggttgcaacccagcacctggtaggctccatttcttcccaagcccgagcagagggtcatgcgggccccacaggagaagcggccagggcccgcggggggcaccacctgtggacagccctcctgtccccaagctttcaggcaggcactgaaacgcaccgaacttccacgctctgctggtcagtggcggctgtcccctccccagcccagccgcccagccacatgtgtctgcctgacccgtacacaccaggggttccggggttgggagctgaaccatccccacctcagggttatatttccctctccccttccctccccgccaagagctctgccaggggcgggcaaaaaaaaaagtaaaaagaaaagaaaaaaaaaaaaaagaaacaaaccacctctacatattatggaaagaaaatatttttgtcgattcttattcttttataattatgcgtggaagaagtagacacattaaacgattccagttggaaacatgt

SEQ ID NO: 1432 - DNA, 7643 bp, Homo sapiens
  source 1..7643: mol_type = genomic DNA
gcgggtcgttagctgtcagagccaagcggcgggctggcggcgggctccgacgtctgcgccaggacctggctggctgagcccggcgcagcagcagcagccagggcagcgcggcccctactccctgtcaggtcgtagaggcgagcagggaccagctggtcgccggcccctcgggcaagatggggaaccgggagatggaggagctgatcccgctggtgaaccgtctgcaggacgcgttttcggcgctgggacagagctgcctgctggagctgccgcagatcgccgtggtgggcggccagagcgccggcaagagctcggtgctcgagaacttcgtgggcagggactttctccctcgagggtcgggcattgtaacaagacgacctcttgtgctgcagcttgttacttctaaagcagaatatgccgagtttctacattgcaaaggaaagaaatttacagattttgatgaagttcgccttgagattgaagcagaaacagatcgcgtgactggaatgaataaaggcatttcctccatacccattaatttacgagtctattccccacacgtgttaaatctaacccttattgatctacctggaataactaaagtgcctgtgggagatcagccaccagatatcgagtatcagatcagagaaatgattatgcagttcatcacgagggagaactgtctgattttagctgttactccagccaacactgatcttgcaaactcagatgcgctgaagctagctaaagaagttgatcctcaaggtctgagaaccattggagttatcaccaaactggaccttatggatgaaggaacggatgccagggatgttctagagaacaaactgttgcctcttcgcaggggttacgtgggggtggtaaacagaagccagaaggacatagatgggaagaaggacataaaggcagccatgctggcagagaggaagtttttcctttcccacccggcttacagacatatcgctgaccgaatgggaaccccacacctgcagaaggtccttaatcagcaacttaccaaccacattcgggataccctaccaaacttcaggaacaaactacagggacagttgctctccatagaacatgaagtagaagcctacaaaaatttcaaaccagaagacccaacaaggaagaccaaagcattgctgcagatggttcagcaatttgctgtggactttgagaagagaattgaagggtcaggggatcaagtagataccctggaactctcaggtggtgctaaaatcaatcgtatttttcatgaacgctttccttttgagatagtaaagatggagttcaatgagaaagaattgcgaagagaaataagctatgcaatcaaaaacatacatggtatcaggacagggttgtttactccagacatggcatttgaagcgatagtcaagaaacagattgtaaagttgaaagggccttccttgaagagtgtggatctggtaatacaagaattaatcaacactgtgaagaagtgtaccaaaaaactggcaaacttccccagactctgcgaggaaacggaaaggattgttgctaaccacattcgtgagcgagaagggaagacaaaggaccaggtattgctattgattgacattcaagtctcttacatcaacaccaaccatgaagacttcattggcttcgcaaatgctcagcagaggagcagtcaggttcacaagaaaaccacagttggaaatcaggtgattcgcaaggggtggctcaccatcagcaacattggcatcatgaaaggcggctcgaagggatactggttcgtccttactgcggaaagcttgtcctggtataaagatgatgaggaaaaagaaaagaagtacatgcttcccttggacaacctgaaagttcgggatgtggaaaagagctttatgtctagcaagcacatctttgcactctttaatacagagcaaaggaatgtatacaaagactatcgcttccttgagctggcatgtgattcccaggaggatgtcgacagctggaaggcatctctactaagagctggggtctatcctgacaaatctgtagggaacaacaaagctgaaaatgatgagaatggacaagcagaaaacttttccatggacccacaattggagaggcaagtggagaccattcgcaacctcgtagactcctacatgtccattatcaacaaatgtatccgagatctaattccaaaaacaataatgcaccttatgatcaataacgttaaagatttcataaattccgagctcctagcacagttgtattcttcagaggaccaaaataccctgatggaggaatctgctgagcaggctcagcgccgggatgagatgcttcgaatgtatcaagcactgaaagaagcccttgggataattggggacatcagcacagccaccgtgtccactccggcaccccctccagtggatgactcctggatacagcactctcgcaggtcacctcctccaagccccacaacccaaaggaggccaacactaagtgctcccctcgcaaggcccacatccggccgaggaccagctcctgccattccctctcctggcccccactctggggctcctccagtcccattccgtccaggcccattacctcctttccccagcagcagtgactccttcggagcccctccacaagttccatctaggcctacgagggccccgcccagtgtcccaagccggagaccacccccatcaccaactcgtcccactataatccgcccactagaatcctccctgttagactaaacgaagtgtctggcatggcaattaatcactaatgaattatgcgaaagcaacatatttgataaccgttgcagtaaatcatgagtagtcgcatgtgtggacatcagtaggcaagtaaccagttttactaatgcattcatcgctcatcttcattgctcatggtatgtcaaacctttggggtttgactcagaaactgctaaccttttagaggctttatatgttgtactgaccaaggtaggtttgtatagcagccctatactttggggatcatttgcctaccatggcatatatttgaaattgctttggacaagttttctaggctatctaccaggtagctcattaaacgtaattcttcagatatgagatagtgggcttagacctaagccatacatatttcttttcccacattctgtttaggatgacagtaattctgttgtctaccattaatgctactacctactccataattgcctatttagctcctcttttcttcctttttatttcataagactgctaggaagtgattttttaaaattaggactccttaagaataaacttttccagaagcacgaggtagtttgcaaaggaaaagtctgcactgtttgctctaaagagcttctcctcattccaatgtgttttgcttcatgctagaagcatatgcaacagtgaataaaagcttctttttttgttaatcagtcaataaatttggctaattagtttcagagttcaaggaagaagcaaaatatcacatctctagaagtgttgggaaaaatataatttctttctttacttatattcacctcatggtaggttatattgaaggctgacatggagaatgtttacttttctatttggcatagctaactacactttgatactaactccagttttactattattattttggttggaaaaaaaattcactctttacgtgctaatttgtaatcttgttttgtaagaatttatcctacccttgaaacaggctcagtgtaactgtatatccattctaggctttcttaataaatcttgaggctatgggataatcacatttaaagaatggttcctgaaatgaagtcagtagaaatggcatgggataagagcagagctcacacttttacagttgcagtatttcaaagtccctatccaggtcactccagaaaagggtattgaaacgttgaaatctaaagcaaatttgcaatttcttaagatttctaaaatttaccagaacagtttagcctgggggttaatagttaagtcttgaggctaagttttggactaccaaggaccagatgattcacatgtaggaaacagccagaagccaactggaattttgtgtgctaactgttcccagacagcagagcaagtattcactgagtaggggtgtcccatgacactatttcatattctacagaagtaaatcaggtttcaccaactgaaatgtctccctttgaaagtagcaaacatgatttgtatgttaacttaactttaatttcctgtgtagtttacacccagagcagatactcataaagtataaagtaaaaacttttaaccattattaaacagagaacttgccatgttgagtgccattgtattgaacttattctaaaggcttatgctaacccatttataattggtaaaaatcagaaaatacaagatttacataaaggtcatttcaacttttaaggttaccagtgattgtataaaaacatcacaatcctaaatcctctcgtatctcaccccaaaccccaaactgggggaaaaaaagttaactctttgtgaatggaaccaatgtgcaagatacatactgcatttttaaaatagtgtctcagctaaatggaaaactgttaagcaaacatccatagtaaaacaaataatcttcagtgagatctttttataaaacttcttgtttttaggattccctttgcttcttcctttgaattctctaaaataggcagctaacggattatatacttcagggtttggctttgtgctaaatgtggttttgtgttttgctgtatttcaaaattttccttctgttaaaggaaaatattgtgaataaccactggtgtgttcttagatcagcacaaaccatgtcaaaaaaaattggagatttttttccaattttccttccactgatcttaggcagtaataaacaatggcatttgtcatctttggcacttgcttttagattatagtcccacagttgcactgccccaattgtctacctttgtgggtacatttttgttctttactcctaagttatttctcatagaacccagcctactctagaatttcagcagtgacattggagaatatttttaatttgctgcagtactatgtcatattattagtatgaatctcatttcccaaagggtttgtattctgctaaaaggagatgccaatgttgaatgaagtctgaaactctagtatgtgcatagtttgacgtgcagcatgcacaccaggccttaagatgggaatgtagcttaatgattttctgtttcccataccatttctaatcttttgtgtaattttctcttaactgattgctctgatattgtaaacacaatagatgtagctctatcatgtctagcataatttaaaaaatcagtgtttttaggatttgggaaaataaactgtaaatgtttatttgataggtaaatatagttttattgtcacatgctaaatattgcatgcatattgactaattggaataaccatttactcaattatggacagcttattgaaatagtattgatttagaaaaagtatattgcatttctaaaaaacatctaccaaggttactcgtctgaatattgcttttagccgtgttttataacatagacgagcagtagggtctgtttattagcaaatttcctatttgttccaatacaaactcactttattctaaagtatattaatgaaaccagttcctgtgatgtaactgtaagccttctcgacttagacttaaaaagtggtcacatagattaattttgtgactttttagtatagactgtagccataattctcaaatatgaaatgggacctaataccagtatgtgataaatgttgatgttttctgtgtacaaacacattttctatgcatgtgtctctgtgtatatggcatatacctagtaagtatgtttctgtaagtatgtgtattttatgtccatttgagtaggtaggtaggttttaaaaatactagttaaaatgccacaagcatgagtgtgattgtatgtgcactgtgtgtatatatataaatatatgtatatgtatggttgtaaatatctatgtatacatgtacttagtatgtgtggtatcaggatattttttaaactgtgataatacaacagatagctttgaatgatctgccataacatgtggtaacaatagttcatttctcataacatatatgaggtatacaaaattttctaactccagattgtagtcattttgagaggtacaaagctcataattaccatgacaacatggtaatgtccatagacatttgtatctgaatccacaagaagatctgaatctaagaaggaattacctttgacaatatttttcggtaagaagtaaaacctctggagacctatctttaagatctctaattggaattataaattatttttggattgctgagctgaatcttaaaaagccaagttgatatacatagtcatttttcctctatggtagaagtaaaaaaaaaaaaaaaggacatagcaacattaaagtagtggatttttctgagtaaatttgctgaaaatataagagagaagctatctaataccttggaggtaggtcatccactttttcaggtaaacatttttcatttggcaaatggcataattatttgaaagtgacaggaatctcctcagaatgaagaataaagcctactaggtctctaactgttgaactcatgaaagaagatagtgtatgagacttaagccatgagttttgtatcatttcaattagaagactactagctgtgagctcagagtttaatgtaaatgaatctagatgattttgaagaaatgattattcgttcaccagatcactcattgtacattctaaaaagctcaaatgagtcttctagatactcttactcatcctgtctggttgctatgtttaaaattatgtggtgctgtgtaggtgaaactttaagaatatttttgaagcatatgtaatatatgcactgctatttgtgtgtgtgtgtgtgtctttgtatatatgtaagaatgtgtgtatgtgtgagagcaagagagaggaaactcaaagaggagtgtttgtcttaagacctgttcatactggtatattggtgagacttctcacttctggttggaggtttcacatatggctcaactcaagtcattaatctctttttaatttttactcttgaattccttaaacttcgctcattatgaaatgttttaaaattatgacaaaaattactctgtctaaccacttgccttgtctgctaccagtttgttaaaaattattccccccaaccagtaattccaccagtactacttgatttgtgttatatttcctatgtacatgtacagcctttgttttgcttgcttgtctatttttactttcccttttttgggtcaaatttttcttttgctttgtttgaagaaggaatatacagaagtaaaatcttgtcttctctgctgattctttaattaatatgagccggatactttccactgtcttcttggcactttcaggatttcttaatgctgatatatggactcttagaatggaatttttgaagaaaaatctcaaagcctgtatcgttcttgaaggtcacatgtacctattgtgaaaatgtgaagctgtatttctgaagctgaaataaattataacatttgaagg

SEQ ID NO: 1433 - DNA, 1822 bp, Homo sapiens
  source 1..1822: mol_type = genomic DNA
agtagcgggcggcagagctggagtgaagggagctagtggtaaagggagctggtggaggggtggcggcaggggtaaggggcaggggacaccctctagacggagagcgggctccgaggtcctggctggccctcggtgcgcccgcccctgtgttggtcccacaatccctggcaatgagaggccagggtttattggacagagtcagttgtggggttcagagggtcagcaatcaatcaatcctccgaatccagagatttagacccagtcgtccgtattaggactggaggggggtcaataggttcagtgtttgagatgccaagggaacctgtcttttgatttggggttcaacatacagaggtagcagtcaccattatgctcaaagcggtgatcctgattggaggccctcaaaagggaactcgcttcagacctttgtcttttgaggtgcccaaaccattgtttcctgtggcaggggtccctatgatccaacaccatattgaagcctgtgcccaggtccctggaatgcaggagattctgctcattggcttctaccaacctgatgagcccctcacccagttcctagaagccgcccagcaggagtttaaccttccagtcaggtacctgcaggaatttgcccccctaggcacagggggtggtctttaccattttcgagaccagatcctggctgggagccccgaggcattcttcgtgctcaatgctgatgtctgctccgacttccccttgagtgctatgttggaagcccaccgacgccagcgtcaccctttcttactccttggcactacggctaacaggacgcaatccctcaactacggctgcatcgttgagaatccacagacacacgaggtattgcactatgtggagaaacccagcacatttatcagtgacatcatcaactgcggcatctacctcttttctcctgaagccttgaagcctcttcgggatgtcttccagcgtaatcagcaggatgggcaattggaggactcaccaggcttgtggccaggggcaggtaccatccgcctagagcaggatgtgttttcagccctggcagggcagggccagatatacgtgcatctcactgatggtatctggagtcagatcaagtccgcaggttcagccctctacgcctcccgcctctacctgagccgataccaggacactcacccagaacggctggccaagcacaccccagggggcccatggatccgagggaatgtgtacatccacccgaccgccaaggtggccccctcggctgtgctgggccccaacgtctccatcgggaagggggtgaccgtgggtgagggtgtgcggctccgggagagcatcgtcctccatggagccactttgcaggagcacacgtgtgttctgcatagcatcgtgggctgggggagcaccgtgggacgctgggcccgcgtggagggtacccccagtgaccctaaccccaacgatccccgagcccgcatggacagtgagagcctcttcaaggacgggaagctgctgcctgctatcaccatcctgggctgccgagtccggatccctgccgaggtgctcatcctgaactcgattgttctgccacacaaggagctgagccgaagcttcaccaaccagatcatcctctgagtagggctgccagaaggcccccagctcctacccactccccttgaggctgctgcctgcttggccagcctctgtccagaaaggaccagagaaagccaggctggatcgtcacatgccggggagcaatgtggatggcctggggactcctgggttttctccctcccgactccctaataaaccccgtgaaccttgg

SEQ ID NO: 1434 - DNA, 5849 bp, Homo sapiens
  source 1..5849: mol_type = genomic DNA
agtagttccgctccgagggcggaagtgcgcgtctcttgtttgtgcggctgaccagttggcgacatggtggcacccgtgctggagacttctcacgtgttttgctgcccaaaccgggtgcggggagtcctgaactggagctctgggcccagaggacttctggcctttggcacgtcctgctccgtggtgctctatgaccccctgaaaagggttgttgttaccaacttgaatggtcacaccgcccgagtcaattgcatacagtggatttgtaaacaggatggctccccttctactgaattagtttctggaggatctgataatcaagtgattcactgggaaatagaggataatcagcttttaaaagcagtgcatcttcaaggccatgaaggacctgtttatgcggtgcatgctgtttaccagaggaggacatcagatcctgcattatgtacactgatcgtttctgcagctgcagattctgctgttcgactctggtctaaaaagggtccagaagtaatgtgccttcagactttaaactttggaaatggatttgctttggctctctgcttatcttttttgccaaatactgatgtaccaatattagcatgtggcaatgatgattgcagaattcacatatttgctcaacaaaatgatcagtttcagaaagtgctttctctctgtggacatgaggattggattagaggagtggaatgggcagcctttggtagagatcttttcctagcaagctgttcacaagattgcctgataagaatatggaagctgtatataaagtcaacatctttagaaactcaggatgacgataacataagactgaaagaaaatacttttaccatagaaaatgaaagtgttaaaatagcatttgctgttactctggagacagtgctagccggtcatgaaaactgggtaaatgcagttcactggcaacctgtgttttacaaagatggtgtcctacagcagccagtgagattattatctgcttccatggataaaaccatgattctctgggctccagatgaagagtcaggagtttggctagaacaggttcgagtaggtgaagtaggtgggaatactttgggattttatgattgccagttcaatgaagatggctccatgatcattgctcatgctttccacggagcgttgcacctttggaaacagaatacagttaacccaagagagtggactccagagattgtcatttcaggacactttgatggtgtccaagacctagtctgggatccagaaggagaatttattatcactgttggtactgatcagacaactagactttttgctccatggaagagaaaagaccaatcacaggtgacttggcatgaaattgcaaggcctcagatacatgggtatgacctgaaatgtttggcaatgattaatcggtttcagtttgtatctggagcagatgaaaaagttcttcgggttttttctgcacctcggaattttgtggaaaatttttgtgccattacaggacaatcactgaatcatgtgctctgtaatcaagatagtgatcttccagaaggagccactgtccctgcattgggattatcaaataaagctgtctttcagggagatatagcttctcagccttctgatgaagaggagctgttaactagtactggttttgagtatcagcaggtggcctttcagccctccatacttactgagcctcccactgaggatcatcttctgcagaatactttgtggcctgaagttcaaaaactatatgggcacggttatgaaatattttgtgttacttgtaacagttcaaagactctgcttgcctcagcttgtaaggcagctaagaaagagcatgcagctatcattctttggaacactacatcttggaaacaggtgcagaatttagttttccacagtttgacagtcacgcagatggccttctcacctaatgagaagttcttactagctgtttccagagatcgaacctggtcattgtggaaaaagcaggatacaatctcacctgagttcgagccagtttttagtctttttgccttcaccaacaaaattacttctgtgcacagtagaattatttggtcttgtgattggagtcctgacagcaagtatttcttcactgggagtcgagacaaaaaggtggttgtctggggtgagtgcgactccactgatgactgtattgagcacaacattggcccctgctcctcagtcctggacgtgggtggggctgtgacagctgtcagcgtctgcccagtgctccacccttctcaacgatacgtggttgcagtaggattggagtgtggaaagatttgcttatatacctggaaaaagactgatcaagttccagaaataaatgactggacccactgtgtagaaacaagtcaaagccaaagtcatacactggctatcagaaaattatgctggaagaattgcagtggaaaaactgaacagaaggaagcagaaggtgctgagtggttacactttgcaagctgtggtgaagatcacactgtgaagatacacagagtcaataaatgtgcactgtaatggacttaataactacatgcttgcagtcactggtatcttaaaatattatcatgtaaacaggtcatctttaccttcataactgaattgagtttctgggttttttttttttttgagatggagtcttgctttgtcacaacctccacctcccaggttcaagcgattctctttcttcagcctcctgagtagctgggactagaggcacaccaccaattccggctaatttttgtatttttagtagagactgggtttcaccgttggccaggcgggtctcaaactcctcgtctcaggtgatctgcttgcctcggcctcccaaagtgctgggattacaggcgtgagccactgcgcccagcctgagtttcattttttaagtcacatagcagtagtccttatttcagtgctagaccctttgaaatgcgatgaaagctatatggacccttcgctttgttatataacatatgcacacatacccagaattttgcacatatgttcagagattcctagacctgcagacctgcctctgtgtgtcccaatttaagaacctctgttctttcttcatgactggatttgcccaattttgtgttattttgggacttaatttgtccctctttgggacatttccttatttattgccctcttcagagagtagatgtagaaaataaagagaggaaacctagattacttaattttattttaacattttctatagatagcataccacgccaagtgtgctctgtcttgatccccttctttctagcatctgccagacattgtagagtttcgcaagcagttgtaggtttgagctgcagccagtcatttcttttattctttaaaagtacatagatttgtctttttagggctttactgaaagtaaaatatcctgacatttaaactgacagatgtaggaggtaaaaaatagagttctgaaacatttgaatttatgtgacagctgaagtcacgagatgagggatatatgtcccccagggaggatgcagaaagaagaaaagggtactggaaacagcatgtcagtggtgccagctgagggctggaggcagccaggagagttgggagcctgggtgctgggtggagagaggttaacagggaagacatgggaagtattgtgaaggctggtgtgagcaggggactactccagccctgttggaacatagagccatttggcagattgacaatgcagtgacagctgtatataataaatgtgttgaaaggaggaaggtgaggattttcttggtgggagtttatgctgttatttaacatattttgcttccaaaggggttaagatgttttacctaaatggaggtttctaggtcagtgctatacaatatttctaatctgtgttttatagtgtgagctacatatgtaattttaaaattttcaagtagccacataataaaggaaacaggtgaaatttaatgacatatttcctttaatacggtatatccaaaatattattatgtcaacctataatcagtataaaaacctgttactgaaatattttatagggcccatctcagttcagactagccacatttaagtgcttcatagccacatgtggctcatggccatccatatttggacaatgtactttagactattgcatctgtatactcttgtgccgtcagctggggggtggggtgtgtgtgcgtgtataccaaggcagtgagcatctgagctttgaacctcaaagaccaaaatgccctgcccattttcctgcttatcagctgaggaatctttacccacattgacacatgggcttgttctgacccaagtgcatgcaggcttccagagcagattcagaggcctaacttagtcctttagctttcctcccagcacagaactcccaaggttatctgcaagtaggccttgcctagagagactgagttttcaagttgtcagttttcccaaattgtcctcaagcatcttcctctggaatcaccttactgtttagtaaacattcagaggacttgctacacatctgggcagtctgcattgtaattcatatgtgtttacacatttgtgtcttcatctgctaaagcacctttgaaccatattgtaattcataatatctgaagcaattattatgaattgtagtaattcataatattgaagcgattcataatatctgaagcaatccccagatacgggttaggcatggccctgctctgagcaggatggcaaaagtggcagtccgtgacgcagcccttgttaccccaggctattactaaatggtggtggtggttttatcttaattaaaatgacatcaccaacaatgggccctttcctgtctgccaggaaaagttttctgtagtgacgcacgtgttgtgtgtgtatgtgtgcgtttgaggctatattactcattgctacggcagttcaaaatgacttggaaaaaaacaatgaacgctggtcattgatatgtatactgacatgtttgagggaagttactgtggtctgtaacttatgaaatacataaaaaatatgatgggtggagtgacggacacatggacagatatgaagcaagcactgtaaaatattagtggtagtttttgtatgcccatactcacggcaccattattcacagtagctaagagatggaagcaatatgtgcccatcagtgggtgaatgatcaacaaaatgtggtatattcatacagtggaatattattcagcctctaaaaggaagatacgctgacatgtgctgcaacatggatgaatcttgaggacatgatgctaagtgaagtaagccagtcactggaagacaaatactctatgcttccatttatgtgaagtatctagagcagtcaaatgcatagaaacaagtagaatggtagttgccaaggactgggggaggaggaaatgaggagttgtttaatgggtatagtgtttcagttttgcaagataaaaagtcctgtggattggttgcacagttaagttatgtgaatgctgtatgccaactcaactgtacactctaaaatggttaagatggtaaatcttatctttattttaccacagttttttttaaagcatggtaaacaccatttcccaggatgtaaatcggtactaaaaaaaaagtgctccaaagtaagatatatttgggaaacacagggataactaaggttagataggtgttctttattgcaggaattctaagagcatttaacaaattaatttacactgggaattttcagtgtggagggtctggctcatagcatttcacaaacattatacttcagagtcccaaagcctttaaataaaatgttaatggtagaaactccttaaggggtgttcactgta

SEQ ID NO: 1435 - DNA, 4080 bp, Homo sapiens
  source 1..4080: mol_type = genomic DNA
aaacggggtcacagcaggacaaggaagtagccgatctcccagatgcggtctcttcgctccgctccacccgcaccagcagcggcccacccacctctcctgtaagaggaagaacgtcccggagacacttccggccccgccccccgaggcggaagcggagtgccaggctactcctcccgcagtgtgggtggttccgaggctgactaccctgcggcggcgcggctcgcagtccttctcagcatggaccgcacttgtgaggagaggcccgctgaggatgggagcgacgaggaggacccagactccatggaagccccaacccggatccgggacactccggaagacatcgtgctggaagctccggctagtgggctggcgttccatccggcccgtgacctactggctgcaggggacgtggacggggacgtgttcgtcttttcctactcttgccaagagggagaaaccaaggagctctggtcatcaggtcaccatctcaaggcctgccgagctgtggccttctctgaagatgggcagaagctcattactgtctccaaggacaaagccatccatgttctagatgtggagcagggccaactggaaagacgtgtttccaaggctcatggtgcccccatcaatagtcttctgctggtggatgagaatgttctggccactggggatgacacaggtggtatctgtctctgggaccagcggaaggagggccccttaatggatatgaggcaacatgaagagtacatcgcagacatggctctggatccagccaaaaagctgctgctgacagccagcggggatggctgccttggcatcttcaacattaagaggcgtcggtttgagctgctctcagaacctcagtctggggacctgacctctgtcactctcatgaaatgggggaagaaggtagcctgtggctccagtgaaggtaccatctacctcttcaattggaatggctttggggccacaagtgaccgctttgccctgagagctgaatctatcgactgcatggttccagtcaccgagagtctgctgtgtactggctccactgatggagtcatcagggctgtgaacatcctaccgaaccgagtggtgggcagtgtgggccagcacactggggagcctgtggaggagctggccctctcccactgtggccgcttcctggccagtagtggccatgaccagcgcctcaagttttgggacatggcccagctgcgagctgtggtggtggatgactaccgtcggcgcaaaaaaaagggaggaccactgcgggctctgagcagcaagacttggagcaccgatgacttcttcgcaggactgagggaagagggagaagactccatggctcaggaagaaaaggaggagactggggatgacagtgactgaaggaatgaattgaatcttgagacgggtcctcaccaggcaagagtcttgcttattgggctgcatccccagagaggatatgaattattttttgaaaagacagggttttgccatcgtccaggctggagtgcgctggcttgatcttggctcactgcagcctcaatgtccccaggctcagattgtccttccaccttagcctctggagcagctgggactacaggtgtgcactaccacaccaggccaatttttgttttttttttttggtagaaacgggtctgttttgcccaggctggtcttcaactcctggactcaaatgatccacctgcctctgcttcccaaagtgctgggattacaggcacgagccaccacacctggccaaaaaaatttatattttttgagacaaggtctcactctgtcacccaggctggagtacagtgggttgatcatggctcactgcatccttgacttcctgggctcaagtgatccacctcagcctgcctggtagctgagacttaacaggcatctgccaccatgcttgactaatttttgtgatttttttttggtagagaccaggggtttcactatgttgaccaagctggtcttggaactcctgggctcaagtgatcctcctgccttggcctcccaaaatgctgggattacaggcatgagccactgtgcctggctggatatgaaattttttttttttttttttttgagacagggtttcgctcttgttgccagggctggagtgcaatggcgtgatcttggctcactgcaacctccgcctcccgggttcaagcaattctcctgcctcagcctcccaagtagctgggattacaggtgtctgccaccatgccaggctaatttttgtattttcagtagagacggggtttctccatgctggccaggctggtctcgaactcctgacctcaggtgatccacccgcctcagcctcccaaagtgctgggattacaggcaaaagccaacacacccggcctggatatgaatttataataccctacagtgcaacacaagaagatgcactcaaagcactgatgtgaggaagtacttgccccgtagcagctattcactctaccagtgtaaacaaactctaagctagggcaagacagcacagacacaagtatatactaaccaggggtttaatataaatacaaccagcatagaaagacccaaaactatacagaaaccaaaaccagaatgccatgtggtggaggcaaagggcagaatttctgacccctttggctcagctgcccttccccacaaataaaaaccaacaaagaggacaaatcaggacaataaagaagattcatgctaagctgtggcagaggggggaaggtatgatcgggtgggggtgggacaaggaacggccatggaagatcactgggtcaggttggaccctgggctgggagcgggagggcaaggcccctcaccacaacttaacccaaacctaagctgcccccaggtgccataggtccctgtcccagcagggaggctgatgggcctgggcccatgcccctccccacctttgggggtcagaaagtggccacccaggcctgctgggatggggcctgacacaggctctgcatgcccattcagggtgcctgtggagaaagaatggagtcactgtttaaccatggtacctgcctcagccccagcagaccacaggaggttggccccagactcactgagtgcctgcagcagccgtacagacacagcatccttggccacctcatgcccatcccggccatctagggtcagcacaacccagatgaggccgctgaagggcaccggatgcccaggaatcaccacctggtaccagaagcggtgccagccagcaggtcctatgcccaaacacttggtgaggaacacagggctgcccagcttcattcgttggcacagcaactgcagggtagcccgagccccttggaaccctaacttgtcccttgccaaagccaactggctgccctctggctgtggggaccgcaagaagggacccacaagctgctggcgaagtcgctgcttcaggtctggcttgagccactccacagccacctgctctccacagaggtgtgactgccctgtaggaaaaatgcaaagacaagggcaggtctaaaccctgggcccaagcctccaggtggtgagccctttggagctacacagtcctgttatttgtagccttcccatttcctggtagtgtgaccatgggtaagaaaagacaatgaagccttcagcctccattatttgcaaagggagtataacacactgctaccttacaagtttccttggagaagtactggttaattgcaggctttgtctgcctcataaccatcataatggctaatctttactgggaaaacttgctgtaagtcagtcagtgtgctaagtaccgtacacccattatgttacttaattctcataacagtctgaggaaacagattctatagtagtaaaaagctcagttggattcccttgagcaaatcaatttctctaacagtttcctcatagcttgagggtcctgtgcctattttgcggtgtgggggtgggggaaggttgagaattaagtcaggaggtaatgctcgggaagtgtcacaaatttaggtaagcggtggtggtagcaccattggaagttttaaaaatctgagatcaaatagtaaaaggttgcaaattctggca

SEQ ID NO: 1436 - DNA, 1796 bp, Homo sapiens
  source 1..1796: mol_type = genomic DNA
aaagggcgccacgagtcggcattgtcaggcggcggcaccgcgcgggacggagcttggctgttggtcggtgggttcccgtgcggcggcggccaaggaggaggagacacagttggagcagctccgtgggctgactggggcgaggcctcagcagcgcgagcttgagtgcggccgagcctgcggcgccttcccctgcgggtggggacgagcgggccccgcggcgtcatcggcggcgaggagccgccgcgcctcggcctagcatgtcggaagcgggcgaggagcagcccatggagacgacgggcgccaccgagaacggacatgaggccgtccccgaaggcgagtcgccggccggggctggcacgggcgccgcggcgggggctggaggcgcgaccgcggcgcccccgagcgggaatcagaacggcgccgagggcgaccagatcaacgccagcaagaacgaggaggacgcgggaaaaatgttcgttggtggcctgagctgggatactagcaaaaaagatttaaaagactattttactaaatttggagaggtcgttgactgtacaataaaaatggatcccaacactggacggtcaagagggtttgggtttatcctgttcaaagatgcagccagtgtggagaaggtcctagaccagaaggagcacaggctggatggccgtgtcattgaccctaaaaaggccatggctatgaagaaggacccggtgaagaaaatcttcgttgggggtctgaatcctgaagccactgaggaaaagatcagggagtactttggcgagtttggggagattgaggccattgaattgccaatggatccaaagttgaacaaaagacgaggttttgtgtttatcacctttaaagaagaagaacccgtgaagaaggttctggagaaaaagttccatactgtcagtggaagcaagtgtgagatcaaggtggcccagcccaaagaagtctatcagcagcagcagtatggctctgggggccgtggaaaccgcaaccgagggaaccgaggcagcggaggtggtggtggaggtggaggtcagagtcagagttggaatcagggctacggcaactactggaaccagggctacggctaccagcagggctacgggcctggctatggcggctacgactactcgccctatggctattacggctacggccccggctacgactacagtcagggtagtacaaactacggcaagagccagcgacgtggtggccatcagaataactacaagccatactgaggcggcagcaggagcgaccaactgatcgcacacatgctttgtttggatatggagtgaacacaattatgtaccaaatttaacttggcaaactttctattgcctgtcccatgtgcatcttatttaaaatttcccccatggaaatcactctcctgttgactatttccagagctctaggtgtttaggcagcgtgtggtgtctgagaggccatagcgccatcatgggctgatttttattaccaggtcccccagaagcaggtgggaggctctgcttcctgctgccgctctgcagcctggacctgtggaccctggttgtaaagagtaaattgtatcttaggaaaccagtgtcacctttttttcaccttttaattttatattatttgcgtcatacatttcctgtaacggaagtgttaattttactgtactttttggtaccttttgggaatctaatgtattgtaaggtattttacacgtgtcctgattttgccacaacctggatattgaagctatccaagcttttgaaataaaatttaaaaacccccaa

SEQ ID NO: 1437 - DNA, 4371 bp, Homo sapiens
  source 1..4371: mol_type = genomic DNA
ggcggcgcagttgcgagtgcaggtgagttccgggccgccaccggctgcttctgtgggccgggcctctgagcattggcgaccccagcccggctccgggctgacagggcctggcttcgccaggctccttgccagaggcctccactcactccagacccctatagcccgtcgctgtcagctgtcaacaaaggatgcgaatgctggccgcttcctgtgggcttcgtgtcacccagaggtgagcccaggccaggatgggggactccagggacctttgccctcaccttgactccataggagaggtgaccaaagaggacttgctgctcaaatctaagggaacctgtcagtcgtgtggggtcaccggaccaaacctatgggcctgtctgcaggttgcctgcccctatgttggctgcggagaatcctttgctgaccacagcaccattcatgcacaggcaaaaaagcacaacttgaccgtgaacctgaccacgttccgactgtggtgttacgcctgtgagaaggaggtattcctggagcagcggctggcagcccctctgctgggctcctcttccaagttctctgaacaggactccccgccaccctcccaccctctgaaagctgttcctattgctgtggctgatgaaggagagtctgagtcagaggacgatgacctgaaacctcgaggcctcacgggcatgaagaacctcgggaactcctgctacatgaacgctgccctgcaggccctgtccaattgcccgccgctgactcagttcttcttggagtgtggcggcctggtgcgcacagataagaagccagccctgtgcaagagctaccagaagctggtctctgaggtctggcataagaaacggccaagctacgtggtccccaccagtctgtctcatgggatcaagttggtcaacccaatgttccgaggctatgcccagcaggacacccaagagttccttcgctgcctgatggaccagctgcacgaggagctcaaggagccggtggtggccacggtggcgctgacggaggctcgggactcagattcgagtgacacggatgagaaacgggagggtgaccggagcccatcagaagatgagttcttgtcctgtgactcgagcagtgaccggggtgagggtgacgggcaggggcgtggcgggggcagctcgcaggccgagacggagctgctgatcccagatgaggcgggccgagccatctctgagaaggagcggatgaaggaccgcaagttctcctggggccagcagcgtacaaactcggagcaagtggacgaggacgctgatgtggacactgccatggctgcccttgacgaccagcccgcggaggcccagcccccgtcaccacggtcctccagcccctgccggacgccagagccggacaatgatgctcacctacgcagctcctctcgcccctgcagccccgtccaccaccacgagggccatgccaagctgtctagcagcccccctcgtgcaagccccgtgaggatggcaccgtcgtacgtgctcaagaaagcccaggtattgagtgctggcagccggaggcggaaggagcagcgctaccgcagcgtcatctcagacatctttgacggctccattctcagccttgtgcagtgtctcacctgtgaccgggtatccaccacagtggaaacgttccaggacttatcactgcccattcctggaaaggaggacctggccaagctccattcagccatctaccagaatgtgccggccaagccaggcgcctgtggggacagctatgccgcccagggctggctggccttcattgtggagtacatccgacggtttgtggtatcctgtacccccagctggttttgggggcctgtcgtcaccctggaagactgccttgctgccttctttgccgctgatgagttaaagggtgacaacatgtacagctgtgagcggtgtaagaagctgcggaacggagtgaagtactgcaaagtcctgcggttgcccgagatcctgtgcattcacctaaagcgctttcggcacgaggtgatgtactcattcaagatcaacagccacgtctccttccccctcgaggggctcgacctgcgccccttccttgccaaggagtgcacatcccagatcaccacctacgacctcctctcggtcatctgccaccacggcacggcaggcagtgggcactacatcgcctactgccagaacgtgatcaatgggcagtggtacgagtttgatgaccagtacgtcacagaagtccacgagacggtggtgcagaacgccgagggctacgtactcttctacaggaagagcagcgaggaggccatgcgggagcgacagcaggtggtgtccctggccgccatgcgggagcccagcctgctgcggttctacgtgtcccgcgagtggctcaacaagttcaacaccttcgcggagccaggccccatcaccaaccagaccttcctctgctcccacggaggcatcccgccccacaaataccactacatcgacgacctggtggtcatcctgccccagaacgtctgggagcacctgtacaacagattcgggggtggccccgccgtgaaccacctgtacgtgtgctccatctgccaggtggagatcgaggcactggccaagcgcaggaggatcgagatcgacaccttcatcaagttgaacaaggccttccaggccgaggagtcgccgggcgtcatctactgcatcagcatgcagtggttccgggagtgggaggcgttcgtcaaggggaaggacaacgagccccccgggcccattgacaacagcaggattgcacaggtcaaaggaagcggccatgtccagctgaagcagggagctgactacgggcagatttcggaggagacctggacctacctgaacagcctgtatggaggtggccccgagattgccatccgccagagtgtggcgcagccgctgggcccagagaacctgcacggggagcagaagatcgaagccgagacgcgggccgtgtgatctgctgggctagtctccccatgtgccccaccccgcggaaggcgtgtttgtgcccagaagagaggccgggctgctgcagaaccccgccgtgtaaagaggcagaaaagttggtttggtttgcagtaacgctgcaactagaaaatatatgcacttcaggcttgttgaaacgaccaagactctgtgacgttaatttgggtctttgtcctggcagtgcctctgccagtcactgtcatcgttgtgtcccccacaactgtcctcttgctagctcggcccagctttgtccctggagcccgatgctacccctgtcagacagaggctgcggcctgggccagagtcagggagtagctgctgcttcacggcgtctccactgtgcgattggcccggagccccgaagactcggagggagctgctcagggccggtgagcgcagccagaagccctggccagtgaggagctcacaggtcctccctggtggtcccgccgcacctctgcatctcctgggcgtcaccaggaaggctctgaagtcccgggctgctctcagcacttctcctgcagactgaagactctggactcattgctgattggaacaccaggaggaggttggatttctgccagtgggggatgtttctggaggcagctggtcccccacaccgcgtcctgctgagcctgccccctggattggctgtaatttgcctcgaagttcagcagttcatcttcatgggaaatttgctgagcccccaccagggaaccggatgatgaaacagggatacctcacagcttggccatttgaggcaaaggcagcttcccgagctgatgctaaagaagacagactttcccttcctcccagcagcagcagtgcagagcccacctggagggatgtgggggctgtgcagggtgcagcgctcaggtggatcctgggaagcagcctctggatgctgagtggagggagccactgagcacagcaaggcaccaaagcccctggagaaaccgccagggcgaggtgcgaccatcatcaggatcaaagcagacggggcgtgggtggggaaggggctctgggaccagaccccccacactactgcgtctttgtttctatcagtctttgtagaagcaggtggtggtggaaattccagcaggtgggtcccgcagaggccctgaggcctcacttttcggatcttctgtcccagatcctgctccctccctgctgagcctggggttcccctggcattggccccagccttctgaaagccggcgctgcagccagaggccgcacgctgcactgtcgcgacgcagagaggcttctgtgcaggctgggatcgggccccatgtctgtgctgtctagtttgtgttcaaaatgtcagaataaacacagaataaatgtt

SEQ ID NO: 1438 - DNA, 2983 bp, Homo sapiens
  source 1..2983: mol_type = genomic DNA
agtatggccgggctatggcggcgagcactggctacgtgcgactgtggggagcggcgcggtgctgggtgctgcggcggccgatgctggccgccgccggggggcgggttcccactgcagcaggagcgtggttgctccgaggccagcggacctgcgacgcctctcctccttgggcactgtggggccgaggcccggcaattgggggcagcgcgggcgccggggaaggcccggtcataacggcgctcacgcccatgacgatccccgatgtgtttccgcacctgccgctcatcgccatcacccgcaacccggtgttcccgcgctttatcaagattatcgaggttaaaaataagaagttggttgagctgctgagaaggaaagttcgtctcgcccagccttatgtcggcgtctttctaaagagagatgacagcaatgagtcggatgtggtcgagagcctggatgaaatctaccacacggggacgtttgcccagatccatgagatgcaggaccttggggacaagctgcgcatgatcgtcatgggacacagaagagtccatatcagcagacagctggaggtggagcccgaggagccggaggcggagaacaagcacaagccccgcaggaagtcaaagcggggcaagaaggaggcggaggacgagctgagcgccaggcacccggcggagctggcgatggagcccacccctgagctcccggctgaggtgctcatggtggaggtagagaacgttgtccacgaggacttccaggtcacggaggaggtgaaagccctgactgcagagatcgtgaagaccatccgggacatcattgccttgaaccctctctacagggagtcagtgctgcagatgatgcaggctggccagcgggtggtggacaaccccatctacctgagcgacatgggcgccgcgctcaccggggccgagtcccatgagctgcaggacgtcctggaagagaccaatattcctaagcggctgtacaaggccctctccctgctgaagaaggaatttgaactgagcaagctgcagcagcgcctggggcgggaggtggaggagaagatcaagcagacccaccgtaagtacctgctgcaggagcagctaaagatcatcaagaaggagctgggcctggagaaggacgacaaggatgccatcgaggagaagttccgggagcgcctgaaggagctcgtggtccccaagcacgtcatggatgttgtggacgaggagctgagcaagctgggcctgctggacaaccactcctcggagttcaatgtcacccgcaactacctagactggctcacgtccatcccttggggcaagtacagcaacgagaacctggacctggcgcgggcacaggcagtgctggaggaagaccactacggcatggaggacgtcaagaaacgcatcctggagttcattgccgttagccagctccgcggctccacccagggcaagatcctctgcttctatggcccccctggcgtgggtaagaccagcattgctcgctccatcgcccgcgccctgaaccgagagtacttccgcttcagcgtcgggggcatgactgacgtggctgagatcaagggccacaggcggacctacgtgggcgccatgcccgggaagatcatccagtgtttgaagaagaccaagacggagaaccccctgatcctcatcgacgaggtggacaagatcggccgaggctaccagggggacccgtcgtcggcactgctggagctgctggacccagagcagaatgccaacttcctggaccactacctggacgtgcccgtggacttgtccaaggtgctgttcatctgcacggccaacgtcacggacaccatccccgagccgctgcgagaccgtatggagatgatcaacgtgtcgggctacgtggcccaggagaagctggccattgcggagcgctacctggtgccccaggctcgcgccctgtgtggcttggatgagagcaaggccaagctgtcatcggacgtgctgacgctgctcatcaagcagtactgccgcgagagcggtgtccgcaacctgcagaagcaagtggagaaggtgttacggaaatcggcctacaagattgtcagcggcgaggccgagtccgtggaggtgacgcccgagaacctgcaggacttcgtggggaagcccgtgttcaccgtggagcgcatgtatgacgtgacaccgcccggcgtggtcatggggctggcctggaccgcaatgggaggctccacgctgtttgtggagacatccctgagacggccacaggacaaggatgccaagggtgacaaggatggcagcctggaggtgacaggccagctgggggaggtgatgaaggagagcgcccgcatagcctacaccttcgccagagccttcctcatgcagcacgcccccgccaatgactacctggtgacctcacacatccacctgcatgtgcccgagggcgccacccccaaggacggcccaagcgcaggctgcaccatcgtcacggccctgctgtccctggccatgggcaggcctgtccggcagaatctggccatgactggcgaagtctccctcacgggcaagatcctgcctgttggtggcatcaaggagaagaccattgcggccaagcgcgcaggggtgacgtgcatcgtcctgccagccgagaacaagaaggacttctacgacctggcagccttcatcaccgagggcctggaggtgcacttcgtggaacactaccgggagatcttcgacatcgccttcccggacgagcaggcagaggcgctggccgtggaacggtgacggccaccccgggactgcaggcggcggatgtcaggccctgtctgggccagaactgagcgctgtggggagcgcgcccggacctggcagtggagccaccgagcgagcagctcggtccagtgacccagatcccagggacctcagtcggcttaatcagagtgtggcatagaagctatttaatgattaaagtcatttgcagt

SEQ ID NO: 1439 - DNA, 1044 bp, Homo sapiens
  source 1..1044: mol_type = genomic DNA
aagctgggcagcctctgccgggttccgggaaaaggagctcctgctgccactgctcttccggagcctgcagcatggggcccctgccgcgcaccgtggagctcttctatgacgtgctgtccccctactcctggctgggcttcgagatcctgtgccggtatcagaatatctggaacatcaacctgcagttgcggcccagcctcataacagggatcatgaaagacagtggaaacaagcctccaggtctgcttccccgcaaaggactatacatggcaaatgacttaaagctcctgagacaccatctccagattcccatccacttccccaaggatttcttgtctgtgatgcttgaaaaaggaagtttgtctgccatgcgtttcctcaccgccgtgaacttggagcatccagagatgctggagaaagcgtcccgggagctgtggatgcgcgtctggtcaaggaatgaagacatcaccgagccgcagagcatcctggcggctgcagagaaggctggtatgtctgcagaacaagcccagggacttctggaaaagatcgcaacgccaaaggtgaagaaccagctcaaggagaccactgaggcagcctgcagatacggagcctttgggctgcccatcaccgtggcccatgtggatggccaaacccacatgttatttggctctgaccggatggagctgctggcgcacctgctgggagagaagtggatgggccctatacctccagccgtgaatgccagactttaagattgcccggaggaagcaaactcttcgtataaaaaaagcaggccatctgcttaacccttggctccaccataaggcactgggactcggatttctctatctgatagaggtattttctgtggccctgggagctgtctgtctttcccctacccccaaggatgccaggaagacgtccaccattagccatgtggcaacctttacttctatgcctcacaagtgcctttcagagagccccaattctgctttcccacaaaataaacctaatgccatcaggcaaaacatttctgtgtctgta

SEQ ID NO: 1440 - DNA, 4753 bp, Homo sapiens
  source 1..4753: mol_type = genomic DNA
cagactgctgcctccatcagtgcctgtggcgtgtgtgtgtgtgtgtgtgtgtgcgcgcgcgtgcgtgcacgtgtgtatgtgtgtgtgtgtgtattgggtttctctctcccttgtaagaacacagccagcccgccctctcctgctgttgctgcagctctgacttgctttttcctgcctccttcctctcctctctcttcttgcttagcttcttgccttctgatactactcccaagatggaggctaatcactctgaacagctctcagcggaacgacagtcaacacctccaggtgacagttcatcattacccagtcacaatggcctggagaaggaagatggccaggattctccaaccccagtccaaccaccagagaaagaggcaagtgtgcaccccgatatctctgaagagctgaatcgacagctggaagacatcattaacacttatgggtctgctgccagcacagcagggaaagagggctctgccagggccagtgagcagcctgagaatgcagaatcacctgacaacgaggatggggactgtgaggaaacaactgaagaggctggaagagaacccgttgcttctggagagccacccactgtcaaagagcccgtcagcaataaggagcaaaaattggaaaagaaaatcctaaaaggattaggcaaagaagccaacctgctaatgcaaaatctgaacaagttgcaaacaccggaagaaaagtttgattttttattcaagaagtatgctgaattgctggatgaacatcgtactgagcaaaagaagttaaagctcctccaaaagaaacaggtacaaattcaaaaagaaaaggaccagttacaaggtgaacacagcagagctatcctcgctcgaagcaaattggagagtctgtgccgggagctgcagagacacaacaagactctgaaggaagaggcgcttcagcgggcacgtgaggaagaagagaaaaggaaggaaatcacaagccatttccagagtaccctcacggacatccagggccagatcgagcagcagagtgagcgaaatatgaagctctgtcaggagaacacagagcttgcagaaaagctgaaaagcatcatcgatcagtatgagctcagagaggagcatctggacaaaatatttaaacacagagaactgcagcagaagctggtggatgcaaagcttgagcaggcccaagaaatgatgaaggaagcggaggagcgacacaaacgagaaaaggaatatttgctgaaccaggcagcagagtggaaacttcaggcgaaagtgctgaaggagcaagagacagtcctgcaggctcagctcactctctactcaggaaggtttgaagaattccagagcacactaactaaaagcaacgaggtgtttgccacgttcaaacaggaaatggacaaaacaactaagaaaatgaagaagctggaaaaggacacagccacatggaaagcccgatttgagaactgtaacaaagctctgttggacatgattgaagagaaagcactgagagctaaagaatatgagtgctttgtgatgaaaatcgggaggctagagaacctctgccgtgctttacaagaagagagaaacgaactccacaaaaaaatcagagacgcagaaatatctgaaaaggatgaccaaagtcagcacaactccgatgaagagccagagtcaaacgtctctgtggatcaagagattgacgcagaggaggttaatagtgtccaaaccgccgtgaaaaatctggccacagccttcatgataattcatcatccagagtcaaccccgcaccagtccaaagaaacccaacccgaaataggcagttctcaggagagtgctgacgccgctctcaaggagccagagcaaccccctctgatcccttcacgggattcagagagtcccctgcctcccctaactcctcaggctgaagccgaaggaggcagtgatgctgaacctccctccaaggccagtaattctcctgccgggttgggagcagaaacccaatgcgagggtctccctgttggagcacaggctgatcaggcgtcctggaagccagaggcagaagcttccggtcaggccccacaggctcccaccgaggcctccctacagaagatggaggcagatgtgcctgctccagcatgcgcagcagaagagcacgttgcagccatggtgcctgcatgcgagcccagtaggcagcccccacgagcagcagcagaggagctgccagtaggggcctcagctgggccccagccgcgcaacgtggctgacaccaatctggaaggcgtcgactaagcctcaccgtgccttcagaggcttcttcctgcctctttgcatattcagcataacagcttgtcttccgaaaaaggcattaagggctagagatgtcaaatggaagagacttaggatcaagacattttttaatgttaggcagaacacattcattcagactttgctatttgttgtcaatttatagctgatttgaaggttttctatttaacactggttgacagtataattttcccaaagggcaacaaaacatacagatagcaaatttatattccttttctgttaagataatacttaaatttgttaatcaccagtaagatttgatgtttaaagacttccactgcaatatataaatactgaaaatgtgatgttctgcttatttggatatatagtttaacaagttccatagtaatttatggatgcccaggttacatttaaactatacatatacataatatatacatacgtgtgtacttattatatgtatatatacacgtatgtatagatgtgtgaatatttgtttatatacatatatgcacgtatctatatgtatatataaatgcattattacacatacatttctctcaccccttaatgcatttttctcaatgcagaatatttagatgctaatcaaaaaaatgatctcttacttgcacttgagactatggttgactaatgctctataaatccgaagagagttcggactataagtatttaggctatcattatgttgggcaaaaataagtaacccaatggtagataaatgaattcaaccagttgatcaaatggcagaaaagcagttagactacaatctgtgcagacagcatggacacaaagatgaccacaaggggcccaaaacagaaaagagaaacacaagctcacctcttggagctgcttctcctacacttctcagcccattgctttgccaccccctcatgtgccagggcatcccattccaggcttcctgcaaggaaacggttggaagtgggaaaggggagctagggattgaggggttaagggacctcacactaagaaggggctgtgctttgatcccctgcctcttgcactaccaatgtctcaagacataatattcatctcttgctgtcagacccattctatattctaaaagcttctgctccttccttcccaatttctcctttgtagcaggaaattacacccagccctcatctcaattaatgctaaataaagctattgtttttccaaaacacaaatctacactgggtctcaatatcagtgatgaggcttacaaaccaacacgttttctgccatgaggatttctctttaggccagaagtacaaaacaaaaaaaccaatggattttaaccaaaatgatttgaaatataggtgaggattcaggagaaggcaaaagctagaaacacttggggttgtcaacatgagtattacattaacattgcttgatgagaacctctaatgatactgacaacataaattacctagggtaaaggatagctgcaacaatgaaacaggaaagaagagagggagagagaggaaagggaaggaagaaaggaaggagggagaagggaagaaagaaacaatgtctaacccaaccctatcttgaaagttgaactcaagtagaaaaatggatagaaacaaaattctctagtactcatccaggaaaccattcttcaatgttgcatgtggctgtttgccaaggcacacaaagtgcttgtaggcagcaaccatatgctacaagaattgtaaactgcatacagtttgtttgaagtagacagtgaggataataacaaagttgctaggcaggaaaaaaaatcaggaaaaaagcttgtcgctatttgagaatctgtatatttttaaaggcttaaaatattataaccacagggtatccagccaaattcaacattactgcaagtcttagagatttaaacattcatttgattcagagctaaatattcaccataatccaggagggtctccttccccactgcagaggcagaacgtccaagaatggagtaagattagtcatagtaaagtctcagtctgaatatttagcaagagaaacaggcagcagaggaacccaaaggcagtaaatcaaatattctaaaacccaaagttcattattttcatccaaaagactttcacagaaacacattactcacagccatgtatatcttggacagagtttcagatggaatgacttgtctgaaatttgtaaagcttaatataggttttgggggaattattttaatattcaaagaatgttttattatagtcctttgtgttaaaatttagccttactaattataacaataactcataaagttctaaattcagaaggaatgtctgttctttatcaagtgtatgtaactattttttagaaatgccatctactttctagaaacactaaagttattgttttctaagttaaataactataatttatatatctattaaaaaggtacttctcttcccaaa

SEQ ID NO: 1441 - DNA, 2108 bp, Homo sapiens
  source 1..2108: mol_type = genomic DNA
atgaacggcaccctggaccacccagaccaaccagatcttgatgctatcaagatgtttgtgggccaggttccaaggacctggtctgaaaaggacttgcgggaactcttcgaacagtatggtgctgtgtatgaaatcaacgtcctaagggataggagccaaaacccgcctcagagcaaagggtgctgttttgttacattttacacccgtaaagctgcattagaagctcagaatgctcttcacaacatgaaagtcctcccagggatgcatcaccctatacagatgaaacctgctgacagtgagaagaacaatgcagtggaagacaggaagctgtttattggtatgatttccaagaagtgcactgaaaatgacatccgagtcatgttctcttcgtttggacagattgaagaatgccggatattgcggggacctgatggcctgagccgaggttgtgcatttgtgacttttacaacaagagccatggcacagacggctatcaaggcaatgcaccaagcacagaccatggagggttgctcatcacccatggtggtaaaatttgctgatacacagaaggacaaagaacagaagagaatggcccagcagctccagcagcagatgcagcaaatcagcgcagcatctgtgtggggaaaccttgctggtctaaatactcttggaccccagtatttagcactttatttgcagctccttcagcagactgcctcctctgggaacctcaacaccctgagcagcctccacccaatgggagggttgaatgcaatgcagttacagaatttggctgcactagctgctgcagctagtgcagctcagaacacaccaagtggtaccaatgctctcactacatccagcagtcccctcagcgtgctcactagttcagggtcctcacctagctctagcagcagtaattctgtcaaccccatagcctcacttggagccctgcagacattagctggagcaacggctggcctcaatgttggctctttggcaggaatggctgctttaaatggtggcctgggcagcagtggcctttccaatggcaccgggagcaccatggaggccctcactcaggcctactcgggtatccagcaatatgctgctgctgcgctccccactctgtacaaccagaatcttctgacacagcagagtattggtgctgctggaagccagaaggaaggtccagagggagccaacctgttcatctaccacctgccccaggagtttggtgatcaggacctgctgcagatgtttatgccctttgggaatgtcgtgtctgccaaggttttcatagacaagcagacaaacctgagcaagtgttttggttttgtaagttacgacaatcctgtttcggcccaagctgccatccagtccatgaacggctttcagattggcatgaagcggcttaaagtgcagctcaaacgttcgaagaatgacagcaagccctactgagcgtgctcccctctgagactggagtgagagggtcttctgattcctgccgtttgttcatcgttgtgcctaaagcatgtcgatgtggcgtcaagtacatcgtccaaatccctgtctcttcagcttctctgatgcttgaactctcacctttgaccttgtgttgacctttgatgctgatgtgtatttttattatgtttgtttctttcttcgtttttttttctttttttctttcctttttttttccttttgtgctgccaaattggttttgctagaacgactgctgaaggggaaatatttaaacttgcatttgaatataaaaaaaatctatttttctagaacttcataagataaccacttgattttgtgattccaattctttgtaattgtcttcagagcagccctactagcacataccgcgtggtgtttgtatttctgtgaacacacagccagtccgtttctaggctttgtttctctgtgtgcttagttttaaagacaactttgaagtaaacaatgaaataaaagatgtcactaaaacctctgaggctcctgagcacattttgctgatacagtctgtggggcttgaggagaccgcatgtattgttctttcttttgtttttcttctgagttctcaactgcggagagcacctgaa

SEQ ID NO: 1442 - DNA, 10784 bp, Homo sapiens
  source 1..10784: mol_type = genomic DNA
gaggcggtggcggcggaggcggcaccgattgctgtgtcggccccagtgcggccgaagtcgcggtagagcgtagccccacgcccctcccccgtccgcgccctccctctttccctggggatggagaaggcgacggttccggtggcggcggcgacggctgcagaaggagaagggagccccccggcggtggcggctgtggcgggcccccccgcggcggcggaggtcggcggcggcgttggcggcagcagcagagctcgctcggcctcgtctcctcgtgggatggtgcgagtctgcgacctgctcctgaagaagaagccgccgcagcagcagcaccacaaggccaagcgtaaccggacttgccgaccccccagcagcagcgaaagcagcagcgacagcgacaacagcggcggcggtggaggcggcggtggaggcggaggtggcggcggcggcaccagcagtaacaacagcgaggaagaagaggacgacgacgacgaggaagaggaggtttctgaggtggagtctttcattttggatcaggatgatttggaaaatccaatgctggaaacagcttccaagttgctcttatcaggtactgctgatggtgcagacctcaggacagtagatccagaaacacaggctagactggaagctttactagaagctgcaggaataggaaaattgtccacggctgatggtaaagcctttgcagatcctgaagtacttcggaggttgacatcgtctgttagttgtgcgttggatgaagctgctgctgcacttacccgtatgagagctgaaagcacagcaaatgcagggcagtcggacaaccgcagtttggcagaagcctgttcagaaggagatgtaaatgctgtgcgaaagttactcattgaagggcgaagtgtaaatgaacacacagaggaaggggagagcctcctttgtttagcttgttctgctggatactatgagcttgcacaggttttgttggcaatgcatgcaaatgtggaagataggggaatcaaaggtgacattacacctttaatggctgctgctaatggaggacatgtcaaaattgtgaagttgctgctagctcataaagcagatgttaatgcacagtcttcaacaggcaatacagcacttacatatgcttgtgctggaggctatgtagatgttgtaaaggtgctcttggaatccggtgctagtattgaggaccataatgaaaatggtcatacccctcttatggaagctggaagtgctggacatgtggaagtagccagattgctgctagaaaatggggctggcattaatacgcattctaatgaatttaaagagagtgcccttaccttagcttgttacaaaggacacttagagatggtgcgatttcttttggaagcaggcgcggatcaagagcataaaacagatgaaatgcacactgctctgatggaggcttgcatggatggccatgttgaagtagctaggttacttcttgacagcggtgcccaagtgaacatgcctgctgattcatttgagtcaccattaactttggctgcatgtggtgggcatgtggaacttgcggctttacttattgaaagaggagctagcctggaagaggtcaatgatgaaggttatacaccattgatggaagcagctcgagaaggacatgaagaaatggtggcattacttcttggtcaaggagcaaatatcaatgcacagacagaagaaactcaagaaactgccttgactctggcttgctgtggaggctttctggaagtggcagactttctaattaaggcaggagccgatatagaactagggtgttctacccctttaatggaagctgctcaagagggtcatttggagttagttaaatacttattagctgcaggagctaacgttcatgcaacaacagcaacaggggatacagcactaacatatgcctgtgaaaatggtcatactgatgtagcagatgtcttacttcaggcaggcgcagatctggaacatgaatctgaaggtggaagaactcctttaatgaaagctgcaagagctggtcatgtttgtactgttcagttcttaattagtaaaggagcgaatgtgaatagaaccacagctaataatgaccatactgtactgtccctggcttgtgcagggggtcatctggcagtggtggaactacttttggctcatggggcagatcctactcaccgtttgaaagatggctcaactatgttgatagaagcagcaaaaggtggccatacaagtgttgtttgctatctcttggattatcctaataacttgctttcagcccctccaccagatgtcactcagttaactcccccatcccacgatttaaatagggctcctcgtgtaccagttcaagcactgcccatggttgttccacctcaggagcctgacaaaccacctgccaatgttgccaccactcttcccatcaggaataaagctgcttctaaacaaaagtccagcagccatttgccagcaaacagccaggatgtacagggttacatcaccaatcagtctccagagagcattgtagaagaggctcagggaaagttaacagaactggaacagaggataaaagaagccatagaaaagaatgcacagctgcagtccttggaactggctcatgctgaccaacttaccaaggagaagatcgaggagctcaacaaaacaagggaggaacaaattcagaagaaacaaaagattttggaggaactacagaaagtagaacgagagttacaactgaaaactcagcagcagctaaaaaagcagtatctagaggttaaagctcaaagaattcaacttcagcaacagcagcaacagtcttgccaacacctgggattactaactcctgttggagttggagagcagctttctgagggagactatgcacggttacagcaagtggatcctgttttacttaaagatgaaccccagcagactgctgctcagatgggttttgcgccaatccagcctctggcgatgcctcaagctttgcctctggcggcaggtcccttgcctccagggtccatcgcaaatcttacagaactgcaaggagtgatagttggacagccagtactgggccaagcacagttggcagggctggggcaaggaattctgacagaaacacaacaagggttaatggtagccagccctgctcagaccctcaatgacacgctggatgacatcatggcagcagtcagtggaagagcatctgcaatgtcaaacactcctacccacagtattgctgcatccatttcccaacctcagactccaactccaagtcctatcatctctccttcagccatgcttcctatctaccctgccattgatattgatgcacagactgagagtaatcatgacacggcactaacacttgcctgtgctggtggccacgaggaactggtacaaacactgctagagagaggagctagtatagagcaccgagacaagaaaggttttactccactcatcttggctgccacagctggtcatgttggtgttgtggaaatattgctggacaatggtgcagacattgaagcccagtctgaaagaaccaaggacacaccactctccttggcttgttctgggggaagacaggaggtggtggagctattgttagctcgaggggcaaataaagagcacaggaatgtttctgattacacacctctaagtctggctgcttctggtggctatgtgaacatcatcaaaatattactaaatgcaggagctgagattaactctagaactggtagcaaattgggcatctctcctctgatgttagcagctatgaatgggcatacagctgctgttaagctcctgttagacatgggctctgacataaatgctcagatagaaaccaatcggaacactgcccttactttagcctgcttccaaggaagaactgaagtggttagtcttctgcttgatagaaaagcaaatgttgaacacagagctaagactggtctcacaccactaatggaagctgcctctggtggatatgcggaggtgggccgagttcttttggataaaggtgctgatgttaatgcccctccagttccctcctcaagagatacagctttaaccatagcagcagataaagggcattacaaattctgtgagcttcttattggcaggggagctcatattgatgtacgtaacaagaaggggaacactccattgtggctagcagcaaatggtggacacctcgatgtggttcagttactggtgcaagcaggtgcagatgtggatgcagcagataaccgcaagataactcctcttatggcagcatttagaaagggtcatgtgaaggtggtgcgctacttagtcaaagaagtcaatcagtttccatcagattctgaatgtatgagatacatagcaaccatcactgataaggagatgctgaagaagtgtcatctttgtatggagtcaatagtacaagccaaagatagacaggctgctgaagcaaacaaaaacgccagcattttgttagaggagttagacttggaaaagttaagggaagaaagtcggaggctggctttggctgcgaaaagagaaaaaagaaaagagaagagaaggaagaaaaaggaagaacaaagaaggaaactagaagaaattgaagccaaaaataaagagaactttgaactccaagctgctcaagaaaaagaaaagcttaaagttgaagatgagcctgaagtcttgacagaacctccaagtgccacaaccactactaccataggtatatctgcaacctggacaactttggcaggttctcatggtaaaagaaataataccataactacaaccagttcaaagaggaaaaacaggaaaaataaaattactccagaaaacgttcaaattatatttgatgatccactaccaatttcatacagtcagccagagaaggtgaatggagagtccaagagcagcagtaccagcgagagtggggacagtgataacatgaggatttccagctgcagcgatgaaagtagtaacagcaacagcagtcgtaagagtgacaatcattcaccagctgtggtcactaccactgtgagcagcaaaaagcagccatcagttcttgttacatttccaaaggaagagagaaaatctgtttctggcaaggcttcaataaaattgtcagaaactatcagtgaagggaccagtaattctctatctacttgtacaaaatctggtccatctcccctttcttctccaaatgggaagttaacagtagcaagtcctaagcgtgggcaaaagagggaagaaggatggaaagaagttgtaagaaggtcaaagaaagtatctgttccatcaactgtgatatccagagtgattggaagaggaggctgtaatatcaatgctattcgggagtttactggtgcacacatagatattgataaacagaaagacaagactggagaccggataatcactataaggggtggcactgaatcaacaagacaagcaactcaattgattaatgctttgatcaaggatccagacaaagaaattgatgaacttattccaaagaatcgtttgaaaagctcctcagcaaattccaaaatagggtcatcagcacctaccaccactgctgctaacacttccttaatgggaattaaaatgacaactgtagctctgtcatcaacatctcaaactgccacagcactcactgtgcctgcaatttcttctgcatccactcacaaaaccattaagaacccagtgaataatgtgaggcctggttttccagtttctcttccattagcatatcctcctccacagtttgcacatgctttgcttgctgctcagactttccagcagatccgtccaccaaggttgcccatgacccactttggaggtacttttccaccagctcaatccacttggggtccgtttcctgtcaggcctttgagccctgccagagctactaactcgcctaagcctcacatggtgcctcgccatagcaatcagaatagcagtggttctcaggtgaattcagcaggttctttaacttcaagcccaacaactacaaccagttcatcagcttcaacggtgcctggtacatctacaaatggcagtccaagttcaccttctgtccgaaggcagctttttgtcacagttgtgaagacatccaatgccaccacaacaacagtcacaaccacggcaagcaacaacaacactgcacccacaaatgccacatatcctatgcctactgccaaagaacactatccagtatcatccccatcttccccatcaccaccagcccagccaggaggggtttctagaaacagccctttggattgtggatcagcatctccaaataaagtggcatcttcctccgaacaggaagcaggtagtccaccagtagtagaaacaacaaacactagacctccaaacagcagcagttcttctgggagttcatcagctcattctaatcagcaacaacctccgggatctgtttctcaggaaccaagaccacctcttcagcagtctcaggttcctcccccggaagttagaatgactgttcctcctttagcaacaagttctgctccagtggcggtgccttctactgccccagtgacttaccctatgcctcagacaccaatgggatgcccccagcctactcctaaaatggaaacccctgctattagaccaccccctcatggcacaactgcccctcacaagaattcagcttcagtgcaaaattcatctgttgcagtcctcagtgtcaatcacattaaaagacctcacagtgttccctcttctgtccagctaccttcgaccttaagtacacaaagtgcttgtcagaattcagtacatccagcaaataagcctattgctcccaatttcagtgcccccttaccatttgggccctttagcacattgtttgaaaacagccctacttctgctcatgccttctggggaggatctgttgtttcatctcagtcaacaccagaatctatgctatcaggaaaatcctcatatttgccaaattcagatcctttacatcagtctgatacttccaaagctccaggttttagaccaccattacagagacctgctccaagtccctcaggtattgtcaatatggactcgccatatggttctgtaacaccttcttcaacacatttgggaaactttgcttcaaacatttcaggaggtcagatgtacggacctggggcaccccttggaggagcacccgcagctgctaactttaacagacaacatttttccccgcttagtttgttgactccgtgttcatcagcatcaaatgattcttctgcacagtcagtatcctcgggagttcgtgcaccatctcctgccccatcatcagtaccgttagggtcagaaaagcccagcaatgtgtctcaggacaggaaagttccagtccctattgggactgaacgttctgcacgtatcaggcaaactggaacgtcagctccatctgttattgggagcaatttgtctacatcagtaggacatagtggcatctggtcctttgaagggattggtggcaatcaagacaaagtagactggtgtaaccctgggatgggaaatcctatgatccacagaccgatgtctgacccaggagtattttcacaacatcaagcaatggagcgagatagtacaggaattgtaactccttctggtacattccatcagcatgttcctgcaggctacatggactttcctaaagttgggggtatgcctttttctgtgtatgggaatgcaatgattcctccagtagcacctatccctgatggtgctggaggacccatatttaatggccctcatgctgcagacccttcttggaactcactgataaagatggtttccagctccacggaaaataatggccctcaaacggtgtggactggaccctgggcacctcacatgaacagtgtgcatatgaaccagcttggctgatgaggatcagcttgttagcctgcagattccttttcatttggaggaaatcacaagtggccgaaaaaaaaaattatgctcccaaatcattctactgatgtgcttgactgaagtgtgtaggctttttgcagaagatcttactaactgacctattttctgtgaacatttgtgactgcccattccccatcatcatccgttttaccttagttagcatttttcttatcatttttctttttttctttccctcttcccctttggacataactttctgttgaagctgttctttggctggttggttttagtactgtaaactgcttctgagcaaacacggaaatttagcaaaattatgtaaacttgatcctgaagttttagaatggcaaataaatgtacaattgtttacataacagaaaaggctaagcagaaagtaaatttcaatatgtcagtatagaggctctactttatgtagacttaaattaatgtgagatatgtaccttcatattcagaaatctggatgtttccttcatacattaaactattaataagcataacttttctactggtgtaatttaagtataaagtaaaataatgggcattatcattggatgtttccccacattggcttttaaaatacccatcttgctttctttttggtttatttgtagcaaggcacatatagaagaagaaatttctggcttttccatgttgttttattaccttttctcacttttaaaactaatacagacttatctcctcactcctttttctctccttacctttaccactaataccagtaaaattatctttctgatagtgaaaaggttctgtcaagattttcactgtaatggctgctacagagatggaccatcttcatcatcaccagtggtttcttctaattataaaatgtttaaactttctgagaatttaaaaagccaccactgttcccagtcagcatatacaagctcttaatattctgtttattaaataattcaatgtactattttatattggatgatattgattcttaacattggcttttcagtcatcaacagtcaacataaaaatttcaattttcagtaatttagtggaaaatatcttatttcttttttcaattttaaaggcttcctgcttttttacccttgtatattatcagtgaaaaggatcaacagttaatttgagccaagtaataaaagaaattctgcatttgtcacgaagacaatttatggtagacagataaatacacagattacagtgtaaagtctccatttaacctgtttataaaagatacaaggccacactaaactactcagtgggatttatatattccatccacttgaaacaataaacagtaatgtatccaagaagattatgtgtcctaccctgtctcatggaaaaattaattatatggttgaaatgtaaaagaaagtaagcataaaaatcgagtaatgtatatatcaatttgtcttctttttttttaattagacataaaatttcacactggtaaaacataaaaactaactaaaattcatataaatcacctagagttgatgatattaacatggttccttggttgtcaagtaaatcaaatgatttcttccatctgagtaaagagtaaagcctgagtaaagagtaaaaagatgacttctcaaacatatccagaaatttgtaaacagtacactcatatcttttagtttaagaagtggtcttaaaatatataaatttgtttttccacctatgtttaatatgcccaaatttaaagggagagctaaaagacagcctacaaataaatatagctatgaaataaaattatagcactttactaaaaaagggatgtaataatgttatttaacgaagtattttatatatgacttgccactattctatacataaaattttttttcttaattctttcctgtgttaactagggttattttctatttaaggtaatcctgctggagaacagatgctatccaatatttattacaacacatgagttgtgttgtttcacaatactgaatttcttaggtgaggtattttatttaaaaaggagggggaaaactcctatattttcttgacttcaaacctgtggggccaggggatatagattgaaatgctccgtatttagtcttggggatcaggcttgtttagtacaataccatggttttagaagtctgtactaggaacatttttaaaatacattttttatatttcagatgtaatgcagtgcacttttatttgaacaataaaaaaacccataactttttgagaccatgaaggtcttttattttttaattttgaaaatatgtggtatgtgtatatgcagactacatcattgttttaagaaatgatttaactcttggacattacacttgggttagttcacaccttaaatccccaagtagttaatatctcaattattgtataatcagtttataccatccattcccaacaaaattccacatttcatgccttttcaacatacatttcaacataatcaacatatttacaaacactgacttcactgtttataaagaagaaatttcccctcctatttcccattactgaaaagtcaagtcatttttattgatacatgaaaattaatttttttgtaaatgactacgtatagtcatttttctcctttggaaaaggtaaatagcttattaactaatcctgtcttgttcttcacaaaaataatagtccatccgtgttttgactcaaataacctaaatacacattttgtaaaaattttgtaccctatattacttatttttaaaacagtacagtgttagactaaacaggaaaactcaaagttataaaatctcttcagatcctctagtttattaaatctattttcatgttga

SEQ ID NO: 1443 - DNA, 6407 bp, Homo sapiens
  source 1..6407: mol_type = genomic DNA
atgacggagggccgccgatgtcaagtacatcttcttgatgacaggaagctggaactcctagtacagcccaagctgttggccaaggagcttcttgaccttgtggcttctcacttcaatctgaaggaaaaggagtactttggaatagcattcacagatgaaacgggacacttaaactggcttcagctagatcgaagagtattggaacatgacttccctaaaaagtcaggacccgtggttttatacttttgtgtcaggttctatatagaaagcatttcatacctgaaggataatgctaccattgagcttttctttctgaacgcgaagtcctgcatctacaaggagcttattgacgttgacagcgaagtggtgtttgaattagcttcctatattttacaggaggcaaagggagatttttctagcaatgaagttgtgaggagtgacttgaagaagctgccagcccttcccacccaagccctgaaggagcacccttccctggcctactgtgaagacagagtcattgagcactacaagaaactgaacggtcagacaagaggtcaagcaatcgtaaactacatgagcatcgtggagtctctcccaacctacggggttcactattatgcagtgaaggacaagcagggcataccatggtggctgggcctgagctacaaagggatcttccagtatgactaccatgataaagtgaagccaagaaagatattccaatggagacagttggaaaacctgtacttcagagaaaagaagttttccgtggaagttcatgacccacgcagggcttcagtgacaaggaggacgtttgggcacagcggcattgcagtgcacacgtggtatgcatgtccggcattgatcaagtccatctgggctatggccataagccaacaccagttctatctggacagaaagcagagtaagtccaaaatccatgcagcacgcagcctgagtgagatcgccatcgacctgaccgagacggggacgctgaagacctcgaagctggccaacatgggtagcaaggggaagatcatcagcggcagcagcggcagcctgctgtcttcaggttctcaggaatcagatagctcgcagtcggccaagaaggacatgctggctgccttgaagtccaggcaggaagctctggaggaaaccctgcgtcagaggctggaggaactgaagaagctgtgtctccgagaagctgagctcacgggcaagctgccagtagaatatcccctggatccaggggaggaaccacccattgttcggagaagaataggaacagccttcaaactggatgaacagaaaatcctgcccaaaggagaggaagctgagctggaacgcctggaacgagagtttgccattcagtcccagattacggaggccgcccgccgcctagccagtgaccccaacgtcagcaaaaaactgaagaaacaaaggaaaacctcgtatctgaatgcactgaagaaactgcaggagattgaaaatgcaatcaatgagaaccgcatcaagtctgggaagaaacccacccagagggcttcgctgatcatagacgatggaaacattgccagtgaagacagctccctctcagatgcccttgttcttgaggatgaagactctcaggttaccagcacaatatcccccctacattctcctcacaagggactccctcctcggccaccgtcgcacaacaggcctcctcctccccagtccctggagggactccgacagatgcactatcaccgcaacgactatgacaagtcacccatcaagcccaaaatgtggagtgagtcctctttagatgaaccctatgagaaggtcaagaagcgctcctctcacagccattccagcagccacaagcgcttccccagcacaggaagctgtgcggaagccggcggaggaagcaactccttgcagaacagccccatccgcggcctcccgcactggaactcccagtccagcatgccgtccacgccagacctgcgggtccggagtccccactacgtccattccacgaggtcggtggacatcagccccacccgactgcacagcctcgcactgcactttaggcaccggagctccagcctggagtcccagggcaagctcctgggctcggaaaacgacaccgggagccccgacttctacaccccgcggactcgtagcagcaacggctcagaccccatggacgactgctcgtcgtgcaccagccactcgagctcggagcactactacccggcgcagatgaacgccaactactccacgctggccgaggactcgccgtccaaggcgcgccagaggcagaggcagcggcagcgggcggcgggcgcactgggctcagccagctcgggcagcatgcccaacctggcggcgcgcgggggtgcggggggcgcggggggcgcggggggcggtgtgtacctgcacagccagagccagcccagctcgcagtaccgcatcaaggagtacccgctgtacatcgagggcggcgccacgcccgtggtggtgcgcagcctggagagcgaccaggagggccactacagcgtcaaggctcagttcaagacgtccaactcctacacggcgggcggcctgttcaaggagagctggcgcggcggcggcggcgacgagggcgacacgggccgcctgacgccgtcgcgatcgcagatcctgcggactccgtcgctgggccgcgagggcgcccacgacaagggcgcgggccgtgccgccgtctcagacgagctgcgccagtggtaccagcgttccaccgcctcgcacaaggagcacagccgcctgtcgcacaccagctccacctcctcggacagcggctcgcagtacagcacctcctcccagagcaccttcgtggcgcacagcagggtcaccaggatgccccagatgtgcaaggccacgtcagctgccttacctcaaagccagagaagctcgacaccgtcaagtgaaattggagccacccccccaagcagcccccaccacatcctaacctggcagactggagaagcaacagaaaactcacccattctggatgggtctgagtctccacctcaccaaagtactgatgaatagaggagctacaatgatagctgtttcctggattcctccctctatccagaactagctgatgtccagtggtacgggcaggaaaaagccaagcccgggaccctcgtgtgagccagcccggcctaatctgaccgcctcaacgccattctgagatcacctcactgcctctcatttgccttacccagacgcaccgtcaccctgcaccagctttggccctcagcactttttttctcctgtctccgcattccctcccccttgaaaacctgactgaggagacattctggaaggttccggtcccactgtgtgtcccctggcgctcttgcccatagagagccagacaccaatcctcaatggcaccttggtggcttccctctgccatgacagcccctaggccaggaaccatcaggggggccagccggcatccaattcctgcggataagtagcgttgggagagaacgggaaaggggacttgagttacagggtgacccagaaagacgattcagctgtgtccagcctgccacccatacgtaggccaaccaagcacttcatgaagaggaggcctcgtggcatattcagtttacacctgaaatattccttgatgggacagcttgtggggatggctatgggggaaggggaggttgagaaaggaagttctcgacaccagaaatgcatcggaggaccacaatcagttctatgctgccaaagattaaaaataaataaaaacataaaaaattaagaggggccaagaggaagacattctttctgcaaggaaatttcttttaaattctgaactgctactacacacaagtgaaagtcaaccctatgtaaactggtgtcctctctctagccctctcccttactggcccacttctctctccgtagagagcctgaaaaactgccccaatgccacggtaaaggcgaggaagtcttggctggcgttgctgactcacagtcgccatccatctggacacaaagagagacctgtgggagtcgtagagggtactgttagccccggtccatgcagggggttcagccgagcccaagactcaaagctgctttcctttcaggatttgtagtaacgtaaggtgataatggccaaaagtggttctctctcattaaaccaaccagtaaaagcgtatcctatttttttgcacaaggtgtttcattttcgtttttatgggaaaccaagggaaaagcacattgcgatccattcagtgtttaactgtcgtggctcattttctgttcgttagcacttgtgtgacaaaagagctcagatccgacttctcctatgtgtcacttattccaagaacccaactatgcccttaggtagaaagatttgactcgtgtgtctactagccaacaggcagagcagggttgaaaaaaatatcagctcccaaagggcccatgtgtctacatcatcagttactgtcatgcaccacatttgtgtgcagataccaaaagaggaggaaagaagaaaaaaattaatgtgtgggagctgcacgtttacatgttttgagctatgcttcaaacacaactggaaagccatcaatcttcaaaggcctcaaaaatacttttatagtaacaagtgcacgactttagttgggttattcaagatggcacaaaaaggtttccgcagaggtggtatgctgtgcttttggcgcaagtggtggggggatggggtgggggtggaatttttttctcactctaatgacttcctattggaaaggcattgacagccagggacaggagccagggtgggggtagttttgtgggaaagcagaactgaagttagcttaagcataaaaacaaagaaaaatcttcgcttttcatgtatgtggaatccaagaataaccataggctctaccagaccagaagggtaaggatggacactaaaatgaaacaaataccaaggtattccttctgctgcagcctggagaccaccgagagtcgagctggggcacacacacacctggccgggacccggcagggacaaggcgggccgtggcctcctccaccaagtctctctagacaattcagggcctgctttccccagctccatgcatggctggactggtgattccagggtgcagaagggattcatattcccagaacgctttaagtgtacacctgcaggataaagagataccggttacattattaaatgattctagggattcactgggggatatttttgttgcttttactttcatggttagagctacaaagaacagtgattttttttttttctcccttccccattcagaaacattatacattgggccatttttctttctcccaaagaagattcatggatagtcagactgaactgtgtgcaacaggaaaagtcaaaagggaaaaggtagctgatgaggttacatggttacatgttctacatcatgcatagtagcttgaaatctagtctggagaaaactggatcaagattctagcccactggagttgcaaggaatgagaggcaaaaattctaaagatttgggttatattttcaacttgggggacagagagaaatggagagcaggaattacagttccaacaaacatcatgatagtctggtagtcaagacagagattaagtaaaacaggttttactgtttagctgagttcagttaatacaaaatgtacataaaacgttagtcctttgagactgacatgattaatgatcagtgtggtgggaaatgatgtagttattgtacacaagcacttgcaaactctttatccctatttctttaaaacaaaataaggtgaaatacgaagtccttggtctgatataaagcccctattggattcttcggatgcgtaaaagaaattgcctgtttcagccagaagactggtgaaaacacatacatcagactatgttgtgagccaggttgattttttattttattatatgcaggtgagtgttgaaactgttaaaattccaatttgttttcattcagtattagtttagttctaaatatagcaaaccccatccaggtgctatcagatgaccagttactgcttagttaactaggtgtaaagttttacatatacattaatgtcaatagtttattacaagttgtgtaaaatggactctagtttaataatgggggaaaaaagattaggttgctcctgaaactgactgtagagcatgtaaaatgattttactggattctgttcaactgtaatcaatgaaaaagatgtacgttgtagacaaagttgcagaattaaaaaaagaaatctgcttttaatttattctttttgtattaagaatttgtatagtacctttacattttgcaaaacagtgttgtcaacacttattaaagcattttcaaaatgaaaaga

SEQ ID NO: 1444 - DNA, 2619 bp, Homo sapiens
  source 1..2619: mol_type = genomic DNA
agtccctttttcttgagagagtgtggctctgtcaccaaggctggagtgcaggggcacaatctcagctcactgcaacctccaccttgcgtgtctcagcctcctgagcagctgggaccacaggagtgtgccaccacacccagctaatttttgtatttttttagtagagatggggtgtcaccatgttggccaggctggtctcaaactctcggcctcagcctcccaaagtgctgggattataggtgtgagccaccacacccagcctctatatcccttttatcggtggacccaacaatcttctgtagacagaagactgtgtgaataagccaatggtcccaagagagcacgcatcctaatgagaacggagacagataataaagagggaaacaagtaaaccaactatcaatgattaggagcgtcagatagagccaggtgcagcctggacaacatgatgagatccccatctctaaaaatataaaataaattagctggtcatgatggtgcacacctgtagccccagcttctcagtaggctgaggtgggaggattgcttaagcctgggaggtcaagcctacagtgagccatgatctcaccatgcactccagcctagacaacagggcaaggccctctaaaaaaaaaaatgaaaagatagcatgctttggccggatgtggtggctcacgcctgtaatcccagcacttcaggaggttgaggcgggcagatcacctgaggtcaggagtacgagatcagcctggccaacacggtgaaaccccatctctactaaaaatacaaaattaactgggcgtggtggctcatgcctgtaatcccagctactctggaggctgaggcaggagaatcgcttgaacccaggaggcggaggttgtggtgagctgagattgcgccattgcactccagcctgggcaacaagagcgaaactccgtctcaaaaaaggatagcatgcttcataaacggtgaaatgacatgcaaaggccatagttgtcaagcaccagtaacaccagagagtggcctgtctttccttcaagcagaccagagaggaccgttctgctggacgcctacagtgaacatctggcagcggccctgtgcaccaatccaaacctgatagagctgtctctgtaccgaaatgccctgggcagccggggggtgaagctgctctgtcaaggactcagacaccccaactgcaaacttcagaacctgagcactttgggaggcccagatggggaggatcacttgacccaggagttcaagaccagcctggccaacatggtgaaaccccatctctactaaaaataccaaaatgagccaggcatggtggcacacgtctgtaagcccagctactcaggaggccaaggcaggaggattgcttcaacccaggaggcagaggttgtggctgaagaggtgccgcatctccagctcagcctgcgaggacctctctgcagctctcatagccaataagaatttgacaaggatggatctcagtggcaacggcgttggattcccaggcatgatgctgctttgcgagggcctgcggcatccccagtgcaggctgcagatgattcagttgaggaagtgtcagctggagtccggggcttgtcaggagatggcttctgtgctcggcaccaacccacatctggttgagttggacctgacaggaaatgcactggaggatttgggcctgaggttactatgccagggactgaggcacccagtctgcagactacggactttgtggctgaagatctgccgcctcactgctgctgcctgtgacgagctggcctcaactctcagtgtgaaccagagcctgagagagctggacctgagcctgaatgagctgggggacctcggggtgctgctgctgtgtgagggcctcaggcatcccacgtgcaagctccagaccctgcggctggatagctgtggcctcacagccaaggcttgtgagaatctttacttcaccctggggatcaaccagaccttgaccgacctttacctgaccaacaacgccctaggggacacaggtgtccgactgctttgcaagcggctgagccatcctggctgcaaactccgagtcctctggttatttgggatggacctgaataaaatgacccacagtaggttggcagcgcttcgagtaacaaaaccttatttggacattggctgctgaatggtcctatctgctggctctcccctgagatctggacagaggaagatgggagggtgctcatcacccccccagcataatgatcagcctccttcctagagacagactcatgcagattgagatcaaaagtccctctgcttgggatcaaattaatgtttgacagagctggccaggcgtggtggctcatgtatgtaatcctagcacttcgagaggccgaggcaggtggatcacgaggtcaggagtttgagattagcctggccaagatggtgaaaccctgtctctactaaaaataaaaaaaaattagccaggcatggtggcgggcacctgtagtcccagctactcaggaggctgaggcaggagaatcgcttgaacccgggaggtggaggttgcagtgagccgagatcgcgccactgcactccagcctgggcgacagagtgggactccatctc

SEQ ID NO: 1445 - DNA, 1202 bp, Homo sapiens
  source 1..1202: mol_type = genomic DNA
tgggcggggttatataagccagcggcgggcggaaggcggggcgtgggggtctgtggctgctgggctggcggggcgcaggccgcgggacccgagcccggggaagcgagagagcggaggcgccgaggatccgattcactccctggggagacctatgggccgaagccgtgtaaatgcgttttaagcagaggcctcggctccgcaactgccactcctcctcggggtgttgcacaagtttcgaggtcaccggcgaccccccctagcagcgcgcctggctctggcccccgcgaaggaggacggagtttggagcttgcggcccccacccaccgcgtggcgtccccaggcacgcctagaattctagcacctcaggatcagtccagcccccatttacaattggggaaactgcggctccgaaagggtcagagggtacccgaggtcaagcagtagagagcggactcgaacttaagctcttgctcttaggctgagacgccttgatgtggccaccggctaccctctagtgtgttgcatactttctaaggcggcggctgcagcagcggctccatccagcccgtcagctcctcctgcaaggcatggctggctacctgagtgaatcggactttgtgatggtggaggagggcttcagtacccgagacctgctgaaggaactcactctgggggcctcacaggccaccacggacgaggtagctgccttcttcgtggctgacctgggtgccatagtgaggaagcacttttgctttctgaagtgcctgccacgagtccggcccttttatgctgtcaagtgcaacagcagcccaggtgtgctgaaggttctggcccagctggggctgggctttagctgtgccaacaagattgcttccgtgatcaactcagccttggacctgtacttcccagagggctgtggcgtggacatctttgctgagctggggcgctactacgtgacctcggccttcactgtggcagtcagcatcattgccaagaaggaggttctgctagaccagcctggcagggaggaggaaaatggttccacctccaagaccatcgtgtaccaccttgatgagggcgtgtatgggatcttcaactcagtcctgtttgacaacatctgccctacccccatcctgcagaagtctaagaaccactcaccctgctacatgtctctagagtccattcatttcattgccgtgtag

SEQ ID NO: 1446 - DNA, 1364 bp, Homo sapiens
  source 1..1364: mol_type = genomic DNA
gccttacgccgctgacgcatcgcgcccaagatggcggcgcggtcgtcgtcgggggtggcggcggcagagggggcggcggccctggcggcagcggagacggcagccgtgacggtggcagcggcggcgcgggacctgggcctgggggaatgaggcggccgcggcgggccagcggcggagccgtgtagcggagaagctccccctccctgcttcccttggccgagccgggggcgcgcgcgcacgcggccgtccagagcgggctccccacccctcgactcctgcgacccgcaccgcacccccacccgggcccggaggatgatgaagctcaagtcgaaccagacccgcacctacgacggcgacggctacaagaagcgggccgcatgcctgtgtttccgcagcgagagcgaggaggaggtgctactcgtgagcagtagtcgccatccagacagatggattgtccctggaggaggcatggagcccgaggaggagccaagtgtggcagcagttcgtgaagtctgtgaggaggctggagtaaaagggacattgggaagattagttggaatttttgagaaccaggagaggaagcacaggacgtatgtctatgtgctcattgtcactgaagtgctggaagactgggaagattcagttaacattggaaggaagagggaatggtttaaaatagaagacgccataaaagtgctgcagtatcacaaacccgtgcaggcatcatattttgaaacattgaggcaaggctactcagccaacaatggcaccccagtcgtggccaccacatactcggtttctgctcagagctcgatgtcaggcatcagatgactgaagacttcctgtaagagaaatggaaattggaaactagactgaagtgcaaatcttccctctcaccctggctctttccacttctcacaggcctcctctttcaaataaggcatggtgggcagcaaagaaagggtgtattgataatgttgctgtttggtgttaagtgatggggctttttcttctgtttttattgagggtgggggttgggtgtgtaatttgtaagtacttttgtgcatgatctgtccctccctcttcccacccctgcagtcctctgaagagaggccaacagccttcccctgccttggattctgaagtgttcctgtttgtcttatcctggccctggccagacgttttctttgatttttaattttttttttttattaaaagataccagtatgagatgaaaacttccaataatttgtcctataatgtgctgtacagttcagtagagtggtcactttcactgcagtatacatttatctacacattatatatcggacatataatatgtaaataaatgacttctagaaaga

SEQ ID NO: 1447 - DNA, 5880 bp, Homo sapiens
  source 1..5880: mol_type = genomic DNA
gctgctgctgcagtgggacaggtggcggcgaccggcggcgtccgaggagatttaatccagagactgacttcactatagaacccacagttgtatcaatggttggggaaagatagtggcaacaggcaaaggagaaacagctctgacatacaaagaaaatgagtatgctaaagccaagtgggcttaaggcccccaccaagatcctgaagcctggaagcacagctctgaagacacctacggctgttgtagctccagtagaaaaaaccatatccagtgaaaaagcatcaagcactccatcatctgagactcaggaggaatttgtggatgactttcgagttggggagcgagtttgggtgaatggaaataagcctggatttatccagtttcttggagaaacccagtttgcaccaggccagtgggctggaattgttttagatgaacccataggcaagaacgatggttcggtggcaggagttcggtatttccagtgtgaacctttaaagggcatatttacccgaccttcaaagttaacaaggaaggtgcaagcagaagatgaagctaatggcctgcagacaacgcccgcctcccgagctacttcaccgctgtgcacttctacggccagcatggtgtcttcctccccctccaccccttcaaacatccctcagaaaccatcacagccagcagcaaaggaaccttcagctacgcctccgatcagcaaccttacaaaaactgccagtgaatctatctccaacctttcagaggctggctcaatcaagaaaggagaaagagagctcaaaatcggagacagagtattggttggtggcactaaggctggtgtagtccggtttcttggggagaccgactttgccaagggggagtggtgtggcgtggagttagatgagccacttgggaagaatgatggcgctgttgctggaacaaggtattttcagtgtcaacccaaatatggcttgttcgctcctgtccacaaagttaccaagattggcttcccttccactacaccagccaaagccaaggccaacgcagtgaggcgagtgatggcgaccacgtccgccagcctgaagcgcagcccttctgcctcttccctcagctccatgagctcagtggcctcctctgtgagcagcaggcccagtcggacaggactattgactgaaacctcctcccgttacgccaggaagatctccggtaccactgccctccaggaggccctgaaggagaagcagcagcacattgagcagctgctggcggaacgggatctggagagggcggaggtggccaaggccacgagccacgtgggggagatagagcaggagctagctctggcccgggacggacatgaccagcatgtcctggaattggaagccaaaatggaccagctgcgaacaatggtggaagctgctgacagggagaaggtggagcttctcaaccagcttgaagaggagaaaaggaaggttgaggaccttcagttccgggttgaagaagaatcaattaccaaaggtgatcttgagacgcagaccaaactggagcatgcccgcattaaggagcttgaacagagcctgctctttgaaaagaccaaagctgacaaactccagagggagttagaagacactagggtggctacagtttcagaaaagtcacgtataatggaactggagaaagacctagcattgagagtacaggaagtagctgagctccgaagaaggctagagtccaataagcctgctggggatgtggacatgtcactttcccttttgcaagagataagctctttgcaagaaaagttagaagtcacccgtactgaccaccagagagaaataacttctctgaaggagcattttggagcccgggaagaaactcatcagaaggagataaaggctctgtataccgccacggaaaagctttccaaagagaacgagtcattgaaaagcaagctggagcatgccaacaaagagaactcagatgtgatagctctatggaagtccaaactggagactgccatcgcatcccaccagcaggcgatggaagaactgaaggtatctttcagcaaagggcttggaacagagacggcagaatttgctgaactaaaaacacaaatagagaaaatgagactagattaccaacacgaaatagaaaatttgcagaatcaacaagactctgaacgggctgcccatgctaaagagatggaagccttgagggctaaactgatgaaagttattaaagaaaaggaaaacagtctggaagccatcaggtcgaaactggacaaagcagaagaccagcatctcgtagaaatggaagacacgttaaacaaattacaggaagctgaaataaaggtaaaggagctagaggtactgcaagccaaatgcaatgaacaaaccaaggttattgataattttacatcacagctcaaggctactgaagaaaagctcttggatcttgatgcacttcggaaagccagttccgaaggtaaatcggaaatgaagaaacttagacagcagcttgaggcagctgagaaacagattaaacatttagagattgaaaagaatgctgaaagtagcaaggctagtagcattaccagagagctccaggggagagagctaaagcttactaaccttcaggaaaatttgagtgaagtcagtcaagtgaaagagactttggaaaaagaacttcagattttgaaagaaaagtttgctgaagcttcagaggaggcagtctctgttcagagaagtatgcaagaaactgtaaataagttacaccaaaaggaggaacagtttaacatgctgtcttctgacttggagaagctgagagaaaacttagcagatatggaggcaaaatttagagagaaagatgagagagaagagcagctgataaaggcaaaggaaaaactggaaaatgacattgcagaaataatgaagatgtcaggagataactcttctcagctgacaaaaatgaacgatgaattacgtctgaaagaaagagatgtagaagaattacagctaaaacttacaaaggctaatgaaaatgcaagttttctgcaaaaaagtattgaggacatgactgtcaaagctgaacagagccagcaagaagcagctaaaaagcatgaggaagaaaagaaagaattggagaggaaattgtcggacctggaaaagaaaatggaaacaagccacaaccagtgtcaggagctgaaagccaggtatgagagagccacttctgagacaaaaaccaagcatgaagaaatcctacagaacctccagaagacgctgctggacacagaggacaagctgaagggcgcacgggaggagaacagtggcttgctgcaggagctggaggagctgagaaagcaagccgacaaagccaaagctgctcaaacagcggaagatgccatgcagataatggaacagatgaccaaagagaagactgagactctggcctccttggaggacaccaagcaaacaaatgcaaaactacagaatgaattggacacacttaaagaaaacaacttgaaaaatgtggaagagctgaacaaatcaaaagaactcctgactgtagagaatcaaaaaatggaagaatttaggaaagaaatagaaaccctaaagcaggcagcagctcagaagtcccagcagctttcagcgttgcaagaagagaacgttaaacttgctgaggagctggggagaagcagggacgaagtcacaagtcatcaaaagctggaagaagaaagatctgtgctcaataatcagttgttagaaatgaaaaaaagagaatccaagttcataaaagacgcagatgaagagaaagcttccttgcagaaatccatcagtataactagtgccttactcacagaaaaggatgccgagctggagaaactgagaaatgaggtcacagtgctcaggggagaaaacgcctctgccaagtccttgcattcagttgttcagactctagagtctgataaggtgaagctcgagctcaaggtaaagaacttggagcttcaactcaaagaaaacaagaggcagctcagcagctcctcaggtaatacagacactcaggcagacgaggatgaaagagcccaggagagtcagattgatttcctaaattcagtaatagtggaccttcaaaggaagaatcaagacctcaagatgaaggtggagatgatgtcagaagcagccctgaatgggaacggggatgacctaaacaattatgacagtgatgatcaggagaaacagtccaagaagaaacctcgcctcttctgtgacatttgtgactgctttgatctccacgacacagaggattgtcctacccaggcacagatgtcagaggaccctccccattccacacaccatggcagtcggggtgaggaacgcccatactgtgaaatctgtgagatgtttggacactgggccaccaactgcaatgacgacgaaaccttctgatgaagcctccagtggagaactgggcttgctcagacgcactcgcattgacacaacgtaacaccagcattgtgtgtgcagacttcaggagaactcatgttattttttaaccccgtcaacaaatctaggaaaatattttgatcttcaacaaattgccctttagtctccccgtatgagttagaataataaatatttagtaggtgagttttcacctcgaattttgttttcttgatttttacgtttgaagacattgcaccagatgccattacatttattggccccccgaccttgtagaaaaacccctaccctcacaataccttatttaagtaactttaaattatgccgttacttttcatatttgcactaagatatttccaggctgcatttgtatatttagattttttggttaagctttgacactggaatgagttgaaaaaatgtgccattttgcattttcatctactcatttaaagtattttattcttattcaaagaaatatctgagctctttgcactacctgttatcagtagtgcctttacttcaggcttgataatacttaggtgtgattataaaatcatgaagcaggtaaagggaggggcaagcccccaaactgctgtggggacattttataatctatatgctgcacccacttaatctactgtggtgttttgtttattagttttgcataatttcagcttctatatattgtatgtatatattttttaaaaatctatattttgggaaaaaaacatacacaatgtgtctttctttttggacatttacctttttgaaaaagaaaacacttaaaatgatcattaggacataacagactaggccagacatagcatcttgtggctttgcaaccattttcatttgtttgttttccttttatttcttcaccagatttaaataactggaggaattttctccaatttttttttccttctctggcaggtatccccagcagtcaattaacaataagccagtataaaacacctaaataaccaatctacaatctcccttcacaagtttttttactgtttttagatgaatgtacgatgagaaattcaacgttaataattctggattttcttatcacaaaaaagaaaatgaaggacctcaaagcacctgaacagtttatcgaccagtttgaatctatttatcttcatttgaatgtcttctagaatatgtaaaaagtcataaaatgtatcttccatgctacatgtacaataagaacttctataattgtatatatgcctttgatgtattttcccctcaagattatcaactgtgtgttcgacagtgaatattcaatctggtaccagttgaaatttttggttataaatgtaatacgaattgtttcacaaacagaaaacatgtaaagcagtattaaaatttggccaaacaagtgttctgtatctactttaataaatggttattcttt

SEQ ID NO: 1448 - DNA, 1194 bp, Homo sapiens
  source 1..1194: mol_type = genomic DNA
atgggggactcttgccctgcagtcacattcaggtcccagaaagagaatcgagctggacttcaggagaagctgcgctacctccagcagcagctgcaggatgagacgccgcgacggcaggaggccgagctgcaggagccggaggagaagcaggagccggaggagaagcaggagccggaggagaagcagaagccggaggctggcctctcctggaacagcctgggccccgccgccacgtcccagggctgccccggcccgccagggagtcccgacaaaccctcgcggccacacggcctggtccccgcaggctggggaatggggcctcgggctggcgagggcccctacgtgagcgagcaggaattgcagaagctgttcaccggcatcgaagagctgaggagagaggtgtcctcactgaccgcccggtggcatcaggaggagggggcggtgcaggaagccctgcggctgctcgggggcctgggcggcagggtcgacggcttcctaggccagtgggagcgggcacagcgcgaacaggcacagacggcgcgggacttgcaggagctgcgaggtcgggcggatgagctgtgcaccatggtggagcggtcagcagtgtctgtggcttcactgaggagcgaactggaggggctgggcccactgaaacccattctggaggagttcgggcggcaatttcagaactctcgaagagggcctgacctctccatgaacctggatcggtcccaccaaggcaactgtgcccgctgtgccagccaggggtcgcagttgtctacggagtccctgcagcagctgctggaccgagcactgacctcactagtggacgaggtgaagcagaggggcctgactcctgcctgtcccagctgtcagaggctacacaagaagattctggagctggagcgccaggccttagccaaacacgtcagggcagaggccctgagctccacccttcggctggcccaagacgaggccctgcgggccaagaacctactgctgacagacaagatgaagccagaggagaagatggccactctggaccatctacacttgaagatgtgctccctccacgatcatctcagcaacctgccacttgaggggtccacgggaacaatggggggaggcagcagtgcaggaacccccccaaaacaggggggctcagcccctgaacaataaatggcctctcatgct

SEQ ID NO: 1449 - DNA, 4050 bp, Homo sapiens
  source 1..4050: mol_type = genomic DNA
gtactcggccgcctgagcgccgacccacgccctgcctgctcttccagtccagccaacactctaagcaggcaccgcctccactcgcagcccccgggatgggtcccactccctaccgcagatccccaggccccctccacccagtcggctagccctcgcctctgccatccgatactaaaatgtctgatgatgctggtgacaccttagccactggagacaaagcagaagttactgagatgcctaatagtgattctttacctgaggatgcagaagtgcattgtgattcagctgcagtttcacatgagccaacaccagctgaccccagaggggaggggcatgaaaatgcagctgtgcagggtgcaggggctgccgccattgggccccctgtgcagcctcaggatgccaacgccctggagccccctctcaatggagacgtgactgaggatacacttgctgaatgtattgattccgtcagccttgaggcagaacccagatccgaaatacccctgcaagaacagaattatctggctgtggattcccctccaagtggaggaggatgggcaggctggggatcctggggcaaatctctgctgtcgtcagcatctgccacagtaggtcatggattgacggcagtcaaggaaaaagcaggagccactctacggattcatggtgtaaattctggatcttctgaaggagcccaaccaaatactgaaaacggagtccctgaaataacagatgcagccacagatcagggccctgcagaaagcccacccacttccccttcatcagcctctcggggtatgctgtctgccatcaccaatgtggttcaaaacacaggtaaaagtgtcttaactggaggccttgatgcgttggaattcatcggcaagaaaaccatgaatgtccttgcagaaagtgacccgggctttaagcggaccaagacgctcatggagagaactgtttccttgtctcagatgttaagggaagctaaggagaaggagaagcagagactggcacagcagctcacgatggagagaaccgcgcactacgggatgctgtttgatgaatatcaaggcttgtcacacctggaagccctggaaattctgtccaatgaaagcgaaagcaaggttcagtcatttttagcatcacttgatggagagaagctggaactcttaaaaaatgacctaatttccattaaagacatctttgcagccaaagaattagagaatgaagaaaatcaagaagaacaaggcttagaagaaaagggagaagaatttgctcgcatgcttacagagcttctctttgaattacatgtggcggccacacctgacaaactcaataaggccatgaagagggctcatgactgggtggaagaggatcaaaccgtggtgtcagtagatgtggcaaaagtgtccgaagaagaaacaaagaaggaagaaaaggaagagaaatctcaagaccctcaagaagacaaaaaggaggaaaagaaaactaagaccatagaggaagtatacatgtcgtccattgaaagtctggcggaggtaacagcgcgctgtattgagcagcttcataaagtagcagaattaattcttcatggacaagaagaggaaaaaccagctcaggaccaagcaaaagttctaataaaattaactactgcaatgtgcaatgaagtggcctctttatcaaagaagtttacgaattctttaaccactgttgggagcaacaagaaggccgaggtccttaaccccatgatcagtagtgtattgttagagggctgcaacagtacaacgtacatacaggatgccttccagctgctgctgcctgttctgcaggtctcacatatccagaccagttgtttgaaagcacagccgtgacctggccagactccatctagttaaaggagacagctggccgccttgcctcaatatgtaccatttaaggggatgttctctgtgcgcctggccacagacatccatttgaggacactacaagcaattttgcacagacaatattgagaatgcaaatttagagagagttatcatttctctcaatgtgtataattgtttttacaaacaattgtgttttctttatgttaatttaaacttacacagcttatattgaaaatttcctttcatctgaaatttatttacaaatattcgtgttcattttcctggttaagcatgctatatttagaaactcatggggagaccttagacttttgtttaatcctttatgtttcaacctttaaatgttccattcttatagtattactttaaatcaattctaaaactgaactttgttttgttacataaatgtcgcaggcaaaaataacactacttatagattttacctattatggtaaaaaataggaacatattgtcattctttttttttttttttttttgagacagagtctcactctgtcgccaggctggagtgcgttggcacaatctcggctcactgcaacctccgcctcctgggttcaatcgattctcctgcctcagcctcctgagtagctgggactacaggtgtgtgccaccacgcccagccaattttttttgtatttttagtagagacagggtttcaccatgttggccaggatggtctcgatctcctgacctcgtgatctgcccgcctcagcctcccaaagtgctgggattacaggcttgagccaccgcgcccggccggtcattcattcttgcaacaagcatttattgagcacctactgtgtgctcacagtaaagaaacgtgatcttatcccagtagaggtagatattctgaaaaagaataattcttaaactgcttaaaacaggggtccccacccccaggccacagaccagtaccagtccgtggcactggttaggaaccaggccacacagcagggggtgagcggtgggtgagtgagcacagcttcatctgtatttacagctgctccccagagcttgcattactgcctgagctctgcctcccgtcaggtcagcagcagcattagagtctcatgggagtgcgaaccctgttgtgaactgcacatgcgagggatctaggttgtgcactccttatgagaatctaatgcctgatgaatctaatgcctcatgatctgaggttgaatagcttcgtgccgaaaccatcccccacccccatcccgctaccccgagtccgtgaaaaaattgtcttccatgaaaccggtccctggtaccagaaaggttggggaccactggcttaaaataccaataaatttttgaaccttaaaaactttgaagaacaaggtaaattggtgttttatttaatgtcctaccctttaatttgttgcattttcctatactctttacactattttatcccaaactatgtatatgaggtgaaaatatatatgaaaagggatactgaagaatatttagtttaaaattaatttcttacgatcacgagcacatggtggcataattacaaagcttggaagtattcaaatagaaaatcaaaggtgtttcaatacagtagaatcccaggactgcattttaaaatcgcctcacagatcacactcgctggtggcaaatatcatcatcgttgctaaaggacagaaaatactgatgtgtgttttaactaactggtatattgatccatgggaggctgcacagaagaccctgcggccaggaggggcattgtcagtggctgcttctcctgagctccacgccttcattgcagctgcatgttcgatacaatacacctgcttcacagccccatggacatccctacaggtactgtcatgtgaagccttgcctagtagttctctccagggcaaatgaagctcacagttttgcaaggtggaaacctcttattcacatttgctttgattccccgatggagtagactgcctttgttccatacaggcaaagtaaggatattttaatatcatcctacttcttattagcatttcatttgtctatgtactgtatttcatttgtatgtctcctgaaacatccaaatagagaacataagaacactttatgtacaatctggaaaaaaattacctgagaaatcaattaaagatttttccccttt

SEQ ID NO: 1450 - DNA, 3750 bp, Homo sapiens
  source 1..3750: mol_type = genomic DNA
ggctagacccctcccctccttgcgagtgtatgtcagtgacccagaggcggtgtgaggcggagggaccgtcggggggcgccgccgccgcctccactagcagcagcggcagcagccctagtcccgcggtgcggtcgaattggtccccagccctccgggagcgcaccacaaagcagccccaacgcctctccctgcgtccgcggctcctcagcgctcggctccgtggtcaacttcccctcgctgggctcggctggcgggcgcggagggcagcggcggaacggcgggctgtctgctcgcgctccccgcgcacaacacttcaccctctcgcctcgggtctcgggggccgctctgggatcccggccaccagcaattgtccggaaataatgcaaaaggtgtcccaaggctcctgaccagtgaacaaagatttgagaaagacagccaagctcatgttttctcctgatcaagaaaatcatccatctaaagcaccagtaaaatatggtgaactcattgtcttagggtataatgggtctctcccaaatggcgatagaggaaggaggaaaagtaggtttgctttgtttaaaagacctaaggcaaatggggtgaagcccagcactgtgcatattgcttgtactcctcaggctgcaaaggcaataagcaacaaagaccagcatagcatatcatatactttatctcgggcccagactgtggtggttgaatatactcatgacagcaacaccgatatgtttcagattggccggtcgactgaaagccccattgattttgtagtaactgacacggttcctggaagtcaaagtaattctgatacacagtcagtacaaagcactatatcaagatttgcctgcagaatcatatgtgaacggaatcctccctttacagcacggatttatgctgcaggatttgactcatcaaaaaacatctttcttggggagaaggctgccaaatggaagacatcagatggacagatggatggcttgaccactaatggtgttcttgtgatgcatccacgcaatgggttcacagaagactccaagcctggaatatggagagaaatatcggtgtgtggaaatgtatttagcctacgtgaaaccagatcggctcagcagagaggaaaaatggtggaaattgaaaccaatcagttacaagatggctcgttaattgacctctgtggtgcaacattgttatggcgtactgcagaaggcctttcccacactcctaccgtgaagcatttagaagctttaagacaggaaatcaatgcagcacgacctcagtgccctgtagggttcaacacactagcatttcctagtatgaagaggaaagacgttgtagatgaaaaacaaccatgggtatatctaaactgcggccatgtacatggctatcataactggggaaacaaagaagaacgtgatggaaaagatcgtgaatgtcctatgtgtaggtctgttggtccctatgttcctctgtggcttggatgtgaagctggattttatgtggacgccggccctccaacccatgcgtttagcccgtgtgggcatgtgtgttcagaaaagacaactgcctattggtcccagatcccacttcctcatggtactcatacttttcatgcagcctgtcccttttgtgcacatcagttggctggtgaacaaggctacatcagacttatttttcaaggacctctagactaacagaccattgtcttgcaggactacattataaatttataagctaagtgagttgggttttcgaacctgttgtccacgtcacagtttttctgctctggtcatttgcattaagatgaagaattttttaaaacatttataataaatagtagcaatttctgagcaaaaatctgggaaactcaagcaaaggaatttctgaaagtatcagtcttctgaattctgagttttgaaaatatattttgaggagaaaaagacatagtctaatttgatgccttccttttagtgtttttgaatcacctatcctcagtgctgaaattgttttgtataactgagggtactgttggttcaaactatgttagtttacagtttgttgcaaacattgtaaaatacagcgacatgtatattaacttttttctatttatctttattatagaaaataccttagaatgttcttgatagagtagcatggtaacgatggtgtcacacccttggtgtgaatggtagcttagtgagcaacctagctcaaggatttgcaaagttaggaagaaggacgagagagcctctctccccaccccaatctaaatatggaatttggtaaattagaatactttgtaatttgtaagaccaaattcatactaattacccgcgtgaaaggtgtttgtttttaacaacattgaagataatcaggaaagattttttcttaatgtttctctcgagcgtagtactataacaaaaacttaatgctaagaaacattttatatgctcctttggatatgcaatttaatctagattatctatttttctcccatgataactaatctgtttttagtatcagcagcatttggcaagtttattttttggatataaactgtggttcatctgttcactgtttctagaaaaaaatcattgccataagaaaaagtataaattagcaagaaaggagagtgacttgatttgcttttggaaaaagaaatgcttaattaattattctgtatttggccttattcgggcattaggaaatctagagatctaaagggttgaatgacaatagtgcccccgtttttagcagaccagccttaactctgggtttgaatcctaaggagattgccacagtgagacttaaggaaatgtttggttggcagatgagcaccaatgactgcagcgtggagtgacgcactgcatggtctgtttattctctaattccaatatgtcttttgcttccagaagcaagaaaagtttcttctctcccctccttcccacccttttttcaaaggcaccacaagtatagacagttgcactacatcaaatctttttttgacacttgtagaaaccagtacacttttagattagacagtatcttcttttaatattttgatttgttttcctttagtttgaaaagttgtataatacttaactgactgtagcaaagttttatatgtggtagcatacctttaatttatcctattacaaaactgttctgaattttcttttggtttttaaaaaacaaaacttgttgcttagaagccatgaattattttattttacttcaactgtcgaaacttccttgttttaaaaaatgatcatttgggttcactcaggaaatgcatgtcaggaaacttgtattataagtttattagttgtgatgtatcagtaactgctgttacccctttttcaaagaaatgtaattgattttgaagttttctagattgtcacatgctttgtgactaatgcaagaaagcaagtcctgtgttgtatttgttctagtcatttttattcaggctatatattgtagcttaatttttatttgcaattaatttatttaaactaagtaaatacttttcaaaatacataattgaattcgtctctgtgagttcatttttgcataatcgagaatgagaaaccagaagtgaaaactgtgaacaactctattccacactccaaaaatactcatttgaaatagatgaagagtttgcatttaatgtaacactttaaagtatctggttcttttttaaaagcatctcttactaataaaggaactttgttagtggttgaataa

SEQ ID NO: 1451 - DNA, 6013 bp, Homo sapiens
  source 1..6013: mol_type = genomic DNA
aaaaataatgccatttttttgaatgatgaactatggtataatgcatttagtgttcattccaaacgtcaatcaataaataacatgggcctctagctataagggaaattctataggtaaaagaactgattgacccccacccccataggtgctgtcctgctatggaatccctttgctcagttttctcctgtccaatcaggtggaatgtttcacaggcacatggtttatacagctcaaaataacttgggacctgtgagctgacaaatgctctggctccggtggtgacaggttgtccagcttcttacagccatcttcactgaaactaaggttaactcctcactctctatggacggctactctctatttccaagggcgtgaagaatttccctcttctcctgtgctttcatctaaaagttctccctggataattatcattgcagtggagtgcctggattggacatcctcatctgggtcaactaaaaaaagaaagcatgcaagacgacagcatagaagcttctacttccatatctcagcttctaagagagagctatttagctgaaaccagacatcggggaaacaatgagaggagtcgagcggagccctcctccaacccttgccatttcggcagtccttctggggccgctgaaggaggcggaggccaagatgaccttccagatctttcagcctttctgagccaagaagaattagacgaaagtgtcaatttggcaagactggccatcaattacgaccctttggagaaggcagatgaaactcaagctagaaaacgactttctcctgatcagatgaaacactcacctaatttaagttttgagcctaacttctgccaggataaccctcgaagtcccaccagctctaaagaaagcccccaggaggcaaaaaggccacagtattgttctgaaacccagtccaaaaaagtatttttaaataaggctgccgacttcattgaagagctatcctcccttttcaaatcccacagctccaaaaggattagacctcgtgcctgcaaaaaccacaagagtaaactggaatctcaaaacaaagttatgcaggaaaacagctccagtttctcagatctgtcagaaagacgagaaagatcttctgttcccatccctatccctgcggataccagggataatgaagtgaatcacgccctggaacagcaggaagccaagaggcgtgaagcggagcaggctgccagtgaggcggctggtggagacactacaccagggtcttccccttcatctctgtactatgaagaacctctggggcaacctccccggttcactcaaaagttacggagcagagaagttccagaaggaactcgagtacagttggattgcatagtggtaggaattccaccacctcaagtaaggtggtactgtgaaggcaaggagcttgaaaattccccagatattcacatcgtccaggcaggaaatctgcactcactgaccattgcggaagcctttgaagaggacacaggacgctattcctgctttgcttctaacatctatgggacagattcgacttctgctgagatttatatagaaggggtttcttcttctgactcagaaggcgaccctaacaaggaagagatgaatcgaatccagaagccaaatgaggtgtcatctcctcccactacctctgcagtcattcctccagcagtaccccaagcccagcatttggtggcccaacctcgtgtggcaaccatccagcagtgtcagagccccaccaattacttgcagggattggatggaaaacctatcattgcagctcctgtgtttacaaagatgctacaaaatttgtcagcttctgagggtcagctggttgtctttgaatgcagagtaaaaggagctccatctcctaaggttgagtggtatagagaagggactttaatagaagattctccagattttaggattttacagaaaaaacctcgatccatggcagagccagaggagatttgcaccttggtcattgctgaggtgtttgcagaagattctgggtgcttcacatgtactgcaagcaacaaatacggcacagtgtcaagcattgcacagctgcacgtgagaggaaatgaggacctcagcaacaacgggtctcttcactcagccaactctaccaccaacctggcagctattgagccacagccctccccaccccactcagagcctccatctgtggaacaaccccccaaacccaaactcgagggggttctggtgaaccacaatgagccccggtccagctccaggattgggcttcgtgtgcacttcaacctgcctgaagatgacaaaggaagtgaagcatcctccgaggctggtgtggtgaccaccagacagaccaggcccgattctttccaggagaggttcaacggacaggcaacaaaaaccccagagccttcttcccccgtgaaagagccccctccagttctggccaaacccaaacttgattccactcagttacaacagcttcataaccaagtcttactggaacaacaccaattgcaaaacccacctccttcatctcctaaggagtttcctttcagcatgactgttttgaactccaatgctcccccagcggtgacaacatccagtaagcaggtgaaggctccttcatcacagacgttcagcttggcccggccgaagtatttcttcccctccacgaacaccaccgcagcaactgtggccccttccagctctccggtgttcactttgagcagcactcctcaaactattcagaggacagtgagcaaagaaagcctcttagtgtctcacccctctgtgcaaaccaaatctccaggagggctttccatccaaaatgagccactcccaccaggcccaacagaaccaacaccaccaccattcacattttccatccccagcggaaaccagtttcagccccgctgtgtgtccccaattcctgtctctcctaccagccggattcagaacccagtggctttcctcagctctgttctgccttctctccctgccatcccacccacaaatgccatggggctgcctagaagtgcaccatccatgccatcccagggattagcgaagaaaaatacaaagtctcctcaaccagtgaatgatgataacattcgtgaaactaagaacgcagtgattcgagacttggggaaaaaaataactttcagtgatgtcagaccaaaccagcaggagtacaaaatttcaagctttgagcagaggctgatgaatgaaatagagtttcgcttggaacgtactcctgttgatgaatcagatgatgaaattcaacatgatgagatccccacgggcaagtgtattgctcccatctttgacaagagactcaagcacttccgggtcacagaaggctctccagttacattcacctgcaaaattgttgggatacctgttccaaaggtttactggttcaaagatgggaagcagatttctaagagaaatgagcactgcaaaatgaggcgagaaggagatgggacatgctctctgcacattgaatccactaccagtgatgacgatggcaactacaccatcatggcagccaacccccaggggagaatcagctgttctggccacttgatggtacaaagtttgcccattcgcagtcggctaacctctgctggtcagtctcacaggggaagatcccgagtgcaagaaagagacaaagagcccctacaggaacgctttttccgaccacatttcctgcaggctcctggggatatggtagctcatgaggggcgcctctgtcggctggactgtaaggtgagtggtttaccgcccccggagctgacatggctactcaatggccaacctgtgctaccagatgcctcccacaagatgctggtcagggagaccggagtccactctctgctcattgacccactcactcagcgcgacgcagggacctataagtgcatcgctaccaacaaaaccgggcagaattcttttagtctggagctctctgtagtagccaaagaggtgaagaaagcacctgtgatcctggagaaactacagaactgcggtgttcccgaaggccaccccgtgagactggagtgccgcgtgataggcatgcccccacctgtgttctactggaagaaagacaatgagaccatcccttgcaccagagagaggatcagtatgcaccaggacacaacagggtatgcctgccttctcattcagccagccaagaaatcagacgctggatggtacacgttgtcagccaagaatgaagccggcatcgtgtcgtgcactgccaggctggatatatacgctcagtggcaccatcagatcccaccgcccatgtctgtccggcccagtggcagtcgctacggatctctcaccagtaaaggacttgacatattttctgccttttcctccatggaaagcacgatggtgtattcatgctcttctcggagtgtagtggagagtgatgaactttaagaatgtctaggtacctgctgtgtaagagagcggactgtggagggggaatgagaacaagccagacttggtggtttccaagcaaccgaagttgagtaagttcccacactgctggacctgtggcaaagagtgctttgaataagtcagctagggattcttgcagtctcagctgagggagaaaggtagggctgtgccttctaaagattccaacagagatgtgagaagataatacagatgaaccaaagatgtcacacagttgccatccactgctttgggaaaaaactagcatgctcccctgctccctgttgtgttagggatgtttaggtcatactaggagcaattaggagccatatgcctgggctgagaagagctaggcagtagtgaccttaggatatgactaactcaccaaacaatgccaaggagaaaggcggacaggtcaccatcacctttcatcgattacatgtatagcagtagttttggtgaattcaccaaatcagcttccacttagcattaggaggtcatgccatacaactcacgtatgcgggcaaacacttttgatttgcatatcctgggtgtactgagccacataataaggtgtcaaaatgtgcttgagattccaaaaacttgctgaaacacttgatattgcacagtgcacttattttgtggccaaagcatggccttaccagcttgtctgcactattttcttttgggtggtgactgtttttttctgactttgcatatccctagacactagaactaaaggattggtaataaaccaatcagaaagaaatcctctgtggggtcactttaaaaactactagcttcaactaccacttacaaaatgtgcaagagtcatcatttgcccataaaatacacctcatgggctcctacccctttccccaaaagtctgaaagtgtaggaggaaggaagagatacaaacaaggagaggaaatgatgggagagtgttgtttttgtcacttgccccagcagagcaggggttttggaaggagaggtctttaatagctttgaaatgctttgagatcattggtcaaattgcattttctatgtagagaatattctgctaggtggaaaagttgggagaaaggggaatatgcatctttattctaatcaccaattcaaaccctgcctcttaaggaatttttagacttaagttcactgtgatatccctagtacctagaagagtacctagcacaaagtagacattcaataaatatttgctggttgaatgaatcttctgttattatgtctattataagataacctaatcttatattctgcaggaatatgccacccacacaccagtccaaacactgccctgggaatgctcatcacagcacagtttgctctaggctgtgcagggaaatgaattgcaggtgtctgttttcaattccctgtgctggaatccctggtgctgtctgtgccaagcacactcagctggcattgtatttgtgtgaacagacagtaactgcttagaaaggcttgaaactgtcttcacttcaaggcaaggatttccagcataaaaataaattcattcactggagaaa

SEQ ID NO: 1452 - DNA, 4751 bp, Homo sapiens
  source 1..4751: mol_type = genomic DNA
ggaagtggaggcggttggtggggttggcggggctcagcgacgctgcgcgggtggcggtttgcgaactgcgggtggactgtgtagtgaccggcgtcccgctgtctcgccccgtggcgggtgagcgagggtgcgtggtgcgcggcggcggcggaacgaacgcggtgcgggcggggcgcccgccgcagggcccatggcctcctgcgcgagcatcgacatcgaggacgccacgcagcacctgcgggacatcctcaagctggaccggcccgcgggcggccccagtgcagagagcccacggccatccagtgcctacaatggggacctcaatggacttctggtcccagacccgctctgctcaggtgatagtacctcagcaaacaagactggtcttcggaccatgccacccattaacctgcaagagaagcaggtcatctgtctctcaggagatgatagctccacctgcattgggattttggccaaggaggtggagattgtggctagcagtgactctagcatttcaagcaaggcccggggaagcaacaaggtgaaaattcagcctgtcgccaagtatgactgggaacagaagtactactatggcaacctgattgctgtgtctaactccttcttggcctatgccattcgggctgccaacaatggctctgccatggtgcgggtgatcagcgtcagcacttcggagcggaccttgctcaagggcttcacaggcagtgtggctgatctggctttcgcgcacctcaactctccacagctggcctgcctggatgaggcaggcaacctgttcgtgtggcgcttggctctggttaatggcaaaattcaagaagagatcttggtccatattcggcagccagagggcacgccactgaaccactttcgcaggatcatctggtgccccttcatccctgaggagagcgaagactgctgtgaggagagcagcccaacagtggccctgctgcatgaagaccgggctgaggtgtgggacctggacatgctccgctccagccacagtacctggcctgtggatgttagccagatcaagcagggcttcattgtggtaaaaggtcatagcacgtgcctcagtgaaggagccctctctcctgatgggactgtgctggctactgcgagccacgatggctatgtcaagttctggcagatctacattgaggggcaagatgagccaaggtgtctgcacgagtggaaacctcatgatgggcggcccctctcctgcctcctgttctgtgacaaccataagaaacaagaccctgatgtccctttctggaggttccttattactggtgctgaccagaaccgagagttaaagatgtggtgtacagtatcctggacctgcctgcagactattcgcttctccccagatatcttcagctcagtgagtgtgccccctagcctcaaggtttgcttggacctctcagcagaatacctgattctcagcgatgtgcaacggaaggtcctctatgtgatggagctgctgcaaaaccaggaggagggccacgcctgcttcagctccatctcggagttcctgctcacccaccctgtgctgagctttggtatccaggttgtgagtcgctgccggctacggcacactgaggtgctgcctgccgaagaggaaaatgacagcctgggtgctgatggtacccatggagccggtgccatggagtctgcggccggtgtgctcatcaagctcttttgtgtgcatactaaggcactgcaagatgtgcagatccgcttccagccacagctgaaccctgatgtggtggccccactgcccacccacactgcccacgaggacttcacatttggagagtctcggcccgaactgggctctgagggcctggggtcagccgctcacggctcccagcctgacctccgacgaatcgtggagctgcctgcacctgccgacttcctcagtctgagcagtgagaccaagcccaagttgatgacacctgacgccttcatgacacctagcgcctccttgcagcagatcactgcctctcccagcagcagcagcagcggtagcagcagcagcagcagcagtagcagcagctcccttacagctgtgtctgccatgagcagcacctcagctgtggacccctccttgaccaggccacctgaggagctgaccttgagccccaagctgcagctggatggcagcctgacaatgagcagcagtggcagccttcaggcaagcccgcgtggcctcctgcctggcctgctcccagccccagctgacaaactgactcccaaggggccgggccaggtgcctactgccacctctgcactgtccctggagctgcaggaagtggagcccctggggctaccccaagcctcccctagccgcactcgttcccctgatgtcatctcctcagcttccactgccctgtcccaggacatccctgagattgcatctgaggccctgtcccgtggttttggctcctctgcaccagagggccttgagccagacagtatggcttcagccgcctcggcactgcacctgctgtccccacggccccggccagggcccgagctcggcccccagctcgggcttgatggaggccctggggatggagatcggcataataccccctccctcctggaggcagccttgacccaggaggcctcgactcctgacagtcaggtttggcccacagcacctgacattactcgtgagacctgcagcaccctggcagaaagccccaggaatggccttcaggaaaagcacaagagcctggccttccaccgaccaccatatcacctgctgcagcaacgtgacagccaggatgccagtgctgagcaaagtgaccatgatgatgaggtggccagccttgcctctgcttcaggaggctttggcaccaaagttcctgctccacggctgcctgccaaggactggaagaccaagggatcccctcgaacctcacccaagctcaagaggaaaagcaagaaggatgatggggatgcagccatgggatcccggctcacagagcaccaggtggcagagccccctgaggactggccagcactaatttggcaacagcagagagagctggcagagctgcggcacagccaggaagagctgctgcagcgtctgtgtacccaactcgaaggcctgcagagcacagtcacaggccacgtagaacgtgcccttgagactcggcacgagcaggaacagcggcggctggagcgagcactggctgaggggcagcagcggggagggcagctgcaggagcagctgacacaacagttgtcccaagcactgtcgtcagctgtagctgggcggctagagcgcagcatacgggatgagatcaagaagacagtccctccatgtgtctcaaggagtctggagcctatggcaggccaactgagcaactcagtggctaccaagctcacagctgtggagggcagcatgaaagagaacatctccaagctgctcaagtccaagaacttgactgatgccatcgcccgagcagctgcagacacattacaagggccgatgcaggctgcctaccgggaagccttccagagtgtggtgctgccggcctttgagaagagctgccaggccatgttccagcaaatcaatgatagcttccggctggggacacaggaatacttgcagcagctagaaagccacatgaagagccggaaggcacgggaacaggaggccagggagcctgtgctagcccagctgcggggcctggtcagcacactgcagagtgccactgagcagatggcagccaccgtggccggcagtgttcgtgctgaggtgcagcaccagctgcatgtggctgtgggcagcctgcaggagtccattttagcacaggtacagcgcatcgttaagggtgaggtgagtgtggcgctcaaggagcagcaggccgccgtcacctccagcatcatgcaggccatgcgctcagctgctggcacacctgtcccctctgcccaccttgactgccaggcccagcaagcccatatcctgcagctgctgcagcagggccacctcaatcaggccttccagcaggcgctgacagctgctgacctgaacctggtgctgtatgtgtgtgaaactgtggacccagcccaggtttttgggcagccaccctgcccgctctcccagcctgtgctcctttccctcatccagcagctggcatctgaccttggcactcgaactgacctcaagctcagctacctggaagaggccgtgatgcacctggaccacagtgaccccatcactcgggaccacatgggctccgttatggcccaggtgcgccaaaagctttttcagttcctgcaggctgagccacacaactcacttggcaaagcagctcggcgtctcagcctcatgctgcatggcctcgtgacccccagcctcccttagctgctaagcctgccttgcccaggggtgggatggcactgaaggccagcagacaggcctaggctggggcagggtcacggctggcctttacctgctcaggcccccatctctggggtgtttgggggtcagggagcagggagcactggccgtggtctacagcgtgtggtagtcagaaggtttagctgggcccagggcaggtattgcgcctgcttgggttctgccatgcctggagcatgaccctgagatcgtgacaccacttgagtggaattttccatgttcctttttacctctaatttggatctttttgtttttgaaaaacattgagaaattcaattaaatgcttttggaataaaatgga

SEQ ID NO: 1453 - DNA, 613 bp, Homo sapiens
  source 1..613: mol_type = genomic DNA
atggcggccccaacggccgtccaggacgtggagcgaaatgagctcgggcgctgacggcggcggtggcgctgcggtggcggcgcggtcggacaagggcagtcccggggaggacggtttcgtcccgtcggcgctggggacccgcgagcattgggatgctgtctatgagagagaactgcaaactttccgagaatatggagatacaggtgaaatctggtttggagaagagagtatgaatcgactaataaggtggatgcagaaacacaagattccactggatgcttcagtgcttgatattggaactggaaatggtgttttcctggttgaacttgcaaaatttggtttctctaatattactggaattgattactctccttctgcaattcagctttctggaagtattatagaaaaagaaggtttatctaacattaagttaaaggtagaagactttttgaatctctccacacagctgtctggatttcatatttgtattgacaaagggacttttgatgccataagccttaatcctgacaatgcaattgagaagaggaagcaatatgtgaaatctctctccagggtgttgaaagtaaaaggcttttttaataacgtcatgtaa

SEQ ID NO: 1454 - DNA, 7673 bp, Homo sapiens
  source 1..7673: mol_type = genomic DNA
gcgggtcgttagctgtcagagccaagcggcgggctggcggcgggctccgacgtctgcgccaggacctggctggctgagcccggcgcagcagcagcagccagggcagcgcggcccctactccctgtcaggtcgtagaggcgagcagggaccagctggtcgccggcccctcgggcaagatggggaaccgggagatggaggagctgatcccgctggtgaaccgtctgcaggacgcgttttcggcgctgggacagagctgcctgctggagctgccgcagatcgccgtggtgggcggccagagcgccggcaagagctcggtgctcgagaacttcgtgggcagggactttctccctcgagggtcgggcattgtaacaagacgacctcttgtgctgcagcttgttacttctaaagcagaatatgccgagtttctacattgcaaaggaaagaaatttacagattttgatgaagttcgccttgagattgaagcagaaacagatcgcgtgactggaatgaataaaggcatttcctccatacccattaatttacgagtctattccccacacgtgttaaatctaacccttattgatctacctggaataactaaagtgcctgtgggagatcagccaccagatatcgagtatcagatcagagaaatgattatgcagttcatcacgagggagaactgtctgattttagctgttactccagccaacactgatcttgcaaactcagatgcgctgaagctagctaaagaagttgatcctcaaggtctgagaaccattggagttatcaccaaactggaccttatggatgaaggaacggatgccagggatgttctagagaacaaactgttgcctcttcgcaggggttacgtgggggtggtaaacagaagccagaaggacatagatgggaagaaggacataaaggcagccatgctggcagagaggaagtttttcctttcccacccggcttacagacatatcgctgaccgaatgggaaccccacacctgcagaaggtccttaatcagcaacttaccaaccacattcgggataccctaccaaacttcaggaacaaactacagggacagttgctctccatagaacatgaagtagaagcctacaaaaatttcaaaccagaagacccaacaaggaagaccaaagcattgctgcagatggttcagcaatttgctgtggactttgagaagagaattgaagggtcaggggatcaagtagataccctggaactctcaggtggtgctaaaatcaatcgtatttttcatgaacgctttccttttgagatagtaaagatggagttcaatgagaaagaattgcgaagagaaataagctatgcaatcaaaaacatacatggtatcaggacagggttgtttactccagacatggcatttgaagcgatagtcaagaaacagattgtaaagttgaaagggccttccttgaagagtgtggatctggtaatacaagaattaatcaacactgtgaagaagtgtaccaaaaaactggcaaacttccccagactctgcgaggaaacggaaaggattgttgctaaccacattcgtgagcgagaagggaagacaaaggaccaggtattgctattgattgacattcaagtctcttacatcaacaccaaccatgaagacttcattggcttcgcaaatgctcagcagaggagcagtcaggttcacaagaaaaccacagttggaaatcagggaaccaatcttccgccttcaaggcaaattgtgattcgcaaggggtggctcaccatcagcaacattggcatcatgaaaggcggctcgaagggatactggttcgtccttactgcggaaagcttgtcctggtataaagatgatgaggaaaaagaaaagaagtacatgcttcccttggacaacctgaaagttcgggatgtggaaaagagctttatgtctagcaagcacatctttgcactctttaatacagagcaaaggaatgtatacaaagactatcgcttccttgagctggcatgtgattcccaggaggatgtcgacagctggaaggcatctctactaagagctggggtctatcctgacaaatctgtaatgaacaaaaaagctgaaaatgatgagaatggacaagcagaaaacttttccatggacccacaattggagaggcaagtggagaccattcgcaacctcgtagactcctacatgtccattatcaacaaatgtatccgagatctaattccaaaaacaataatgcaccttatgatcaataacgttaaagatttcataaattccgagctcctagcacagttgtattcttcagaggaccaaaataccctgatggaggaatctgctgagcaggctcagcgccgggatgagatgcttcgaatgtatcaagcactgaaagaagcccttgggataattggggacatcagcacagccaccgtgtccactccggcaccccctccagtggatgactcctggatacagcactctcgcaggtcacctcctccaagccccacaacccaaaggaggccaacactaagtgctcccctcgcaaggcccacatccggccgaggaccagctcctgccattccctctcctggcccccactctggggctcctccagtcccattccgtccaggcccattacctcctttccccagcagcagtgactccttcggagcccctccacaagttccatctaggcctacgagggccccgcccagtgtcccaagccggagaccacccccatcaccaactcgtcccactataatccgcccactagaatcctccctgttagactaaacgaagtgtctggcatggcaattaatcactaatgaattatgcgaaagcaacatatttgataaccgttgcagtaaatcatgagtagtcgcatgtgtggacatcagtaggcaagtaaccagttttactaatgcattcatcgctcatcttcattgctcatggtatgtcaaacctttggggtttgactcagaaactgctaaccttttagaggctttatatgttgtactgaccaaggtaggtttgtatagcagccctatactttggggatcatttgcctaccatggcatatatttgaaattgctttggacaagttttctaggctatctaccaggtagctcattaaacgtaattcttcagatatgagatagtgggcttagacctaagccatacatatttcttttcccacattctgtttaggatgacagtaattctgttgtctaccattaatgctactacctactccataattgcctatttagctcctcttttcttcctttttatttcataagactgctaggaagtgattttttaaaattaggactccttaagaataaacttttccagaagcacgaggtagtttgcaaaggaaaagtctgcactgtttgctctaaagagcttctcctcattccaatgtgttttgcttcatgctagaagcatatgcaacagtgaataaaagcttctttttttgttaatcagtcaataaatttggctaattagtttcagagttcaaggaagaagcaaaatatcacatctctagaagtgttgggaaaaatataatttctttctttacttatattcacctcatggtaggttatattgaaggctgacatggagaatgtttacttttctatttggcatagctaactacactttgatactaactccagttttactattattattttggttggaaaaaaaattcactctttacgtgctaatttgtaatcttgttttgtaagaatttatcctacccttgaaacaggctcagtgtaactgtatatccattctaggctttcttaataaatcttgaggctatgggataatcacatttaaagaatggttcctgaaatgaagtcagtagaaatggcatgggataagagcagagctcacacttttacagttgcagtatttcaaagtccctatccaggtcactccagaaaagggtattgaaacgttgaaatctaaagcaaatttgcaatttcttaagatttctaaaatttaccagaacagtttagcctgggggttaatagttaagtcttgaggctaagttttggactaccaaggaccagatgattcacatgtaggaaacagccagaagccaactggaattttgtgtgctaactgttcccagacagcagagcaagtattcactgagtaggggtgtcccatgacactatttcatattctacagaagtaaatcaggtttcaccaactgaaatgtctccctttgaaagtagcaaacatgatttgtatgttaacttaactttaatttcctgtgtagtttacacccagagcagatactcataaagtataaagtaaaaacttttaaccattattaaacagagaacttgccatgttgagtgccattgtattgaacttattctaaaggcttatgctaacccatttataattggtaaaaatcagaaaatacaagatttacataaaggtcatttcaacttttaaggttaccagtgattgtataaaaacatcacaatcctaaatcctctcgtatctcaccccaaaccccaaactgggggaaaaaaagttaactctttgtgaatggaaccaatgtgcaagatacatactgcatttttaaaatagtgtctcagctaaatggaaaactgttaagcaaacatccatagtaaaacaaataatcttcagtgagatctttttataaaacttcttgtttttaggattccctttgcttcttcctttgaattctctaaaataggcagctaacggattatatacttcagggtttggctttgtgctaaatgtggttttgtgttttgctgtatttcaaaattttccttctgttaaaggaaaatattgtgaataaccactggtgtgttcttagatcagcacaaaccatgtcaaaaaaaattggagatttttttccaattttccttccactgatcttaggcagtaataaacaatggcatttgtcatctttggcacttgcttttagattatagtcccacagttgcactgccccaattgtctacctttgtgggtacatttttgttctttactcctaagttatttctcatagaacccagcctactctagaatttcagcagtgacattggagaatatttttaatttgctgcagtactatgtcatattattagtatgaatctcatttcccaaagggtttgtattctgctaaaaggagatgccaatgttgaatgaagtctgaaactctagtatgtgcatagtttgacgtgcagcatgcacaccaggccttaagatgggaatgtagcttaatgattttctgtttcccataccatttctaatcttttgtgtaattttctcttaactgattgctctgatattgtaaacacaatagatgtagctctatcatgtctagcataatttaaaaaatcagtgtttttaggatttgggaaaataaactgtaaatgtttatttgataggtaaatatagttttattgtcacatgctaaatattgcatgcatattgactaattggaataaccatttactcaattatggacagcttattgaaatagtattgatttagaaaaagtatattgcatttctaaaaaacatctaccaaggttactcgtctgaatattgcttttagccgtgttttataacatagacgagcagtagggtctgtttattagcaaatttcctatttgttccaatacaaactcactttattctaaagtatattaatgaaaccagttcctgtgatgtaactgtaagccttctcgacttagacttaaaaagtggtcacatagattaattttgtgactttttagtatagactgtagccataattctcaaatatgaaatgggacctaataccagtatgtgataaatgttgatgttttctgtgtacaaacacattttctatgcatgtgtctctgtgtatatggcatatacctagtaagtatgtttctgtaagtatgtgtattttatgtccatttgagtaggtaggtaggttttaaaaatactagttaaaatgccacaagcatgagtgtgattgtatgtgcactgtgtgtatatatataaatatatgtatatgtatggttgtaaatatctatgtatacatgtacttagtatgtgtggtatcaggatattttttaaactgtgataatacaacagatagctttgaatgatctgccataacatgtggtaacaatagttcatttctcataacatatatgaggtatacaaaattttctaactccagattgtagtcattttgagaggtacaaagctcataattaccatgacaacatggtaatgtccatagacatttgtatctgaatccacaagaagatctgaatctaagaaggaattacctttgacaatatttttcggtaagaagtaaaacctctggagacctatctttaagatctctaattggaattataaattatttttggattgctgagctgaatcttaaaaagccaagttgatatacatagtcatttttcctctatggtagaagtaaaaaaaaaaaaaaaggacatagcaacattaaagtagtggatttttctgagtaaatttgctgaaaatataagagagaagctatctaataccttggaggtaggtcatccactttttcaggtaaacatttttcatttggcaaatggcataattatttgaaagtgacaggaatctcctcagaatgaagaataaagcctactaggtctctaactgttgaactcatgaaagaagatagtgtatgagacttaagccatgagttttgtatcatttcaattagaagactactagctgtgagctcagagtttaatgtaaatgaatctagatgattttgaagaaatgattattcgttcaccagatcactcattgtacattctaaaaagctcaaatgagtcttctagatactcttactcatcctgtctggttgctatgtttaaaattatgtggtgctgtgtaggtgaaactttaagaatatttttgaagcatatgtaatatatgcactgctatttgtgtgtgtgtgtgtgtctttgtatatatgtaagaatgtgtgtatgtgtgagagcaagagagaggaaactcaaagaggagtgtttgtcttaagacctgttcatactggtatattggtgagacttctcacttctggttggaggtttcacatatggctcaactcaagtcattaatctctttttaatttttactcttgaattccttaaacttcgctcattatgaaatgttttaaaattatgacaaaaattactctgtctaaccacttgccttgtctgctaccagtttgttaaaaattattccccccaaccagtaattccaccagtactacttgatttgtgttatatttcctatgtacatgtacagcctttgttttgcttgcttgtctatttttactttcccttttttgggtcaaatttttcttttgctttgtttgaagaaggaatatacagaagtaaaatcttgtcttctctgctgattctttaattaatatgagccggatactttccactgtcttcttggcactttcaggatttcttaatgctgatatatggactcttagaatggaatttttgaagaaaaatctcaaagcctgtatcgttcttgaaggtcacatgtacctattgtgaaaatgtgaagctgtatttctgaagctgaaataaattataacatttgaagg

SEQ ID NO: 1455 - DNA, 6379 bp, Homo sapiens
  source 1..6379: mol_type = genomic DNA
gccacagggacagccggtgggctcggtggggctgcagaaggtcggggctgcactgctctcggcccccacacggttggttggttggcgtggtaagtgccctgatccctggtcctgagaactcaggctggcacagggattcccagggcatctaccaccacgcagctggagcagggctgagcccaggagcatggagatggacgcccccaggccccccagtcttgctgtccctggagcagcatcgaggcccgggagggctgccatcagcagcagtgagccatcacctctgctggccacattgtgttttttctcctagaactgtggacaacggaaggctgagccccatccattgagttcctggggccccactggaggggctgctgtggccagggtgcacggtcacaaatgaagacaccaaggcgcagagaggtgactcagcctgccctcagtcacctatctgctcctggaggtgatccccgactccatgaggaagcaagaggtgcggacgggcagggaggccggccagggccacggtacgggctccccagccgagcaggtgaaagccctcatggatctgctggctgggaagggcagtcaaggctcccaggccccgcaggccctggataggacaccggatgccccgctggggccctgcagcaatgactcaaggatacagaggcaccgcaaggccctgctgagcaaggtgggaggtggcccggagctgggcggaccctggcacaggctggcctccctcctgctggtggagggcctgacggacctgcagctgagggaacacgacttcacacaggtggaggccacccgcgggggcgggcaccccgccaggaccgtcgccctggaccggctcttcctgcctctctcccgggtgtctgtcccaccccgggtctccatcactatcggggtggccggcatgggcaagaccaccctggtgaggcacttcgtccgcctctgggcccatgggcaggtcggcaaggacttctcgctggtgctgcctctgaccttccgggatctcaacacccacgagaagctgtgtgccgaccgactcatctgctcggtcttcccgcacgtcggggagcccagcctggcggtggcagtcccagccagggccctcctgatcctggacggcttggatgagtgcaggacgcctctggacttctccaacaccgtggcctgcacggacccaaagaaggagatcccggtggaccacctgatcaccaacatcatccgtggcaacctctttccggaagtttccatctggatcacctcccgtcccagtgcatctggccagatcccagggggcctggtggaccggatgacggagatccggggctttaacgaggaggagatcaaggtgtgtttggagcagatgttccccgaggaccaggcccttctgggctggatgctgagccaagtgcaggctgacagggccctgtacctgatgtgcaccgtcccagccttctgcaggctcacggggatggcgctaggccacctgtggcgcagcaggacggggccccaggatgcagagctgtggcccccgaggaccctgtgcgagctctactcatggtactttaggatggccctcagcggggaggggcaggagaagggcaaggcaagccctcgcatcgagcaggtggcccatggtggccgcaagatggtggggacattgggccgtctggccttccatgggctgctcaagaagaaatacgtgttttacgagcaagacatgaaggcgtttggtgtagacctcgctctgctgcagggcgccccgtgcagctgcttcctgcagagagaggagacgttggcatcgtcagtggcctactgcttcacccacctgtccctgcaggagtttgtggcagccgcgtattactatggcgcatccaggagggccatcttcgacctcttcactgagagcggcgtatcctggcccaggctgggcttcctcacgcatttcaggagcgcagcccagcgggccatgcaggcagaggacgggaggctggacgtgttcctgcgcttcctctccggcctcttgtctccgagggtcaatgccctcctggccggctccctgctggcccaaggcgagcaccaggcctaccggacccaggtggctgagctcctgcagggctgcctgcgccccgatgccgcagtctgtgcacgggccatcaacgtgttgcactgcctgcatgagctgcagcacaccgagctggcccgcagcgtggaggaggccatggagagcggggccctggccaggctgactggtcccgcgcaccgcgctgccctggcctacctcctgcaggtgtccgacgcctgtgcccaggaggccaacctgtccctgagcctcagccagggcgtccttcagagcctgctgccccagctgctctactgccggaagctcaggctggacaccaaccagttccaggaccccgtgatggagctgctgggcagcgtgctgagtgggaaggactgtcgcattcagaagatcagcttggcggagaaccagatcagtaacaaaggggccaaagctctggccagatccctcttggtcaacagaagtctgacctctctggacctccgcggtaactccattggaccacaaggggccaaggcgctggcagacgctttgaagatcaaccgcaccctgacctccctgagcctccagggcaacaccgttagggatgatggtgccaggtccatggctgaggccttggcctccaaccggaccctctccatgctgcacctgcagaagaacagcatcgggcccatgggagcccagcggatggcagatttgaagcagaacaggagtctgaaagagctcatgttctccagtaatagtattggtgatggaggtgccaaggccctggctgaggccctgaaggtgaaccagggcctggagagcctggacctgcagagcaattccatcagtgacgcaggagtggcagcactgatgggggccctctgcaccaaccagaccctcctcagcctcagccttcgagaaaactccatcagtcccgagggagcccaggccatcgctcatgccctctgcgccaacagcaccctgaagaacctggacctgcagtggaacttcatccaggccggcgctgcccaggccctgggacaagcactacagctcaacaggagcctcaccagcttagatttacaggagaacgccatcggggatgacggagcgtgtgcggtggcccgtgcactgaaggtcaacacagccctcactgctctctatctccaggtggcctcaattggtgcttcaggcgcccaggtgctaggggaagccttggctgtgaacagaaccttggagattctcgacttaagaggaaatgccattggggtggctggagccaaagccctggcaaatgctctgaaggtaaactcaagtctccggagactcaatcttcaagagaattctctggggatggacggggcgatatgcattgccacagcactgtctggaaaccacaggctccagcatatcaatctccagggaaaccacattggggactccggggccaggatgatctcagaggccatcaagacaaatgctcccacgtgcactgttgaaatgtgatcctggtggacggatcaggagaatgggcagatgctcagctggaagcttttgaacagaaaggccgacttctggggggcctgtctgggagctgggaacgctgcttgctcagcacgagagccgggctctgcagggaggaaggagaggtgctgccggaggaggtcgtgagctcctcttctgctgcaggagtggtccaggcagggggtgacgggtactctgttatggcacagagaagggaggggccacccccaagggactaggggccaaaggcctgaaagctgagcagtacaggaggctggttccagctttacaccctgaggacttcatgtgtccccaacctttaaaaatgtttattactgcccctttccactcacctggttaaaaatcatcccatgctctgagatgagctgccacctcaagcccgtgaggagcatccgtttggtaggggtaacagaggggacccttctttatcttctcaagaagaagatttcagggtatcatccttacagacatgaaaaagctatgggaaaattgtgaagataaatgaaagttttaattctaggattctggaaacagagacagtaagagttctccaaggattttgccttttttgtttgtttttgagatggagtctcgctcttgtcgcccaggctggagtgcagtggcacgatctcagctccctgcaacctccgcctcccgggttcatgtgattctcctgcctcagcctccccagtagctgggaatacaggcacccgccaccatgcccggctaatttttgtagttttagtagagacggggtttcatcatgttggccaggctggtctcgaactcctgacctcaggtgatccatcagcctgggcctcccaaagtactgggattacaggcatgagccaccacacctggccccattttttatttattacaaaatcaaagacatgggtgatgcctggcacatgttgtctggagtctggcacactggttatcaatagcacattcagtgtattcagtgatgtcattctttatttatttttgagacagaatctgtcacccaggctggagtgcagtggcatgatctcagctcactgtaggctctacctcatgggttccagtgattctcctgcctcggcctcccaagtagttgggtctacaggcacgcaccaccacacccagctaatttttgtatttttagtagagatggggtttcaccatgttgatcaggctggtctttaactcctgacctcaagtgatccacccacctcagcctcccaaagtgctgggattacaggtgtgagccactgcacctggcagtgatgtcattccttactaggcttccaaagccactgctgtggccacagcttccatggagacaggcaagctgagcctctatgtggcaccaattcctgcagctgtttgtgttggagggaaaaaaatccaaatggacatcaacagctttcatcaactaaataaccacagaaaatatttatgaagactataaagcaatgattacttttgaattggaaaggaatcactattatttgaaatgtttcttcaaaagtgagcatccggacaggaaccatcatggatgctgaggccatggatgaaggcctactcgggaagatgatatccttgcagtctcaaaacggcaccccacaaaggtgatatcctaatttacaaagggaaaaaggtaccttaatctgaaatctggcaaatgcagcctcaacagaagtgacagaattgaacatcgccaataatgggacacacagacatcacatgcccccagtctgatgcaccacggagtcgtctctgatgtattcttgtcaaaaaatgtttgcctgattctaatcatgaaagaacaattagaaaaaatccaaattgacagatattctgcagaataaatggcctgacctcatcaaaaacatcaatgtcatgaaaaacacaaaacattgcagatagcgtgaaattaaagattacagagatataatttaatgcaagatctctgactggatcctagactgcaggaaaaagtctgctataaagaacatttggatcacttgtagtagctgggaaataaaacaaaacattatttgtaaaaggggggaaatctgaacatgggtcttgcagtatttatgacagtttttgcggggcagagatttctagattgacagctgttttagtactttcaaggtgatgctctgtctgctggtttgcattgtttctgtctgagttaagagactggcagaacacagagttgcagtagccaaacactggagaaagctgggccctacagaaacctaacgctgaagaaacctcaggagccaaactggtggagaaaacaaagagtcctccctctctcccttttcaaataatgatcatacatcttcaagctgtctgaaatggttaaggagttcagtctgtcgtcaggcacacaccagagccagctagcccacacagaccccatcagagcaaaacagacaagagaatttaattcatatccacatagaaaggacttctaggtaggaggtagaccctttagctcccttccaattaaaggagtccccaattctggcacctgagagtcccctgggtctaacagctatgatatttatgtagtgtgttgcttacctaaatgaatacaatttccttccagacacgtgacactgatattaaagtgctaatgagagggatctatttcttcttgtacgctaaaagagaaacagcagttcagatttcccatcagaagtccgaggactttgttcttgataactactaccaataaaaattgagtatttg

SEQ ID NO: 1456 - DNA, 4030 bp, Homo sapiens
  source 1..4030: mol_type = genomic DNA
ggagcgcgtgcccgtgcgccgccgccgccattttggagcgatcggagtgccgcccgcggccccgagtcggtctcgagccgccggccggccgtgccggtgtccgtaggcgctgcgccctcggccgggcccatgtgtgtgcggcccgcccgaggccgcccgggctttgcctccaccagcgccctggcctccgctcgggcctccacacgggcctccgaagagctgccgcgacgcccggcccgcagggcaggtaaagagattataaatcttccactgaatgaaaaaaattttcttaaagctgcatatactccaagaaaaaaaccacaaatgtttttctgttttgcctgaatacatgatttaaacaagagatttccacagaagctctgcggccgtcacgatgttctggaagtttgacttgaacaccacgtcccatgttgacaagctgctggacaaggagcatgtgacgctgcaggagttaatggatgaagatgacatcttgcaggagtgtaaggctcagaaccagaagctgctggacttcctgtgcaggcagcagtgcatggaggagctggtgagcctcatcacacaggatccgcccctggacatggaggagaaggtccgcttcaaatatccaaacacagcctgtgagcttctgacttgtgatgtgccgcagatcagcgaccgcctcggtggggacgagagcctgctgagcctcctgtacgacttcttggaccatgagccgcctctcaatcctctgctcgccagttttttcagcaagaccattggcaatctcattgcaagaaaaaccgaacaggtgattacgtttttgaagaagaaggacaagttcatcagcctggtgttgaagcacatcggcacctcagcgcttatggacctgctgctgcgcctggtcagctgtgtggagccagccgggctccggcaggacgtcctgcactggctgaatgaagagaaggtcatccagaggcttgtggagttgatccacccgagccaggatgaagataggcagtcaaatgcttctcagactctctgtgacatagttaggctgggcagagaccagggcagtcagctgcaagaggctctggagccagacccgctcctcacagcgctggagtcgcaggactgtgtggagcagcttctgaagaacatgtttgatggagaccggacggagagctgcctcgtcagtgggactcaggtgttactcaccttgctggaaaccaggcgggttgggacagagggcttggtggactccttttctcagggactggaaaggtcatacgctgtcagcagcagcgtactacacggcatcgagcctcggctgaaggacttccaccagctcctgctcaacccgcccaagaagaaagcgatcctgaccaccattggtgtgctggaggagcccctggggaatgcccgtctgcatggcgcccgcctcatggcagcactgctgcacacaaacacacccagcatcaaccaggagctctgccggctcaacacgatggacttactgctggacttgttctttaagtacacctggaataactttttgcacttccaagtggaactatgcatagccgctattctctcccacgctgcccgtgaggagaggacagaagccagcggatccgagagcagggtggagcctccgcatgagaacgggaaccggagcctggagactccccagccggccgccagcctccctgacaacacaatggtgacccacctgttccagaagtgctgcctggtgcagaggatcctggaggcctgggaagccaacgaccacacgcaggcagcgggtggcatgagacgtgggaacatgggccacctcacacggatcgccaacgcggtggtgcagaacctggagcggggccctgtgcagacgcacatcagcgaggtcatccgagggctccctgcggactgccgtggccgctgggagagcttcgtggaggagacgctgacggagacgaaccgcaggaacactgtggacctggccttctctgactaccagatccagcagatgacagccaacttcgtggatcagtttggcttcaatgatgaggagtttgccgaccaggacgacaacatcaatgccccgtttgacaggatcgcagagatcaacttcaacatcgacgctgacgaggacagtcccagcgcagctctgtttgaggcctgctgcagtgaccgcatccagccctttgatgatgatgaggacgaggacatctgggaggacagtgacactcgctgtgctgcccgggtgatggccagacccaggtttggagccccccatgcttcagagagttgctcaaagaatggcccagagcgtggaggccaggatgggaaggcgagcttggaagcacacagagatgcacctggggcaggtgccccaccggcccccgggaagaaggaagcgccccctgtggagggtgactcagaagcaggcgccatgtggacggcagtgtttgatgagccagcgaactcaacgcccacagccccaggagtggtgagggacgtgggttccagtgtgtgggcagctggcacctcagctccagaggagaaaggctgggccaagttcactgacttccaacctttctgctgctccgagtcagggcccaggtgcagctctccggtggacacagaatgcagccatgctgagggcagccggagccaaggccctgagaaagccttcagcccggcttctccatgtgcctggaacgtgtgtgtcaccaggaaggcccccctgctggcctctgacagtagctcctctgggggctcccacagcgaggatggcgaccagaaggcagcgagtgccatggatgcggtgagcaggggtcccggccgggaggcccccccgctgcccacagtggccaggacagaggaggctgtcggcagggtcgggtgtgctgacagccggctgttaagccctgcctgccccgcgccaaaggaagtgactgctgccccagccgtggctgtgccccccgaggctactgtggccatcaccacagcactgagcaaggctggccccgccatacccaccccagcagtctcttctgcactggccgtggcggtccccctagggcccatcatggcagtcacagcagccccagccatggtggccaccctggggacagtgacaaaggacggacagatgccccgccagaaggagctgccttaaatggcccagtgtgatgctgctgccgcccggccacggcccaccctggtcaggctgcctccttaatcgagaaaactacctggtgatgcaatcttttttttttttaatttaatttaattttaaaataaatgctgcattggtaaagctggcagttgaaaccagttggacggcccagcttgcgtctcttctgcctgagtgggcctctcaggtcactcgtgccctgctggaggacagaggggcacctcagccgcccccaagcccagagcacagcaataaggtcggcctgcaggagccggggtgggggtgggggtggggggggcaggaccctgagatgccaccaggacctgatgggccaggaagggcgtggacatggaggctgtttttacagttttttttttgttgttgttttgtttttaaagaatacagaaggagccaagcttttttgcactttgtatccagctgcaagctcagggcagagtcaagggcctgggttggaaaaacctgactcacaggaatgcataattgacccttgcagctacccaatagcccttggagctggcactgaaccaggctgcaagatttgactgccttaaaaacacaaggccctctaggcctggcagggatgtccctgtgcccagcacagggtgcctggcagggggagaccacaggtatgcaggtggggggacatggtgtggcactaggggctcgaagactggtttctagcactaccggtcacggccatgtcgtcctagaagggtccagaagattattttacgttgagtccatttttaatgttctgatcacctgacagggcaccccaaacccccaactcccaataaaagccgtgacgttcgg

SEQ ID NO: 1457 - DNA, 2690 bp, Homo sapiens
  source 1..2690: mol_type = genomic DNA
gtagggtgggggtgctggcggcggctgctttggcggcggttggtggccgtgcgggcggggagggagggggaggagagaagaggaggtggagaaggcttgggctcgcgccgctgaagtcggcttacccgctggccgcctcctgacaagcgggagggatccgcggtggacccagggaagcggaggagcctggcggccaccccctcttcctcacttccctgtactctcatcgctctcggcctccgacacgttccaagatgagatgggattctccaacatggaagatgatggcccagaagaggaggagcgtgtggctgagcctcaagctaactttaacacccctcaagctctacggtttgaggaactactggccaacctactaaatgaacaacatcagatagcgaaggaactatttgaacagctgaagatgaagaaaccttcagccaaacagcagaaggaggtagagaaggttaaaccccagtgtaaggaagttcatcagaccctgattctggacccagcacaaaggaagagactccagcagcagatgcagcagcatgttcagctcttgacacaaatccaccttcttgccacctgcaaccccaatctcaatccggaggccagtagcaccaggatatgtcttaaagagctgggaacctttgctcaaagctccatcgcccttcaccatcagtacaaccccaagtttcagaccctgttccaaccctgtaacttgatgggagctatgcagctgattgaagacttcagcacacatgtcagcattgactgcagccctcataaaactgtcaagaagactgccaatgaatttccctgtttgccaaagcaagtggcttggatcctggccacaagcaaggttttcatgtatccagagttacttccagtgtgttccctgaaggcaaagaatccccaggataagatcctcttcaccaaggctgaggacaatttgttagctttaggactgaagcattttgaagggactgagtttcttaaccctctaatcagcaagtaccttctaacctgcaagactgcccgccaactgacagtgagaatcaagaacctcaacatgaacagagctcctgacaacatcattaaattttataagaagaccaaacagctgccagtcctaggaaaatgctgtgaagagatccagccacatcagtggaagccacctatagagagagaagaacaccggctcccattctggttaaaggccagtctgccatccatccaggaagaactgcggcacatggctgatggtgctagagaggtaggaaatatgactggaaccactgagatcaactcagatcaaggcctagaaaaagacaactcagagttggggagtgaaactcggtacccactgctattgcctaagggtgtagtcctgaaactgaagccagttgccgaccgtttccccaagaaggcttggagacagaagcgttcatcagtcctgaaacccctccttatccaacccagcccctctctccagcccagcttcaaccctgggaaaacaccagcccaatcaactcattcagaagcccctccgagcaaaatggtgctccggattcctcacccaatacagccagccactgttttacagacagttccaggtgtccctccactgggggtcagtggaggtgagagttttgagtctcctgcagcactgcctgctatgccccctgaggccaggacaagcttccctctgtctgagtcccagactttgctctcttctgcccctgtgcccaaggtaatgatgccctcccctgcctcttccatgtttcgaaagccatatgtgagacggagaccctcaaaaagaaggggagccagggcctttcgctgtatcaaacctgcccctgttatccaccctgcatctgttatcttcactgttcctgctaccactgtgaagattgtgagccttggcggtggctgtaacatgatccagcctgtcaatgcggctgtggcccagagtccccagactattcccatcgccaccctcttggttaaccctacttccttcccctgtccattgaaccagccccttgtggcctcctctgtctcacccttaattgtttctggcaattctgtgaatcttcctataccatccacccctgaagataaggcccacatgaatgtggacattgcttgtgctgtggctgatggggaaaatgcctttcagggcctagaacccaaattagagccccaggaactatctcctctctctgctactgttttccccaaagtggaacatagcccagggcctccaccagtcgataaacagtgccaagaaggattgtcagagaacagtgcctatcgctggaccgttgtgaaaacagaggagggaaggcaagctctggagccgctccctcagggcatccaggagtctctaaacaactcttcccctggggatttagaggaagttgtcaagatggaacctgaagatgctacagaggaaatcagtggatttctttgagctaggagaataagagtctggagactgggagccttcacttcggcctccgattggtggcgcatagggtgtaaccaataggaaacccctaaagggtacttaaaccccagattttgcaactggggctcttgagcagcttgctttagcctgctcccactctgtggaatatacttttgcttcaataaatctgtgcttttattgcttcattgtttca

SEQ ID NO: 1458 - DNA, 5723 bp, Homo sapiens
  source 1..5723: mol_type = genomic DNA
cggcaagcaggtctaggaattcgcctggttcccacctcgcgtcccttgccttccttcctagtctacccactgtagtgccccctgcgtcccgctccctcctagccgactcagagcacaagaaggattgccacggtttccattgcagcagccgtggcgcctctgaccctttttttatatcgcggcgacggcgggctgtcgtcacgacgacgtgcggacgcagcggcgggggccttatgtggagaagtcgctgtgaagccacctataaatccatttactgaatttatggagaaggctgtaaatgatggaagtcattcagaagaactcttttgccatcttaaaactatatcagagaaagaagatttaccacggtgtaccagtgaaagtcatctcagctgcctgaagcaggacattctaaatgaaaagactgaattggaagcaacacttaaggaagcggagttggtaactcattctgtagaattgcttttgccactatttaaggacaccattgaaaagattaattttgaaaatgcgaatctttctgcattgaatttgaagatttctgaacagaaggaaatattaataaaagaattagacaccttcaaaagtgtaaaactagctttagaacatcttcttagaaagagagactacaaacaaacaggagacaatttatccagcatgttgctagaaaatctaactgataatgaaagtgaaaatactaatcttaagaagaaggtatttgaaaaggaggcccatatccaagaactttcttgtttgtttcagagtgaaaaggcaaatactttgaaagcaaaccgtttttcccaatcagtaaaagtagtacatgaacgactacagatccaaattcataaaagggaagccgagaacgataagttgaaagaatatgtaaagagcttagaaaccaagatagccaagtggaacctgcaatcaagaatgaataagaatgaggctatagtgatgaaagaagcaagtaggcaaaaaactgtagctttaaaaaaggcatctaaagtttacaaacaaaggcttgaccattttacaggagctattgaaaagcttacttcccaaattagagatcaggaagccaagttgtctgaaacaatttcagcttccaatgcctggaaaagtcattatgagaaaattgtgatagaaaaaaccgaattggaagtacagattgaaacaatgaaaaagcaaatcattaatcttttggaagatctgaagaaaatggaagaccatggaaaaaattcatgtgaagaaattcttagaaaagttcactcaattgaatatgaaaatgaaactctgaatcttgagaatacaaaattaaagcttagattcccatgtagaattactgagtcaaagaatatgaacattttgattgttcttgatatgctttgctacatttcttctgaaaagactacacttgctgctttgaaggatgaagttgtatctgttgaaaatgaactctcagaattgcaagaagtagaaaaaaaacagaaaacccttattgaaatgtataaaactcaggtacaaaagttgcaagaagcagctgaaatagtaaaaagcagatgtgaaaatttgctacataaaaataaccaaataacaaaaaccaaaaataaaaatgtagagaagatgagaggccagatggagtctcatctgaaggagttagagcgtgtctgcgattccttgacggcggcggaacggaggcttcacgagtgtcaggagagtctgcagtgctgcaaggggaagtgtgcagaccaggaacacaccattagggagcttcagggccaggttgatggaaatcacaatcttctgacaaagctttctctggaagaggaaaactgtcttattcagctgaagtgtgaaaaccttcaacaaaaattagaacagatggacgcagaaaataaagagcttgagaagaagctggcaaaccaagaagaatgtcttaagcacagcaatcttaagtttaaagagaaatctgcagagtatacagcattggccagacaactggaagctgctttagaagaaggaagacaaaaggttgctgaagaaatagagaaaatgtcatctagagagagtgctttacaaattaaaatattagatctggaaactgagcttagaaagaaaaatgaagaacaaaatcaacttgtttgcaaaatgaacagtgatccagagactccatgaaatctatttttttaattcccaagtgtctaaaaagttgaaaacctaaaagattcaagagttaaatgatttttggcatgcacaatttgattttattgccatcaaaagtttcatgacaacttagtcagaacaaaacgtcgatcacctttaatttagcacaggccttccatttatttctaaacttttttttaactcaccatttgactttctgatattgtaaaatgtgtgtgctgtttttttgtgtaattgaagcctctgaaaaaataaatgaggtgggttttgctgtaatgtccctagtacttggctaaagctagtaaaataaatagatcccattcacaattgccacaaagagaataaaatacctaggaatccaaattacaaggaatgtgaaggacctcttcaaggagaactacaaaccactgcttaaggaaataagagaggacacaaacaaatggaaaacattccatgcttatgaataagatgaaacaagatcatgaaaatggctatactccccaaagtaatttatagattcagtgctatccccatcaagctaccattgactttcttcacagaattagaaaaaactacttcaaatttcatatggaaccaaaaaagagctcacataaccaagacaatcctaagcaaaaagaacaaagctgtaggcatcacgctacctgacttcaaactatactacaaggctacagtaaccaaaatagcatggtactggtgccaaaacagatatatagaccaatggaacagaacagaggcctcagaaataactccacacatctacaaccatctgctgtttgacatacctgagaaaaacaagaaatggggaaaggattccctatttaataaatggtgttgggaaaactggctagccatatgcagaaaactgaaactggatcccttccttacaccttatacaaaaattaactcaagatggattaaagacttaagtgtaagacctaaaaccataaaaaccctagaggaaaacctaggcaataccattcaggacataggcatggacgaatacttcatgactaaaacaccaaaagtaatggcaataaaagccaagattgacaaatgggatctaattaaactaaagagcttctgcacagcaaaagaaactatcatcagagtgaacaggaaccgacagaatgggagaaaatttttgcaatctatccatctgacaaagggccaatatccagaatctacaaagaacttaaacaaatttacaagaaaaaaaaccccatcaaaaagtgtgcaaagaatatgaacagacacttctcaagagaagacatttagtcagccaaaaaacatatgaaaaaaagctcatcactggtcattcagagaaatgcaaatcaaaactacagtgagataccatgtcacaccaattagaatggtgatcattaaaaagacaggaaacaacagatgctggagaggatgtggagaaataggatgcttttacactgttggtgggagtgtaaattagttcaaccactgcggaagacagtgtggcgattcctcaaggatctagaaccagaaataccatttgacccagcaatcccattactgggtatatacccaaaggactataaatcatgctgctatagagacacatgcacacgtatatttattgtggcactattcacaatagcaaagacttggagccaacccaaatgcccatcaatgatagactgaataaagaaaatgtggcacatacaccatggaatactatgcagccataaaaaaggatgagttcatgtcctttgcagggacatggatgaagctggaaaccatcattctcagcaaactaacacaagaacagaaaaccaaacaccgcatgttctcactcataagtgggagttgaacaatgagaatacatggatacagggcagggaacatcacacaccagggcctgtcagggcgtggggggctaggggagggataacattagaaattcctaatgtagatgacgggttgatgagtgcagcaaaccaccatggcacgtgtatacctatgtaaccaacctgtacgttctgtacatgtatcccagaacttaaagtataataaaaattaaaaaaaataaagatctgatgttttgttaaacctgataagttttgtactagtaaaattctagaattctaagcatagatttaaacattgctgaaaaatgagtttgtgtgttttatgccttccaggggacagttaagtgggcagtatttatttaatatacctgcttcagccccatttgaattgtaagcactctgaaagcatgtctcatagtcgtctgtatccctggtgtctcccacagtgccctgcttacctgcaggcctttttgtattttctgtccaagtaccctaatagggtggtgcagaatggatgtacagatctgtggatgacctcagcagcttaatccaaggcacccctcgggaagcctgaaatgtctttgaagtcttatgtattatcctaaaatccattgacattttatattctaccctacaaaataagtatgtgttactatttttctttccaaattgttgagtaaaactcattgtattcatcctgtgactttgtactgcccagcctagctcattgttttttacctgcctcatttcctgagctgggcattgctcagtttcagaaggtatcaggtgtcattgaacacctgatatgaaggatgtaaaagttctctcttttctatctaggtgtctatattttaattggaggctagatgatatttgcaacctgtctttatctaaagcattgtcagtgaactcacctacttaggaattcatatgcaccttagttaaaaaaaatgtattgtggttttaaattttttcctcaaccagtgtaatatgaagaattctttttattttttaagagattctaagaaaatgttcacattatcaaaactagaattctatcaacttttaagacatttaattattttggaataaaatgtgaatttttagacagaaaatggcaaaaactagtatgaaaatatatcatgttacatgtgaaattatgacagttgttaacctattaagttaatcatgttaaatatgtaataatttggggctaaatgaatgtatattataaattatatcagtgaagatcaaccatgtgtgtgctttaattattaattttaaagagtgagctctaagaatgaacacatcagatgtgagtattattttaaaaaatcaaaaagaattatctagttattgtatatatgtttttaatattatgactctggtcctttggaatgaatgctattattgcttatctgtatttttttccttttttctttagaaagcacaacatcaggaagtgtgtttgaaagaagtacaaaatagtcttgagaagtcggaaaatcaaaatgagagtattaagaattatttacagtttcttaaaacttcttatgtaacaatgtttgaataaattgtcaaatttattttctctaagtagtagatttttattatgagtctaaaatgtgattgggtaaaaaaataaatatactaccagttaca

SEQ ID NO: 1459 - DNA, 1113 bp, Homo sapiens
  source 1..1113: mol_type = genomic DNA
ctcagcgaagatggcggcagtggagaagcggcggcaagcggtaccaccgccggccggtttcacggacagcggccgccagtcggtatcccgggcggcgggggcggccgagagcgaggaggacttcctgcggcaggtcggcgtgacggaaatgctacgtgcggccctgctgaaggtgctggaggcgcggcccgaggagccgatcgccttcctggctcactacttcgagaacatgggcctgcgctcgcctgtaaacggcggcgccggggagcccccgggccagctcctgctgcagcagcagcgcctgggccgcgcgctatggcaccttcgcctggcccaccactcccagagggccgccttcaacaacaacgtgagcgtggcctacgagtgcctgagcgccggcgggcgcaggaagaggccggggctggacgggcgcacctacagcgagctgctcaggcgcatctgccgggacggccaagcccccgaggaggtggtggcgccgctgctgcgcaaggtgcagtgccgtgaccacgaggcggtgccgctgagcgtcttccgcgcgggcacactcacctgcttcgtgctgctggagttcgtggcgcgcgccggcgcgctcttccagctgctggaggactcggccgccgccgtggccgaccgccgcgtgggccaggccgtgctggacaccctggagggcgcgctgcaggccagcgacgccgccgcgcccgcgcgcttcctggaggccggctcgcgcttggggcccgacagcctggcgctggcgctggaccgcgccgtcggggggcggcggcccagcgcgcccatgacccgcgaggagtttctggagagggccgccgcgctcttcatcgcgaaggtcaagccggtgggctgaggcccgtgggccgcgcggatccgggatctgcgctggggggtccccgcgtgcggggcgcgcggagccttcccttcgccctggtgaggccctgccataaccaggcgcccagccctgcggaggaggccggggctcccaggaagcggacgcccggtccccacacagcgccgcggccgcccctccacccccgcgggagcccctgccccacgctaataaaatgtgttgcgaggctg

SEQ ID NO: 1460 - DNA, 2691 bp, Homo sapiens
  source 1..2691: mol_type = genomic DNA
gttcgtgcgtggagcagtcggggctggaggcgaggccgccgggcgggcaggggttgtggcgcggcaagcggcgggccagcgacggcgcgaatggcggactctcagctgttctgtgtggcggaggaacgcagcggccactgcgccgtggtggacggaaacttcctctacgtgtgggggggctacgtgtctattgaagacaatgaagtatatttgcctaatgatgaaatttggacctatgatattgatagtgggttgtggagaatgcacctcatggaaggagaactcccagcctccatgtcaggaagctgtggtgcttgcattaatggaaagctgtacatttttggaggatatgatgacaaaggatacagcaatcgactttattttgttaatttacgaacaagagatgaaacctacatttgggagaaaatcaccgactttgaagggcaaccacctacaccacgtgataaactttcctgctgggtatataaagacagactaatatattttggtggttatgggtgtaggagacacagtgaactccaagactgttttgatgttcatgatgcatcttgggaagagcagatattctggggatggcataatgatgtccacatatttgacacaaagacacagacttggtttcaaccagaaattaaaggtggagttccaccacagccacgagccgcgcatacatgtgcagttcttggaaataagggttatatctttggcggacgtgttctgcaaactaggatgaatgatttgcactatctaaacctagacacctggacttggtctggaaggattactattaatggagaaagcccaaaacatcggtcatggcatactttaacacctatagctgatgataaacttttcctatgtggtggactaagtgcagataatatcccattaagtgatggttggattcataatgtcacaacaaattgttggaaacaacttacacatttacctaaaacaagacctaggttatggcacacagcctgtttgggaaaagaaaatgaaataatggtatttggtgggagcaaagatgacttacttgccttggatacaggtcactgtaatgatttattgatctttcaaacacagccttattcactactcaggtcatgccttgactgcattggtaaaaattctatcatgttagaaagtcagatatctttattacctcctaaacttctgcaacaagtactcaaaaaaataacattttgggctgcagctaatcaccgagaagaacaaagagtccaaaaagaagaaacagaaaataaatatcagtggatcagtagcaattaaattgttatatactttacatatttagtatgttttaactttttaatcagactatacatttacactcccaaattgcaggctttatttaaaggataaaatttaaaggataaaaaaacagtcactctgttaagtgactatatgccatgggatatatggaaaaaagatattaatgcagattaatttatatttgtaaacaaatttccttacaaactgcagaacaaatattctttctgaaagtaagtacagttataacagattttaaatcaatgtgtattctttactggaaagattacatacatttgagaataagaaattactctcaagaacttcagaaatctgcaacataattttataaatatataaatacatgtatgtatgtcaaaacactacatatacactttcagaaagaataaactttctcaagtcattttaaagttacctaacgttcttcttgaataactaatacagtgggtcaaatattataaaataggcaaacaccaaaatggtattaaatattgaactcctgaccttttcgacacttacctagtaaagtattcttaggcatcatcataacttttcctcacctttattcgaatagaggaataaatgtcttcagttgtctctccattacccctaagttattagtttgtctagtttatatataaagaccatgttttaaagtacataaagtggaggtttatttatcatacaggctttgaaacattaagaagcagtatttttattaactttttgagacatattaaaatacattttgccttagaagactgcttctaaagtaatttttgtaagtaatgagatgggatggtaatctagtaatttgactttatagaaatccctcagtttggcccccaccattctacagagttgtactcaagacagatactgaaaaaatctaataccttcccttgtattttcagcattaccatctatacagaaatggaacactgtatctttatattcctaaaaatggtacttttggcataattaagaaatttttcttcatattatcacaatcatgcccttccattgaattattaattacaattaattactaaaaagcttggtatgtaaaattattctccacaatattaccatgcaagttatctctgaaatttaaaatgttaaagaaaaacatttctatattgaaatatatataatttataatgaaaattatagtagtttgtagtatttcattgaattttagagagatatttcatatatatgtactgtattttggatgtgtaaagcttctatgtattgaaatatttttttacgttttatttattgtacaaagtgtatataattactgttttcttttttgtcagtgtaaagcagtcattagaattgattatacaaaaaata

SEQ ID NO: 1461 - DNA, 1409 bp, Homo sapiens
  source 1..1409: mol_type = genomic DNA
aacgagcctctgactccaggttatcatggattcccagcgcgggacagccagggtaaccaggagccgacaacaactcctgacgcaatggttcagccttttactaccatcccatttccaccacctccgcagaatggaattcccacagagtatggggtgccacacactcaagactatgccggccagaccggtgagcataacctgacactctacggaagtacgcaagcccacggggagcagagcagcaactcacccagcacacaaaatggatctcttacgacagaaggtggagcacagacagacggccagcagtcacagacacaaagtagtgaaaattcagagagtaaatctaccccgaaacggctgcatgtctctaatattcctttccgcttccgggaccctgacctccggcagatgtttgggcagtttggcaaaatcctagatgtagaaataatctttaatgaacgtggctctaagggattcgggttcgtaactttcgagaatagtgctgatgcagacagggccagggagaaattacacggcaccgtggtagagggccgtaaaatcgaggtgaataatgctacagcacgtgtaatgaccaataagaagatggtcacaccatatgcaaatggttggaaattaagcccagtagttggagctgtatatggtccggagttatatgcagcatccagctttcaagcagatgtgtccctaggcaatgatgcagcagtgcccctatcaggaagagggggtatcaacacttacattcctttaatcattcctggcttcccttaccctactgcagccaccacggcagccgctttcagaggagcccatttgaggggcagagggcggacagtatatggtgcagtccgagcggtacctccaacagccatccccgcctatccaggtgtggtttaccaggacggattttacggtgctgacctctatatagaatctgcaaactgcttcagatcaaacagggtggatatgcagcctacagatatgcacagcctgctactgcaaccgcagccaccgctgctgcagccgctgcagccgcttacagtgacggttatggcagggtgtacacagccgacccctaccatgcccttgcccctgccgctagctatggagttggcgctgtggcgagtttataccgaggtggctacagccgatttgccccctactgaagtgacgtgagacccctgcaaatgggacagccccccagttcatgaggcctggctattgcaatatttactagtagaggaactctatagcaagatgaagaggaaaaacaaacaaacaaacaaaaaaaaacacaaaaaaagaaagaatacttttttatacctcactatgttctttgaatatgtatttttcctttaaatttctgcctttaattcttttgttccaaa

SEQ ID NO: 1462 - DNA, 787 bp, Homo sapiens
  source 1..787: mol_type = genomic DNA
gttgcctgatgacgagagttgggagtgtggctggggctgcggatctccagcagtggcgttacttctagcggctggataccgggttctccgcgagatcgcgagatcccgagatattctccccgcacggaagcgacgactggcctggccagaggactcgcgtgggagcgaggtgccggccccgacaggacggtgagaaattgttttacagcctacccgtatattacaagaaatctcaagtcaaacactggaaaagatgtcagaagattcagaaaaggaagactattcagacagaacaatcagtgatgaagatgaatcggatgaggatatgttcatgaaatttgtaagtgaagatcttcatcggtgtgcacttttaacagctgactcttttggtgatcccttcttcccccggactacacagatactattagaatatcagctagggagatgggtgccacgtcttcgtgaaccaagggatttatatggtgtctcttcttctggtccattgagcccaacacggtggccataccattgtgaagtcatcgatgaaaaagtccagcatattgatggagtctcatgctggagtgagtctcaccaggctggagcgcagtggtgcgatctcggctcactgcaacctccacctcccaggttcaagcgattcgcctgcttcagcctcctgagtagcagagactacaggcgcgtgccaccacgctcagctaattttgtatttttagtagagacggggtttcaccatgttggccaggatggtctccgtctcttgacctcgtga

SEQ ID NO: 1463 - DNA, 2843 bp, Homo sapiens
  source 1..2843: mol_type = genomic DNA
gaggaagtgatcgctcccggaggagcgcgagccgagcggccggcgcagcgtgagacagcacatcctgcccgcgccggccccgccaccttcgggagccgcctgcaccaacgctgccgccgcccaggagccgccgccggctcggggagcccagttccgccgctgccgagcgcgtccaggaaaccaacatgtctgacaaaagtgacttaaaagctgagctagagcgcaaaaagcagcgcttagcacagataagagaagagaagaaacggaaggaagaggagaggaaaaagaaagaggctgatatgcagcagaagaaagaacccgttcaggacgactctgatctggatcgcaaacgacgagagacagaggctttgctgcaaagcattggtatctcaccggagccgcctctagtcccaacccctatgtctccctcctcgaaatcagtgagcactcccagtgaagctggaagccaagactcaggcgatctggggccattaacaagaagaagactgcataaactgggcgtgtcaaaggtcacccaagtggatttcctgccaagggaagtagtgtcctactcaaaggagacccagactcctcttgccacgcatcagtctgaagaggatgaggaagatgaggaaatggtggaatctaaagttggccaggactcagaactggaaaatcaggacaaaaaacaggaagtgaaggaagcccctccaagagagttgacagaggaagaaaaacagcagatccttcattcagaggaatttctcatcttttttgaccggacaatacgggtaattgaaagagccctggctgaagattccgacatcttttttgactacagcggccgagagttagaggaaaaagatggggatgttcaggctggagccaatctttctttcaatcgtcagttctatgatgaacattggtccaagcatcgagtggtcacttgtatggactggtccctccagtaccctgagctgatggtggcttcttacaacaacaatgaagatgctccccatgaaccagatggagtggccttggtttggaacatgaagtttaagaaaaccacaccagaatacgtcttccactgtcagtcctctgtgatgtcggtctgcttcgcccgtttccatcctaacttggtggttggtgggacttactcgggccagattgtcctctgggacaatcgcagtcatcgaaggactccagtgcagcggacacccttatcagctgctgcacacacgcatcccgtgtactgtgtaaatgttgttgggacccagaatgctcataacctcatcactgtctccactgatggcaaaatgtgttcctggagcctggacatgctctcaactccacaggagagcatggagctggtgtacaataagtccaagcctgtcgctgttaccggaatggctttcccaacgggagacgtcaataacttcgtggttggcagtgaggaaggtacagtctacacggcttgtcgtcatggaagcaaagcaggtattggtgaggtctttgaaggtcaccaagggccagtgacaggaattaactgccacatggcagtgggcccaatcgacttttctcacctgtttgtcacatcatcatttgactggactgtcaaactgtggaccaccaagcacaacaagccgctctactcctttgaagacaatgcagactatgtgtacgatgtcatgtggtcccccgtgcatcctgcgctttttgcctgcgtggacgggatggggcgcttggacctctggaacctcaacaatgacaccgaggttccaacagcaagtgtggccattgagggggcatccgccctaaaccgtgttcgttgggcccaagctggcaaagaagttgctgttggggactcggaaggccgtatttgggtctatgacgttggagagcttgcagttccccacaatgatgaatggacccgatttgccaggacccttgtggaaattcgtgctaacagagctgatagcgaggaggaaggcactgttgagttatctgcctagtggaaatgagccacccccactgcagcccccacctttgtgtcctagagctcagcgtctgcagtcaagtctcttgtattcggtgtccattcagtatcagtattgctgtgatattttgggtgccatattgtgccagctttgctccaagtattctaaatgtgtcccatcatgctttccactgacccaaaattcaccacagcatttctatctttatatttctgtctcaaaaatgaagagaagggggttatgggttaagttgctgccttttaactactttgtagctgtatttaatagctggaaacctctggttaaatttgtgcttacatgcactcctggcatagtcctattaaatccatatgaagccagatatgattgggtgcagatgtggtgttcctcatattatggtacagggccaaagacttgagacgtggtgttttacatggtgactcacattatgaatggatttactagaagaacattgctgctccttatttattgtagtgtgctgcatggaacgtatttatttgaaagcattaaaataaatgatcctagagcatgtgcataatgagaggactgtattctctctgctgctgttgaggttatattaagttccacatagcaattacagtatgccagttccactgaagacatgaaatctttagaggtttcttgcagtgaacgaaatgaattttaatgcctattatttctgggtactttaacaatatttcaaatatcattgaccactaatacttctcactgaagctaacacagtctgacaaaagtctatggttcctaaatatgacatcagtgttgccaataaaatgtttcaaacca

SEQ ID NO: 1464 - DNA, 687 bp, Homo sapiens
  source 1..687: mol_type = genomic DNA
gacatcccagcgctgtgcccggtcttgccctctgtagcccggctcgccccgcgcttggacatggaaggggccgccgcgcctgtggcgggggaccgccccgacttggggctgggggcgccgggctctccccgagaggcggtggcgggggcgactgcagccctggagcccaggaagccgcacggggtgaagcggcatcaccacaagcacaacttgaagcaccgctacgagctgcaggagaccctgggcaaaggcacctacggcaaagtcaagcgggccaccgagaggttttctggccgagtggttgctataaaatccattcgtaaggacaaaattaaggatgaacaagacatggttcacatcagacgagagattgagatcatgtcatctctcaaccatcctcatatcatcagtatttatgaagtgtttgagaacaaagataagattgtgatcatcatggaatatgccagcaaaggggagctgtacgattacatcagtgagcggcgacgcctcagtgagagggagacccggcacttcttccggcagatcgtctctgctgtgcactattgtcacaagaacggtgtggtccaccgggacttgaagctgaaaagacccagcagagagaatcaggttactactcttccccagagcgcagtgagtcttcggagctgttggacagtaatgatgtga

SEQ ID NO: 1465 - DNA, 1451 bp, Homo sapiens
  source 1..1451: mol_type = genomic DNA
ggaggcgtcggggctgcgccgtacaacttccggctgtaaagatggcggcttcctagtgagtcggcggctgatttagaaggaggttcaggctacggtgagccgaaggggaggattctggcttcccctgtccgtgttccatctagccacacaggagccatggaagtggcagagcccagcagccccactgaagaggaggaggaggaagaggagcactcggcagagcctcggccccgcactcgctccaatcctgaaggggctgaggaccgggcagtaggggcacaggccagcgtgggcagccgcagcgagggtgagggtgaggccgccagtgctgatgatgggagcctcaacacttcaggagccggccctaagtcctggcaggtgcccccgccagcccctgaggtccaaattcggacaccaagggtcaactgtccagagaaagtgattatctgcctggacctgtcagaggaaatgtcactgccaaagctggagtcgttcaacggctccaaaaccaacgccctcaatgtctcccagaagatgattgagatgttcgtgcggacaaaacacaagatcgacaaaagccacgagtttgcactggtggtggtgaacgatgacacggcctggctgtctggcctgacctccgacccccgcgagctctgtagctgcctctatgatctggagacggcctcctgttccaccttcaatctggaaggacttttcagcctcatccagcagaaaactgagcttccggtcacagagaacgtgcagacgattcccccgccatatgtggtccgcaccatccttgtctacagccgtccaccttgccagccccagttctccttgacggagcccatgaagaaaatgttccagtgcccatatttcttctttgacgttgtttacatccacaatggcactgaggagaaggaggaggagatgagttggaaggatatgtttgccttcatgggcagcctggataccaagggtaccagctacaagtatgaggtggcactggctgggccagccctggagttgcacaactgcatggcgaaactgttggcccaccccctgcagcggccttgccagagccatgcttcctacagcctgctggaggaggaggatgaagccattgaggttgaggccactgtctgaaccatccctgtacatctgcaccttcttgtgcaaggaagtccttggcctaaagccttggttctcaaactgggttccttgggacctccggggtgggggggttccaggaggcacgtagggtaccttgcagggtcctaggagggaaacccaggattccaggagggatcccaggaactgtgggcacccattttctgtgtctcccagcccatttccactcctagtttgtcatggataatttttgttcttccctgtgtgatttttgccatcaaaataaaaatttgagactcgttaaccgaagtccacgccaa

SEQ ID NO: 1466 - DNA, 913 bp, Homo sapiens
  source 1..913: mol_type = genomic DNA
ccacctcctgccctgctggggtccagccatgtcccagcctgcgggaggcaggaggaagcccaggaccctagggccgcctgtgtgcagtatccggcctttcaagtcgagtgagcagtacctggaggccatgaaggaagacctggctgagtggcttcgcgacctctatgggctggacatcgacgcagccaacttcctgcaggtgctggaaacgggcctggtgctgtgccaacacgccaacgttgtcactgacgctgccctggccttcctggctgaggcacctgcccaagcccagaagattcccatgccccgggtcggggtctcctgcaatggggccgcccagccaggtaccttccaggccagggacaatgtctctaacttcatccagtggtgtcgaaaggagatgggcatccaagaggtgctgatgttcgagacggaggacttggtgctgcgcaagaacgtgaagaacgtggtgctgtgtttgctggagctgggccgccgggcgtggcgctttggtgttgcggcgcccacactcgtgcagctggaggaggagatcgaggaggaggtgcggcgggagctggccctgcccccacttccgcaacctggaccagatggtgcagagccttgtgagccactgcacgtgcccagtgcagttctccatggtcaaagtgtctatgtcttcctgggtccagccaggcagccccccaaggacaggctgttgagagctgtgctgggcagcaagggaggggaggcatcccgggtggatggagcttcagtaggtgaggaggaggaggaaggaaaggaggagaaagagccagccgctccattggagagcagcccccaacctccagagggcctgcaacctcactggcttaatcaagctccacttccacctgaggaggagtcctgggtctga

SEQ ID NO: 1467 - DNA, 4348 bp, Homo sapiens
  source 1..4348: mol_type = genomic DNA
cgccgggaagcgaccggctgctgggcttaaggcgggagtgaccgcttaaccagtgagggaagcactgaagagcgccagtcgacgtgggtgcgacaactcgcggagtcttaggagcaaaacgtctggggcctgcgagccaggacccttctgaagccttaggtgtctatcggcgacgtgtacggtcactgcagctccggagcgcggaaccctcagccaggaggcgcggctggtcggtcccaggtcccggcctccgtaatgagagcccggaaccactctttgtgccgcagcttcgcagattcctataggcaatggaaactgatctcaattcccaggacagaaaggacctggacaagtttattaaattttttgccctcaagactgtccaagtgattgtccaggctcggcttggtgaaaagatttgcactcgttcatcatcttctccaacgggttcagattggttcaacttagcaatcaaagacatcccagaggttacacatgaagcaaagaaggcactggcaggacagctgcctgcagtcgggaggtccatgtgtgtggagatttcacttaagacttctgagggagattccatggagctggaaatatggtgtcttgaaatgaatgaaaagtgtgataaagaaatcaaagtttcctacacggtgtacaacagactgtcattgctgctgaagtcccttcttgctataactagggtgacaccagcctataggctctccaggaaacaagggcatgaatatgtcatattatacaggatatattttggagaagttcagctgagtggcttaggagaaggcttccagacagttcgtgttgggacagtgggcacccctgtgggcaccatcactctttcttgtgcttacagaattaacttggcattcatgtctaccaggcaatttgagaggaccccacctatcatggggattattattgatcactttgtggaccgtccctatcccagctcctctcccatgcacccctgcaattacagaactgctggtgaggacactggagtaatatacccgtctgtagaagactctcaagaagtgtgtaccacctctttttccacctccccaccatcccagctctcaagctctcgcctttcctatcagcctgctgccctgggcgttggatcagctgacctggcttatccagtagtgtttgctgctggcttaaatgctacacaccctcaccagctgatggttcctgggaaggaaggtggggtaccccttgctcccaaccagcctgtccatggtacccaggctgaccaggagagactggcaacctgcaccccttctgacagaacccactgtgctgccacaccctccagtagtgaggatactgaaaccgtatcaaacagcagtgagggacgggcctcccctcacgatgtcttggagaccatctttgtccgaaaagtgggggcttttgtcaacaaacccattaaccaggtgaccctgacgagtttggatataccctttgccatgtttgctcccaagaatttggagctggaggataccgatccaatggtgaatcctccagattccccagagactgaatctcctctccagggcagcctgcactcagatggctccagcgggggcagcagtggcaatacccatgatgactttgttatgatagactttaaaccagctttttctaaagatgacattcttccgatggacctggggaccttctatcgggagtttcagaacccacctcagctgagcagcctctccatagatattggagcacagtccatggctgaagacttggactcattaccagagaagctggctgtgcatgagaagaatgtccgcgagtttgatgcctttgtggaaaccctgcagtaaaagtatccttgagtcccagcagcaccccctttttgtggccccagggcataagcagcctcccatgcatcagctgctcccacccctcatcctgctctgagccaggtggaagggaggctggcttctcccatggggacccagaagtccctactcttggacctcctggagactccgtggcggcagtcaagcccagtgcccagttggagaagactcacgtgctggccttggagatgggaagaaccttcgtacgaaaaagccctcagcagggccatctgtgtgccctgcccatcaccaactgcttcccaagggtgtcatcctgttcctcctgctgccggcctcctgcctgggcctgccttgcagctggccccttccctgcctgctgtcaccatccactgtttgacattccagctggtggccaagagattggtgtggagtcgcagaaagaggaaggagacagtgccaggaggaagaaggaaggagtcccttagctctcttcattgtcccctttacttcctgctatcttcttctcctcttcttctctctcttgcctctatgcctgtatttctggcaatatgacaggcctgcctacccaagatcagaactccaaaaccactcccacccctgaaggtcgggagggtctgagcagccctggtggctgcctgtgctcaggtcctcagctccatgggaaataaaaatggcaccctgaatctctaggattttgtcacttggagtcacagcaaagttctcttcctcttgtccccccgttgctgctccttggttatagaacatggtaaatatttattactttcagagaaaccagatattttatagaggaaatatgtttgaggtgagttgtttttcacttggagaaggcggagggctcttcctgggacggagacctcctcctccggaggttattgagaatccgggctgctgctttgaggatcttcccaccatacagacagcgagatccaagaagagggctggccgggggcaaagtcacctcccagtgtggctgcactggaactgactaaaggctttaccttggatagttgcgtattcctggtgagagccttacatctcccacagtttctgcagagtgactgactccattctggcagcccaggaagtcctgggtgctaaatgtgatggccacatgtagtggttaggggatgttgtgtgtgtcccccaactgcctgggtacttgttcctgatccctggggctgtcctgtggagcttttcctcctgcttgggcctagctaccatctccctctaatcccaggttctctacactgccctggggtttaccagctggattggcttctggttgagaaatcaaagctgggcgtatgattgacttaacccttcaggtattgttacttgaataagtcaagtgcctagcctcacccacctatgatctgtcctttcccagcctcgctggtagtcctggtcaaggagatctaggtctactccattcctcctggcccacctggggcattcactggcagcagctgtgcttcagtggagcaggtggttctcagctgcttgttagtatactgcatgtgacactgttcccacatacaaggctgacttctgaggattggagcaggctctggcggggaccagagctctgcgtgctgctgctgccaccaagaagtgttagcagaagcagtagcagccaactggccctcctgactttggcccagagcacatgcgtggcttgctgaacccaggctcaggtttatccccaaggccccagctttgagaagggggaaggcccctggtaagttattgatgcccccatatttcagctactgctctctttccaaggccttgcatggaaaggcctagccattgtctgaggcagcaatctttggcatctacaggtggcagcagcctttcaccagggctccatctgtgaagagtctcagccatgactttgagctgagcttgggagaagtaaagcaactgttaaggccagcccttgcccctcagacctgccatgaaaggaatgagccctagactgactcctgcagcacccccgggacaggctgggaccagctgtttgtctccaggtgtcagagtccctcctcctcctccaacctctccaacctactttgtttggaaataccgagctacacttcaaaatgtattcaagggatttccaataaatttttttctgtactttacagcctcctgtcctgtaggttgtctgaagacctcgtaaccccttccccacccctgccccagtgcaggtctgggaaaggggagagtggtgcgttgtgaagcgcagaaagacctcaagtgtctgggcaagcctgttttgagtcgggtgtggcctcttaggggctgtataccctggggtttcctgggtcaggaaacttcttagtatttctctttccctggtcccctatcaggggcttgaatttgaatattcagttggagaatgcatttaaaatacacccatagtaaaatctccataaaatgca

SEQ ID NO: 1468 - DNA, 1590 bp, Homo sapiens
  source 1..1590: mol_type = genomic DNA
acagtagctcacacctgtaatcccagcactttggaaggccgaggtgggcggatcacctgagctcaggagtttgagaccagcctgtctctactaacaatataaaaattagctgggagtcacggtgggcgcctgtaatcccagctactcgggaggctgaggcaggagaattgcttgaacccaggagacagaggttgtagtgagctgagatcgcaccactgcactctagccttggcaacagtgcaagactgtctcaaaaacagcaacagagagcaggacgtgagacttctacctgctcactcagaatcatttctgcaccaaccatggccacgtttgtggagctcagtaccaaagccaagatgcccattgtgggcctgggcacttggaagtctcctcttggcaaagtgaaagaagcagtgaaggtggccattgatgcaggatatcggcacattgactgtgcctatgtctatcagaatgaacatgaagtgggggaagccatccaagagaagatccaagagaaggctgtgaagcgggaggacctgttcatcgtcagcaagttgtggcccactttctttgagagaccccttgtgaggaaagcctttgagaagaccctcaaggacctgaagctgagctatctggacgtctatcttattcactggccacagggattcaagtctggggatgaccttttccccaaagatgataaaggtaatgccatcggtggaaaagcaacgttcttggatgcctgggaggccatggaggagctggtggatgaggggctggtgaaagcccttggggtctccaatttcagccacttccagatcgagaagctcttgaacaaacctggactgaaatataaaccagtgactaaccaggttgagtgtcacccatacctcacacaggagaaactgatccagtactgccactccaagggcatcaccgttacggcctacagccccctgggctctccggatagaccttgggccaagccagaagacccttccctgctggaggatcccaagattaaggagattgctgcaaagcacaaaaaaaccgcagcccaggttctgatccgtttccatatccagaggaatgtgattgtcatccccaagtctgtgacaccagcacgcattgttgagaacattcaggtctttgactttaaattgagtgatgaggagatggcaaccatactcagcttcaacagaaactggagggcctgtaacgtgttgcaatcctctcatttggaagactatcccttcaatgcagaatattgaggttgaatctcctggtgagattatacaggagattctctttcttcgctgaagtgtgactacctccactcatgtcccattttagccaagcttatttaagatcacagtgaacttagtcctgttatagacgagaatcgaggtgctgttttagacatttatttctgtatgttcaactaggatcagaatatcacagaaaagcatggcttgaataaggaaatgacaattttttccacttatctgatcagaacaaatgtttattaagcatcagaaactctgccaacactgaggatgtaaagatcaataaaaaaaataataatcataa

SEQ ID NO: 1469 - DNA, 9411 bp, Homo sapiens
  source 1..9411: mol_type = genomic DNA
gagcccaaggtggtgtttgccaaggagcagccagtgcacagggaggtgcaggcccaggcgggggccagcaccacactcagctgcgaggtggctcaggcccagacggaggtgatgtggtacaaggacgggaagaagctgagcttcagctcgaaagtgcgcatggaggctgtgggctgcacacggaggctggtggtgcagcaggcgggccaggcggtcgccggggagtacagctgcgaggcggggagccagcggctctccttccacctgcacgtggcagagcccaaggcggtgtttgctaaggagcagccagcacacagggaggtgcaggctgaagcaggggctagcgccacactgagctgtgaggtggcccaggcccagacagaggtgacttggtacaaggacgggaagaagctgagctccagcttgaaagtgcatgtggaggctgcaggctgtacacggaggctggtggtgcagcaggcaggccaggcagacaccggagagtatagctgtgaggctgggggccagcagctctccttccgcctgcaagtggcagagcccaaggcggtgtttgccaaggagcagccagcgagcagggaggtgcaggctgaggcggggaccagtgccacgctgagctgcgaggtggcccaggcccagacagaggtgacgtggtacaaggacgggaagaaactgagctccagctcgaaagtgcgaatggaggccgtgggctgcacacggaggctggtggtgcaggaggcaggccaggcggacgccggggagtacagctgcaaggccggggatcagcggctgtccttccacctgcacgtggcagagcccaaggtggtgtttgccaaggagcagccagcacacagggaggtgcaggctgaggcgggggccagtgccacgctgagctgcgaggtggcccaggcccagacagaggtgacgtggtacaaggatgggaagaagctgagttccagctcgaaagtgcgcgtggaggccgtgggctgcacacggaggctggtggtgcagcaggcgggccaggcagaggccggggagtacagctgcgaggcagggggtcagcagctctccttccgcctgcaggtggcagagcccaaggcggtgtttgccaaggagcaggtggtgtttgccaaggatcagccggtgcacagggaggtgcaggctgaggcagggaccagcaccatgctgagctgcgaggtggcccaagcccagacggaggttatgtggtacaaggacgggaagaagctgagctccagctcgaaaatgcgtgtggaggccgtgggctgcacacggaggctggtggtgcaggaggcaggccaggcggacgccggggagtacagctgcgaggctgggggccagcggctctccttccatctgcatgtggctgagcccaaggtggtgtttgccaaggagcagccggcatgcagggaggtgcaggcggaggcgggggccagtgccacgctgagctgtgaggtggcccagggccagatggaggtgacatggtacaaggacgggaagaagctgagctccagctcaaaagtgcacatggaggccagcggctacacacggaggctggtagtgcagcaggcgggccaggcggatgctggggagtacagctgtgaggcggggggccaacggctgtccttccgcctgcacgtggcagagctggagccccaaatttcagagagaccctgccgcagggagcctctggtggtcaaggagcatgaagacatcatcctgaccgccacactggccacaccctctgcggccacggtgacctggctcaaggatggtgtggagattcgccgcagcaagcggcatgagacagccagccagggggacacccacaccctgaccgtgcatggcgcccaggttctggacagcgccatctacagctgccgtgtgggcgcagaggggcaggacttcccagtgcaggtggaagaggtggccgccaagttctgccggctgctggagcctgtgtgcggcgagctgggtggcacggtgacactggcctgcgagctaagcccagcgtgtgcagaggtggtgtggcgctgcggcaacacgcagcttcgggtgggcaagcgcttccagatggtggccgaggggcccgtgcgctcactcactgtgttggggctgcgcgcagaggacgcaggggagtacgtgtgtgagagccgtgatgaccacaccagtgcgcagctcaccgtcagtgtgccccgagtggtgaagtttatgtctgggctgagcaccgtggtcgcagaggagggcggcgaggccaccttccagtgcgtggtgtcccccagtgatgtggcagtcgtgtggttccgggacggtgccctgcttcagcccagcgagaagtttgccatatcacagagtggcgccagccacagcctgaccatctcagacctggtgctggaggacgcgggccagatcaccgtggaggctgagggcgcctcatcctctgctgccctgagggtccgagaggcgcctgtgctgttcaaaaagaagctggagccgcagacggtggaggagcggagctcggtgaccctggaggtggagctgacgcggccgtggccggagctgaggtggacacggaacgcgacggccctggcgccgggaaagaacgtggagatccacgccgagggcgcccgccaccgcctggttctgcacaacgtaggttttgccgaccgtggcttctttggctgcgagacgccggatgacaagacacaggccaaactcaccgtggagatgcgccaggtacggctcgtacggggcctgcaggcagtggaggcacgggagcagggcacggctaccatggaggtgcagctgtcgcatgcggacgtggatggcagctggactcgtgacggtctgcggttccagcaggggcccacgtgccacctggctgtgcggggccccatgcacaccctcacactctcggggctgcggccagaggatagtggccttatggtcttcaaggccgaaggagtgcacacgtcggcgcggctcgtggtcaccgagcttcccgtgagcttcagccgcccgctgcaggacgtggtgaccactgagaaggagaaggttaccctggagtgcgagctgtcgcgtcctaatgtggatgtgcgctggctgaaggacggtgtggagctgcgggcaggcaagacgatggccatcgcagcccagggcgcctgcaggagcctcaccatttaccggtgcgagttcgcggatcagggagtgtatgtgtgtgatgcccatgatgcccagagctctgcctccgtgaaggtacaaggaaggacatacactctcatctaccggagagtcctggcggaagatgcaggagagatccaatttgtagccgaaaatgcagaatcgcgagcccagctccgagtgaaggagctgccagtgaccctcgtgcgcccgctgcgggacaagattgccatggagaagcaccgcggtgtgctggagtgtcaggtgtcccgggccagcgcccaggtgcggtggttcaagggcagtcaggagctgcagcccgggcccaagtacgagctggtcagtgatggcctctaccgcaagctgatcatcagtgatgtccacgcagaggacgaggacacctacacctgtgacgccggtgatgtcaagaccagtgcacagttcttcgtggaagagcaatccatcaccattgtgcggggtctgcaggacgtgacagtgatggagcccgctcctgcctggtttgagtgtgagacctccatcccctcagtgcggccacctaagtggctcctggggaagacggtgttgcaggctggggggaacgtgggcctggagcaggagggcacggtgcaccggctgatgctgcggcggacctgctccaccatgaccgggcccgtgcacttcaccgttggcaagtcgcgctcctctgcccgcctggtggtctcagacatccccgtagtcctcacacggccgttggagcccaagacagggcgtgagctgcagtcagtggtcctgtcctgcgacttccggccagcccccaaggctgtgcagtggtacaaggatgacacgcccctgtctccctctgagaagtttaagatgagcctggagggtcagatggctgagctgcgcatcctccggctcatgcctgctgatgctggtgtctaccggtgccaggcgggcagtgcccacagcagcactgaggtcactgtggaagcgcgggaggtgacagtgacagggccgctacaggatgcagaggccacggaggagggctgggccagcttctcctgtgagctgtcccacgaggatgaggaggtcgagtggtcgctcaacgggatgcccctgtacaacgacagcttccatgagatctcacacaagggccggcgccacacgctggtactgaagagcatccagcgggctgatgcgggcatagtacgcgcctcctccctgaaggtgtcgacctctgcccgcctggaggtccgagtgaagccggtggtgttcctgaaggcgctggatgacctgtccgcagaggagcgcggcaccctggccctgcagtgtgaagtctctgaccccgaggcccatgtggtgtggcgcaaagatggcgtgcagctgggccccagtgacaagtatgacttcctgcacacggcgggcacgcgggggctcgtggtgcatgacgtgagccctgaagacgccggcctgtacacctgccacgtgggctccgaggagacccgggcccgggtccgcgtgcacgatctgcacgtgggcatcaccaagaggctgaagacaatggaggtgctggaaggggaaagctgcagctttgagtgcgtcctgtcccacgagagtgccagcgacccggccatgtggacagtcggtgggaagacagtgggcagctccagccgcttccaggccacacgtcagggccgaaaatacatcctggtggtccgggaggctgcaccaagtgatgccggggaggtggtcttctctgtgcggggcctcacctccaaggcctcactcattgtcagagagaggccggccgccatcatcaagcccctggaagaccagtgggtggcgccaggggaggacgtggagctgcgctgtgagctgtcacgggcgggaacgcccgtgcactggctgaaggacaggaaggccatccgcaagagccagaagtatgatgtggtctgcgagggcacgatggccatgctggtcatccgcggggcctcgctcaaggacgcgggcgagtacacgtgtgaggtggaggcttccaagagcacagccagcctccatgtggaagaaaaagcaaactgcttcacagaggagctgaccaatctgcaggtggaggagaaaggcacagctgtgttcacgtgcaagacggagcaccccgcggccacagtgacctggcgcaagggcctcttggagctacgggcctcagggaagcaccagcccagccaggagggcctgaccctgcggctcaccatcagtgccctggagaaggcagacagcgacacctatacctgcgacattggccaggcccagtcccgggcccagctcctagtgcaaggccggagagtgcacatcatcgaggacctggaggatgtggatgtgcaggagggctcctcggccaccttccgttgccggatctccccggccaactacgagcctgtgcactggttcctggacaagacacccctgcatgccaacgagctcaatgagatcgatgcccagcccgggggctaccacgtgctgaccctgcggcagctggcgctcaaggactcgggcaccatctactttgaggcgggtgaccagcgggcctcggccgccctgcgggtcactgagaagccaagcgtcttctcccgggagctcacagatgccaccatcacagagggtgaggacttgaccctggtgtgcgagaccagcacctgcgacattcctgtgtgctggaccaaggatgggaagaccctgcgggggtctgcccggtgccagctgagccatgagggccaccgggcccagctgctcatcactggggccaccctgcaggacagtggacgctacaagtgtgaggctgggggcgcctgcagcagctccattgtcagggtgcatgcgcggccagtgcggttccaggaggccctgaaggacctggaggtgctggagggtggtgctgccacactgcgctgtgtgctgtcatctgtggctgcgcccgtgaagtggtgctatggaaacaacgtcctgaggccaggtgacaaatacagcctacgccaggagggtgccatgctggagctggtggtccggaacctccggccgcaggacagcgggcggtactcatgctccttcggggaccagactacttctgccaccctcacagtgactgccctgcctgcccagttcatcgggaaactgagaaacaaggaggccacagaaggggccacggccacgctgcggtgtgagctgagcaaggcagcccctgtggagtggagaaaggggtccgagaccctcagagatggggacagatactgtctgaggcaggacggggccatgtgtgagctgcagatccgtggcctggccatggtggatgccgcggagtactcgtgtgtgtgtggagaggagaggacctcagcctcactcaccatcaggcccatgcctgcccacttcataggaagactgagacaccaagagagcatagaaggggccacagccacgctgcggtgtgagctgagcaaggcggcccccgtggagtggaggaaggggcgtgagagcctcagagatggggacagacatagcctgaggcaggacggggctgtgtgcgagctgcagatctgtggcctggctgtggcagatgctggggagtactcctgtgtgtgtggggaggagaggacctctgccactctcaccgtgaaggccctgccagccaagttcacagagggtctgaggaatgaagaggccgtggaaggggccacagccatgttgtggtgtgaactgagcaaggtggcccctgtggagtggaggaaggggcccgagaacctcagagatggggacagatacatcctgaggcaggaggggaccaggtgtgagctgcagatctgtggcctggccatggcggacgccggggagtacttgtgtgtgtgcgggcaggagaggacctcagccacgctcaccatcagggctctgcctgccaggttcatagaagatgtgaaaaaccaggaggccagagaaggggccacagctgtgctgcagtgtgagctgaacagtgcagcccctgtggagtggagaaaggggtctgagacccttagagatggggacagatacagcctgaggcaggacgggactaaatgtgagctgcagattcgtggcctggccatggcagacactggggagtactcgtgcgtgtgcgggcaggagaggacctcggctatgctcaccgtcagggctctacccatcaagttcacagagggtctgaggaacgaagaggccacagaaggggcaacagccgtgctgcggtgtgagctgagcaagatggcccccgtggagtggtggaaggggcatgagaccctcagagatggagacagacacagcctgaggcaggacggggccaggtgtgagctgcagatccgcggcctcgtggcagaggacgctggggagtacctgtgcatgtgcgggaaggagaggacctcagccatgctcaccgtcagggccatgccttccaagttcatagagggtctgaggaatgaagaggccacagaaggggacacggccacgctgtggtgtgagctgagcaaggcggcaccggtggagtggaggaaggggcatgagaccctcagagatggggacagacacagcctgaggcaggacgggtccaggtgtgagctgcagatccgtggcctggctgtggtggatgccggggagtactcgtgtgtgtgcgggcaggagaggacctcagccacactcactgtcagggccctgcctgccagattcatagaagatgtgaaaaaccaggaggccagagaaggggccacggccgtgctgcaatgtgagctgagcaaggcggcccccgtggagtggaggaaggggtctgagaccctcagaggtggggacagatacagcctgaggcaggatgggaccagatgtgagctgcagattcatggcctgtctgtggcagacactggggagtactcgtgtgtgtgcgggcaggagaggacctcggccacactcaccgtcagggccctgcctgcacgacactcaagatctgaagaccaaggaggcctcagaaggggccacagctacactgcagtgtgagctgagcaaggtggcccctgtggaatggaagaagggtcctgagaccctcagagatgggggcagatacagcctgaagcaggatgggacgaggtgtgagctgcagatccatgacctgtctgtggcggatgctggggaatactcatgcatgtgtggacaagagaggacctcggccacgctcactgtcagggccctgcctgccaggttcacagagggtctgaggaatgaagaggccatggaaggggccacagccacactgcaatgtgagctgagcaaggcagcccctgtggagtggaggaaaggccttgaggctctcagagatggggacaaatacagcctgagacaagacggggctgtgtgtgagctgcagattcatggcctggctatggcagataacggggtgtactcatgtgtgtgtgggcaggagaggacctcagctacactcactgtcagggccctgcctgccagattcatagaggatatgagaaaccagaaggccacagaaggggctacagtcacattgcaatgtaagctgagaaaggcggcccccgtggagtggagaaaggggcccaacaccctcaaagatggggacaggtacagcctgaagcaggatgggaccagttgtgagctgcagattcgtggcctggtcatagcagatgctggagaatactcgtgcatatgtgagcaggagaggacctcggccacgctcactgtcagggccctgccggccagattcatagaagatgtgagaaatcacgaggccacagaaggggccacagctgtgctgcagtgtgagctgagcaaggcggcccccgtggagtggcggaaggggtctgagaccctcagagatggggacagatatagcctgaggcaggacgggacgaggtgtgagctgcagattcgtggcctggctgtggaggacactggagagtatttgtgtgtgtgcgggcaggagagaacctcagctacactcactgtcagggccctgccagccagattcatagacaacatgacaaaccaggaggccagagaaggggccacggccacactgcactgtgaactgagcaaggtggcccctgtggagtggaggaagggacctgaaaccctccgagatggggacagacacagcctgaggcagga

SEQ ID NO: 1470 - DNA, 4883 bp, Homo sapiens
  source 1..4883: mol_type = genomic DNA
taaagcccacgtcatgttcttcctttactgcagggcctcttaatggggcttaaaacctaggatgggttaagtaaacaatgtaggtgagtttagtgtgcaaacagctgaaatcaccggctgcattttaagctcgtctacagcagcaacctgcagacacctattcagagagattactaaattccctccttcccattaataaaaaggaccagaatatcagtctacaaaagacactgcgttgctgcgaaccagctctcgcttgcgcgatcaggaagaagggcggcaaggctggagcctcgggaccggagaaaggcagcctgcttgtgacgtcaaatcagcggactcttatcttggctttaggccggttccggttccccggctttccgggcgcgagcgtgtgcgagcgcggcagcgtactgcgcgtgctccgcagagggacacgggaaggttgggtccggctctggaggagatgcgtgattggctgacgctgtgctcgggggttccctggccctttcggcaggggtaaaacaataagagggggcggtggcaaagggggcgggacgtccgtggtccttgtcgcacgtcgcagcgcctggcgcccgggaagaggtggttgtgaggcagacgaactcgcggctctccggcttccgaggcttccgagttgtcggaggaagggggcggcgagcaataagaacccgccgcacccggtcctcagcgactcttctgacctccgcgcgacgtacccgccgccgccgttggctggagcatttgacattgtgcagcaaagaaatggttatggagaagcccagtccgctgcttgtagggcgggagtttgtgaggcaatattatactttgctgaataaagctccggaatatttacacaggttttatggcaggaattcttcctatgttcatggtggagtagatgctagtggaaagccccaggaagctgtttatggccaaaatgatatacaccacaaagtattatctctgaacttcagtgaatgtcatactaaaattcgtcatgtggatgctcatgcaaccttgagtgatggagtagttgtccaggtcatgggtttgctgtctaacagtggacaaccagaaagaaagtttatgcaaacctttgttctggctcctgaaggatctgttccaaataaattttatgttcacaatgatatgtttcgttatgaagatgaagtgtttggtgattctgagcctgaacttgatgaagaatcagaagatgaagtagaagaggaacaagaagaaagacaaccatctcctgaacctgtgcaagaaaatgctaacagtggttactatgaagctcaccctgtgactaatggcatagaggagcctttggaagaatcctctcatgaacctgaacctgagccagaatctgaaacaaagactgaagagctgaaaccacaagtggaggagaagaacttagaagaactagaggagaaatctactactcctcctccggcagaacctgtttctctgccacaagaaccaccaaaggctttctcctgggcttcagtgaccagtaaaaacctgcctcctagtggtactgtttcttcctctggaattccaccccatgttaaagcaccagtctcacagccaagagtcgaagctaaaccagaagttcaatctcagccacctcgtgtgcgtgaacaacgacctagagaacgacctggttttcctcctagaggaccaagaccaggcagaggagatatggaacagaatgactctgacaaccgtagaataattcgctatccagatagtcatcaactttttgttggtaacttgccacatgatattgatgaaaatgagctaaaggaattcttcatgagttttggaaacgttgtggaacttcgcatcaataccaagggtgttgggggaaagcttccaaattttggttttgtggtttttgatgactctgaaccagttcagagaatcttaattgcaaaaccgattatgtttcgaggggaagtacgtttaaatgtggaagagaaaaaaacaagagctgcaagagagcgagaaaccagaggtggtggtgatgatcgcagggatattaggcgcaatgatcgaggtcccggtggtccacgtggaattgtgggtggtggaatgatgcgtgatcgtgatggaagaggacctcctccaaggggtggcatggcacagaaacttggctctggaagaggaaccgggcaaatggagggccgcttcacaggacagcgtcgctgaagctccactgttggcaaagtcttggcagtggtacattattcatcgtgtttgcattcttgttaattttttttttggctttggaatgtgacacagcctttttgatcatttctttgatgtgaaaagcatctttggttatcagttaaattgaggtggacattatttccccaatttcacaacaggattcacattgttaatttataaatctagacttggagaattaaggactgagaaatgaccatatcttaaactatctacgacaaagtgaacttaaaaggacatgcccactgaattcaggtcctttgagtaaaaaaaaaatcttctgctgcacattttgtttaagtgttactgtttctgcctgttaatgctgggaacacaaatagtgcaatttgtgcaattggagaatcttgccttttttcttggctccccccaaaaatacaaaccaacagaaacttgttatgcactcatcaaaatgtactaatgggtactctgaactcattaacattgacatctgcaacaggaggcaacagggaaaaaatctcatcttcttttccagtagaaaatagtttgtgaaatgatgagggcattttatctgcttgctgtgaccagcgtgtgtacacataaaccttaacaagactacaagtatattccagaaggaaatcattttagttatgaactaaataataaaaattagaacttcaaatgcgatggtcttgactattagaccagatttagtagctccatatctaagatttttctacctgcccctcttcagtacagggatggctggctgctcaacacactcctcctccccttttttcctttctttaagctgtgtacagtgaaaattgtctttactgtatttttgttctctggtaatgtaataagcatgatggtgccttctattaatacatcattccagtcttgctggtaattttgtacagtatagtgtatgaattgctgtgctgcaaagccaaacagctgcaaaatgttgaaaaatcatcgaaatgtataaaaattgcagtatctttaaaatcagtaaaatggactagcatattatttatcttgttcttcagttaacaactttgtgttctctgtgggagggagggagtcctgtgtgtttgtggggagagggaaggaggaagtcagttatttgagtaagcctctagttgacttttctcttagcctgaatgtggacgttgaaacatatcacttcagggcttggaaaagtcagtcaacttgacgtacatttttagtgacattttaaaagcagtcagattctataaatggcaagtaagcctgaagtgaggatactgcaattttcggagaaaagaacagcagctctttaagtgtttgcattttctatttggggggcagggaactgtcattcattttgcacaattcttgaactgatgtcagcacccgagtggctcctgaatttaagtctgggacgacatcttttatttttacatgaatctttaaacaattctgtgagcaaagtttgtagctgctggattattgtctgtctttatagcaagttccagtaaaccacaagtatggcaaagcttatccaattttatgcttggagcagtcagtacataccagtttctgatgtttcaggcaggagtggggtaaataagtgtgaccacttaaagctgctcgttagcatggaagacttctccattctatctttgtaaaacagacaagatatgcacttgacatagtagcaaattggttctgaattatgcaactgtttgctatttagtaaactagcaaatgatgcatgtattttgtttttcatgtactgggcaatatgagtaaaatctgtccctttttccccctttgaatgaggtcttccatgtttgagggaaagtcttgcactattgcatatattttggggacacagattttcatagtttccatttttggggggcttaaggattttttttttttctgtttgaaacagttttatactttctgatatagtacttgaaattcttaccagaaaattactttggagttttgaagcctttattaatactacttttaaagaagcagttgttttattgtcaatgttttttttcccccaagcatattttcttgtatttctgtttccatatatatatatatatatataatttccaattcaggatattgccctgccatccatgaaaactgttctggcaccaaaagtaatgacaaatgttaagtgtaataatagaaaagtagagcaaagagccattcagcttcagtctttacataccatgaataaaacattaaaacatcatatggagaagtttacatggtgattgttcacctgcagtactgtggagttttaacattttgtcctcttttcagtgaaacagagtaaaaatattcatctaccattactgttatttgctgattttgttttattttttgatggtaatattctatccttatgacactattgcaaccaaattggctttaccatcttggctttagtaggtatagaagacaatggattaccatctttattgctgtaatgtgttaagcattatatgctagtagaatctagtttaattgtttcaggtggaaagtattctttgagtttccatattgaatgtgtttggactaaacaaacaataaactactgatgtctgcagcattta

SEQ ID NO: 1471 - DNA, 818 bp, Homo sapiens
  source 1..818: mol_type = genomic DNA
gcggcggcggcaccatgagcggccggaagcgcagcttcaccttcggggcctacggcggggtggacaagtccttcacttctcgccggagtgtgtggaggagcgatgggcagaaccagcacttccctcaggcactagacctgtcacgagtgaacttagttccctcctatactccttcactctaccctaagaacacagatctatttgagatgattgagaagatgcagggaagcaggatggatgaacaacgctgctccttcccgccgcccctcaaaacagaggaggactacattccatacccgagcgtgcacgaggtcttggggcgagaaggacccttccccctcatcctgctgccccagtttgggggctactggattgagggcaccaaccacgaaatcaccagcatccccgagacagagccactgcagtcgcccacaaccaaggtgaagctcgagtgcaaccccacagcccgcatctaccggaagcactttctcggcaaggagcatttcaattactactcactggacgctgccctcggccaccttgtcttctcactcaagtacgatgtcatcggggaccaagagcacctgcggctgctgctcaggaccaagtgccggacataccatgatgtcatccccatctcctgcctcaccgagttccctaatgttgtccagatggcaaagttggtgtgtgaagacgtcaatgtggatcggttctatcctgtgctctaccccaaggcttcccggctcatcgtcacctttgacgagcatgtcatcagcaataacttcaagtttggcgtcatttatcagaagcttgggcag

SEQ ID NO: 1472 - DNA, 2965 bp, Homo sapiens
  source 1..2965: mol_type = genomic DNA
gcactccaggagcagccgcgccgctgctcacccgccctgtagtccgctccccccagggccgtccccgttttaagaaatggggtgatggggcgtccctacccggcgcctgcaggggctcctggggagcgcgccggtggctcgctgctcccgggtggggcgcggggctggcgctcgagggtgccgtggcccaggcggggctgcagcgagtgtgttccccgttccgcgcgcgtgaagcgtgggagcgaagcctcgggggagggcgggagcgcggctgagctcactgtgaacacccggctgggtagtcccgcgagcaggggaggggccggaaccgatgtgtatgcggagaggtcgcagtcattgctgtgagcaggacacagtggcggctgacctgggagaagttacagagggacggggtgggagagggacgaggagtcgggaatggcccccaggctctcgtcctgagcggtcggctggacgtggggcgccactgaccaccgtggagaagcccgggggaggggaggtgctttctggctgcacactgacctatgttggggtgcccagggcaggatgtacacgctgctgtcgggcttgtacaagtacatgtttcagaaggacgagtactgcatcctgatcctgggcctggacaatgctgggaagacgaccttcctggagcagtcgaaaacccgatttaacaagaactacaaggggatgagtctatccaaaatcaccaccaccgtgggcctaaacatcggcactgtggatgtgggaaaggctcggctcatgttctgggacttaggagggcaggaagagctgcagtctttgtgggacaagtattatgcggagtgtcacggcgtcatctacgtcattgactccaccgacgaggagaggctggctgagtccaagcaggcgtttgagaaggtggtgaccagcgaggcgctgtgcggtgtccccgtcttggtgctggccaacaagcaggatgtggagacgtgcctctcaatccctgacatcaagacggccttcagcgactgcaccagcaagatcggcaggcgagattgcctgacccaggcctgctcggccctcacaggcaaaggggtgcgcgagggcatcgagtggatggtgaagtgtgtcgtgcggaatgtgcaccggccgccgcggcagagggacatcacgtaggcgcagccgcgctgccgtcgggacggctggtcccctggtgctggaggagtggcctcctgttggctcccatgctgctgatctggggggtgggtttgctttgctttggggttcttctatttactttgttttctcgaagacaaactttcctctatgtctggaaaagcgtaggcatccggaggctttggaggggagtctggcagcccggctggcccaggccctgcagcggcagcctttccacagggcgcagcggcggcctttcgaggccctttctggggggtctgagggagacctggttgggaattggggctccagtgctcaggctggcttgggctgcatgaggacagccctgtgggaccctcgggagaccccgtggctgtctccgccccatcgaggaggaggcccgtcagccatggctgccatctggcttctgccctgtgaccccgtgaccccgtgaccccgaagtggtctggggctgatcttgccttgaggaagacccaggccatgttcccaaaggccagcgggggccctggattgtgatgcagcctcgggacagggctgaggcctgcgggggaagacctataccccacgcctgggcctggcttcacctcaccctaatcccccgggagggagctgactgatgcaaaaagctgagggggcctgctgggagtggctgtttttatgccccagccccgcaagttggggagtgtttgtgggggtccagagccctcccccagccaggagagaacctcccggaggggttctctgtggggccctgtgtcccctgctcgggagtaaggctggtcctggggtcctccctgcacggaccccactgggcctgccgagtgctgtgttcttcctcagtctggctgtgggcaggagcggcctgcccagtgtcacccagggtgagtgcaaaataaagacggcgagtgtggctctgtccatcccttccctcctggagggtggaggctcctggctgttggacacggtgatggtgttactgggctgctcaggggctggtgggcaggtgaggggctccccaggtgggcctggagagtccaggcactcccttcctgcggatgtgggaaggacatggggtcctgggaggagctgctgggaaggggcatgagtcagggtgggggtggcgcagcagctgcggggctgtgactcacaggagtcgggccctggaagtccccgcgtcctctccaggggaccctgtgtgtgttctgcaggttggttcccaggacctgggggggacctccagccccgggaacctggccgtgctggggaggcgagtggctggtgcagccccccggttgctctgggtgcatcgggaggcttcagagcctgccccagagagggagaagcttcacttcccggaaagcatgggaggcctggaggaggtctttggcaggtcccctctcgggaaatcccctgtgagttgggagtgggaggaattcataagtggggggttagtgtgggccccggcgactagggctggcctgagccccatcctgttcttccagcaatgataccctcccaggccctgaccctcgctgagcttcaggggcccctgccacgtgccacagccactgggggcagaggtggcactccccactgatcctcccagggagggtctgtctgaggtaggggaagccccgggcagcagttctgatggcaggcagcctgagggatctgggcacagcgggcggctcaggtgtccccggctgccctcccagtagctgtgcaactacaaccagttttatgaaaaagctttataaaaataagctttaag

SEQ ID NO: 1473 - DNA, 2209 bp, Homo sapiens
  source 1..2209: mol_type = genomic DNA
agcagacaagatggcttccgggatttggcggcgcctttgtctctcgctgcagccggagctccaggtctcgctttcattgctctgtgtcctctgctcctagaggtccagcctctgtgggcctgtgacctgcagaaattgagagatccacagctaagactccaggaccccctggaagcctagaaatgggactgttgacatttagggatgtggccatagaattctctctggaagaatggcaatgcctggacactgcacagcggaatttatataaaaatgtgattttagagaactacagaaacctggtcttcctgggtattgctgtctctaagcaagacctgatcacctgtctggagcaagaaaaagagcctttgactgtgaagagacatgagatggtgaatgaacccccagtaatgtgttctcattttgcccaagagttttggccagagcagaacataaaagattcttttgaaaaagtgacactgagaagatatgaaaaatgtggaaatgataattttcagttaaaaggctgtaaaagtgtggatgaatgtaagttgcacaagggaggttataatggacttaaccaatgtttaccaactatgcagagcaaaatgtttcaatgtgataaatatgtgaaagtctttaataaattttcacattcagatagacataagataaaacatatggaaaataaacctttcaaatgtaaagaatgtggcagatcattttgcatgctttcacacctaactcgacatgaaagaaattataccaaggtgaatttctgcaaatgtgaagaatgtgaaaaagctgttaaccaatcttcaaagcttactaaacataaaagaatttatacttgtgagaaactctacaaatgtcaagaatgtgacagaacttttaaccaattctcaaaccttactgaatataaaaaagattatgctcgagagaaaccatacaaatgtgaagaatgtggcaaagcctttaaccagtcctcacaccttactacacataagataattcatacaggagagaaaccctacaaatgtgaagaatgtggcaaagcctttaaccagttctcaaatcttactacacataaaaaaattcatactggagagcaaccctacatatgtgaagaatgtggcaaggcttttacccaatcctcaacccttactacacataagagaattcatactggagaaaaaccctacaaatgtgaagaatgtggaaaagcttttaaccgatcctcaaaacttactgaacataaaaacattcatactggagagcaaccctacaaatgtgaggaatgcggcaaagcttttaaccgatcctcaaatcttacggaacataggaaaattcataccgaagagaaaccctacaaatgtaaagaatgtggcaaagcttttaaacactcctcagcccttactacacataagagaattcacactggagagaaaccctacaaatgtgaagaatgtggcaaagcttttaaccgatcctcaaaacttactgaacataagaaacttcatactggaaagaaaccctacaaatgtgaagaatgtggcaaagcttttatccaatcctcaaaacttactgaacataagaaaattcattctggagagataccctacaagtgtgaagaatgtggcaaagcttttaaacactcctcatcccttactacacataaaagaattcatactggggagaaaccctacaaatgtgaagaatgtggcaaagcttttagccgatcctcaaaacttactgaacataagataattcatactggagagaaaccctataaatgtgagagatgtgacaaagcttttaaccaatctgcaaaccttactaaacataaaaaaatacatactggagagaaactacagaactggaatgtgtgataatgattttgacaacacctcaaatttttctaaatataaaggaaatcatactggtgaaaaattctagaaatgtaaagaatgtgtcaaagactttaaatggttttcacacttcattgtatgtaagataattcatactggagaaaactacaagtgtgaagaatttggcaatactgttaattaaggctcaaaccttattgcacaggaaagcgtttatacttaagaaaaattgtacaaatataaagagtgtaaaatagccattaatatctgttgacatcttaatatcagaatgttggtacttaataaaagcattataaatgcaa

SEQ ID NO: 1474 - DNA, 2515 bp, Homo sapiens
  source 1..2515: mol_type = genomic DNA
aaaatggatcctcacttcttcacttggatataataatatagactgccgacattctgggaactgatcagtcttccagcttccagtgtggtgccctccctcaattgtgctgagtgtcccccaatccagagatattctgtaatttcttcctcagaaagaaacaaaacaaaattctgatcttcccagatgaagataatggattctgaattaatgcatagtatagtaggaagctatcataaacctccagaaagagtatttgttccctcattcacccagaatgaaccatctcagaattgccatcctgcaaacttagaagttacctctcctaagatacttcatagcccaaatagccaagctcttattttagccttaaaaactcttcaggaaaaaattcatcgtttagagctggagagaacacaagctgaagataacctgaacattctttccagagaagcagcacagtataagaaggccttagagaatgaaacaaatgagagaaatctggcacaccaggagctgataaagcagaaaaaagatataagtatacagttaagctcagcccagtctcgttgtactcttctagagaagcaactagaatatacaaagagaatggttctcaacgtagagcgagaaaagaacatgatcctagaacaacaggcccagcttcagagggaaaaagaacaagatcagatgaagctgtatgcaaaacttgaaaagcttgatgtcttagaaaaagagtgtttcagacttacaacaactcagaaaactgctgaggacaagattaaacatttagaagaaaaacttaaggaagaagaacatcagcgtaagctatttcaagacaaagcttctgagcttcaaactggacttgaaatcagtaaaattataatgtcttcagtttcaaatctaaagcactccaaggaaaagaagaaatcttcaaagaaaactaaatgtataaagagacgaccaccttggcaaatttgttcaaagtttggagcactgccttttgtggctgaaaagatgaggcaacatcgtgacccacatatccttcagaaaccttttaacgtgactgagactagatgtctccccaagccttctagaacaacttcctggtgtaaagctattcctcctgactcagaaaagtccatttccatttgtgacaatttatctgaacttttgatggcaatgcaagatgagctggaccaaatgagcatggagcaccaagaactactgaaacaaatgaaggaaactgaaagtcattcagtctgtgacgacatagaatgtgaactagagtgtttactcaagaaaatggaaattaaaggagaacaaatctccaaactgaagaagcatcaagacagtgtctgtaaactgcagcaaaaagttcaaaactcaaagatgagtgaagcttcaggtattcagcaagaagacagctaccctaaaggatcaaagaacataaaaaatagccccagaaaatgtttgactgacactaacctttttcagaaaaacagcagctttcatccaatacgagttcataatcttcaaatgaaattgagaagagatgatatcatgtgggaacagtaacaaaacagcaaaactgtcaccttaatgaactttgtcagtgagaccttgaattgtctaaagtggttttaatttaatataactttgtgacattttgaatcatgtttctagtttctataaaacatgaagttgcagtatttaaaaattaatgcctaatgacctggtgggttccaaataataaattaattgcttttttatttttcttattgattgaagcccgtaacctcatcttgtcttagaaacattgttggctttgcagatatcttaagctaaatttaagaaattgtactagattgacaatattcaaaattgagttaaatccaagctacaagtaccattcattccacttttcatttagtaggtttggaaccttaaaaaccaatgttcaatgaacagagttcagaaagatcatttagctttcctggtgccttctttctattttgttttagagctgtgaaatgtttttctcttttggaaaaggaaaaacttaatagttacacagttttgtgaagaagcctttaatccaagttttatgagacagtaggaacctatagctacttaatttttaggagacagtaattcagttgcagaagctttcctctgctattcccattctcttttacaaaactagttttttttaaaaaatcaatgatcaattttatcttactactttataacttttgctgacttttattctttgcattgtatgtaatgtccatcagtataaattgagactgtgaatttctaggacccacaaaagtggtattttttttttgtacaagaaagtatagaggaagaggaagctgggcattaaattacctcatccagcagaaattcacggtagtatggtatatttttattttttatattttaaaatcaataatgtcaaatgtcattgtgtatgcatgctttataataaatttacacttgatcatttttctgg

SEQ ID NO: 1475 - DNA, 2475 bp, Homo sapiens
  source 1..2475: mol_type = genomic DNA
agcaagggaagtgacaggaaatggagctggggagacaaaaatgtggataacaacaaaagaatttcaacaggtaaaaaaatgagtcaaacatctctcaaacagaaaaagaatgagcctggaatgaggtcctcaaaagagagtctagaagcagaaaaaagaaaggaatctgacaaaacaggagttcgtctgagcaatcagatgaggcgtgcagtcaatccgaatcactcgctgagatgttgccccttccagggtcactcgtcgtgtagacgctgcctttgtgcagctgagggaacagcccttggcccctgccacacaatacgtatttatattcacatgtgcctgttgtgggagcagggccagcagatcaccatgatgaggggatcacaagaatcatcactgcggaagacagactctcgagggtaccttgtgcgcagtcaatggtctagaatatcccggagcccatccaccaaggctccatccatagatgagcctagaagcaggaacaccagtgctaagctccccagcagctccacgagctcccggactccatccacctccccaagcctgcatgactcctcaccgccgccgctgtccgggcagccctcgctccagccacccgcgtcgccccagctgccccggtcgctggactcgcggcctcccacgcccccagagcccgatcctggctcccggcgcagcaccaaaatgcaagagaatccggaggcctgggcccaaggcatcgtgcgggaaatccgccagacccgggactcgcagccgctggaatattcgcgcacgtcccccaccgagtggaagtcctccagccagcgcagggggatctaccccgcctccacccagctggaccgcaactctctgtccgagcagcagcagcagcagcgggaggacgaggacgactacgaggctgcctactgggcatccatgaggtcgttctacgagaagaacccgagctgctcgcgcccctggccgcccaaacccaagaacgccatcaccattgctctctcatcctgcgcgctcttcaacatggtggacggcaggaaaatctacgagcaagagggtctggaaaagtacatggagtatcagctcaccaatgagaacgtcatcctgaccccgggcccggcgttccgcttcgtcaaggcactacagtatgtcaatgctagactccgtgatctatatcctgatgaacaggacttatttgatattgtactgatgactaataaccatgcccaagtgggagtgcggcttataaacagcgtcaatcactacggcttactgattgaccgcttctgtctgaccgggggaaaagaccccattggctatttgaaggcatatcttaccaacttgtatattgctgcagattctgaaaaagtgcaagaggcaatacaagaaggtattgcctctgcgacaatgtttgatggagccaaagacatggcttactgtgacactcagctccgtgtagcctttgatggggatgctgtcctcttctctgatgagtctgaacattttaccaaggagcatgggctcgacaaattcttccagtatgatacattatgtgaaagtaagcctcttgctcagggtcccctaaaaggctttctggaagatttaggcagactgcaaaagaagttctatgccaaaaatgaacggttactttgtcctatcaggacctacctggttacagctaggagtgcagccagttcaggcgcccgtgtgctgaagacccttcgacgctggggtctagagatagacgaagctcttttccttgctggagcccccaaaagtcccatcttggtgaagatccggccccacatcttctttgatgaccacatgttccacattgaaggggcacagaggttaggttccatcgcagcttatggctttaataaaaaattcagtagttaggggcagggaggagaaataaagtggtgatagtctggtgttacagaagccacttcttttggctctctaggataattagataggtatttcagaaaattggaccttaaaactttgcttctttggaaaggttttctcctgattttttggaaaaccttttgaaccctcaagttaccatcaaactacttctctttgaactaccaatactgttgaatgccattacacctatctctgtgtaagtcataatgatgactctttaggataagtttagaacttgaatatttgcatgcttaaggcactgttttagaagcttacttagttttataaacactgctcatttttggatgtttgtagataacaatgaattgttacccatcagcattgtagaatagtgtcttcaaaggtagaaggagtatggttaagcacactcttgaaaactggagctttgtattctgtgactgctatggctagctttgtaaccaaagcaaaatgagaatttcactctacctgcatgagtataacaattttgatactgctcatttagaaataaatcatctggttgttcctcca

SEQ ID NO: 1476 - DNA, 1838 bp, Homo sapiens
  source 1..1838: mol_type = genomic DNA
gctgggctgggcttgctgaggtagaggcagcgccaagaagaggcctttgccgctggtcgggattgggatgtcgaagaacacagtgtcgtcggcccgcttccggaaggtggacgtggatgaatatgacgagaacaagttcgtggacgaagaagatgggggcgacggccaggccgggcccgacgagggcgaggtggactcctgcctgcggcaaggaaacatgacagctgccctacaggcagctctgaagaacccccctatcaacaccaagagtcaggcagtgaaggaccgggcaggcagcattgtcttgaaggtgctcatctcttttaaagctaatgatatagaaaaggcagttcaatctctggacaagaatggtgtggatctcctaatgaagtatatttataaaggatttgagagcccgtctgacaatagcagtgctatgttactgcaatggcatgaaaaggcacttgctgctggaggagtagggtccattgttcgtgtcttgactgcaagaaaaactgtgtagtctggcaggaagtggattatctgcctcgggagtgggaattgctggtacaaagaccaaaacaaccaaatgccaccgctgccctgtgggtagcatctgtttctctcagctttgccttcttgctttttcatatctgtaaagaaaaaaattacatatcagttgtcctttaatgaaaattgggataatatagaagaaattgtgttaaaatagaagtgtttcatcctttcaaaaccatttcagtgatgtttataccaatctgtatatagtataatttacattcaagtttaattgtgcaacttttaacccctgttggctggttttttgttctgttttgttttgtattatttttaactaatactgagagatttggtcagaatttgaggccagtttcctagctcattgctagtcaggaaatgatatttataaaaaatatgagagactggcagctattaacattgcaaaactggaccatatttcccttatttaataagcaaaatatgtttttggaataagtggtgggtgaataccactgctaagttatagctttgtttttgcttgcctcctgattatctgtactgtgggtttaagtatgctactttctctcagcatccaataatcatggcccctcaatttatttgtggtcacccagggttcagagcaagaagtcttgctttatacaaatgtatccataaaatatcagagcttgttgggcatgaacatcaaacttttgttccactaatatggctctgtttggaaaaaactgcaaatcagaaagaatgatttgcagaaagaaagaaaaactatggtgtaatttaaactctgggcagcctctgaatgaaatgctactttctttagaaatataatagctgccttagacattatgaggtatacaactagtatttaagataccatttaatatgccccgtaaatgtcttcagtgttcttcagggtagttgggatctcaaaagatttggttcagatccaaacaaatacacattctgtgttttagctcagtgttttctaaaaaaagaaactgccacacagcaaaaaattgtttactttgttggacaaaccaaatcagttctcaaaaaatgaccggtgcttataaaaagttataaatatcgagtagctctaaaacaaaccacctgaccaagagggaagtgagcttgtgcttagtatttacattggatgccagttttgtaatcactgacttatgtgcaaactggtgcagaaattctataaactctttgctgtttttgatacctgctttttgtttcattttgttttgttttgtaaaaatgataaaacttcagaaaat

SEQ ID NO: 1477 - DNA, 5740 bp, Homo sapiens
  source 1..5740: mol_type = genomic DNA
aaacaccatgccctgccatctctgggtcttagagtcaccctaacatctgatctagattaattatcatcatgtgcgaggttttggcatgaagcacgccaggctcaccgtttcatgatcttagactatttacagcaaactcaaacagctcacttgctttttacaccctgcaaagaccaagggagagcctggaggggttgttttttttttctgttttattctatcaaagcagcaaatactgcaatttccacagtaaatggtcacagtggggaccaatatcctgccctccagacccgctgcttcagccaatacagcaagggaagacgcagctctgttttctagaaggatcccaccgaggcataaaaacggcgcagcccagcctggcgccgcgccgggtcccggagccccgggcgcgaacatggggaatgcgcactccaaaagcggggacaggcacagcgcgctccccggccgccccgagctgtctttttacggctctttccccaggaaatggagcgagaacgtcttcttggataacgagctgctgacctccaagatcctgtctgtgctgcggccgcagtcggagcggggcttccgcgccggggacctccgctacccgacccactttctcagcaccaactctgtccttgcctctgtcacagcctcgctcaaggagcacccccggggcaccctcctgtccgatggcagcccggccctgtccaggaatgtcggtatgacggtctctcagaaagggggtccccagccaacaccgagcccggctggccctgggacgcaactcggaccaatcacaggagagatggatgaagccgattctgcgtttttaaaatttaagcagacagctgatgactctctgtcccttacatctccaaacaccgagtccatttttgtagaagatccctacaccgcctcgctgaggagtgagattgagtcagacggccacgagtttgaagctgagtcctggagcctcgccgtggatgcagcctacgccaagaagcaaaagagggaggtggtgaaaagacaagatgtcctttatgagctgatgcagacagaggtgcaccacgtgcggacgctcaagatcatgctgaaggtgtactccagggccctgcaggaggagctgcagttcagcagcaaggccattggccgcctcttcccatgcgctgacgacctgctggagacgcacagccacttcctcgctcggctcaaggagcgccgccaggagtccctggaggagggcagtgaccggaattatgtcatccagaaaatcggcgacctcctggttcagcagttttcaggtgaaaatggggagagaatgaaagaaaagtacggtgtgttttgtagtggccacaatgaagctgttagtcattacaagttgctgcttcagcaaaacaagaaatttcaaaacttgatcaagaaaattggcaacttctccatcgtgcggcggcttggcgtgcaggagtgcattctcctggttacacaacgcataaccaaatacccagtgctggtggagcgcatcatccagaacacggaagctggcactgaggactatgaagacctgacccaggccttgaacctcatcaaagatatcatctcacaagtggacgccaaggtcagtgagtgtgagaagggccagcgcctcagggagatcgcagggaagatggacctgaagtcttccagcaaactcaagaacgggctcaccttccgcaaggaagacatgcttcagcggcagctccacctggagggcatgctatgctggaagaccacatcagggcgcttgaaagatatcctggctatcctgctgaccgacgtacttttgctgctacaagaaaaagatcagaaatacgtctttgcttctgtggactcaaagccacccgtcatctcgttacaaaagctcatcgtgagggaagtggccaacgaggagaaagcgatgtttctgatcagcgcctccttgcaagggccggagatgtatgaaatctacacgagctccaaagaggacaggaacgcctggatggcccacatccaaagggctgtggagagctgccctgacgaggaggaggggcccttcagcctgcccgaagaggaaaggaaggtggtcgaggcccgcgccacgagactccgggactttcaagagcggttgagcatgaaagaccagctgatcgcacagagcctcctagagaaacagcagatctacctggagatggccgagatgggcggcctcgaagacctgccccagccccgaggcctattccgtggaggggacccatccgagaccctgcagggggagctaattctcaagtcggccatgagcgagatcgagggcatccagagcctgatctgcaggcagctgggcagcgccaacggccaggcggaagacggaggcagctccacaggcccgcccaggagggctgagaccttcgcgggctacgactgcacaaacagccccaccaagaatggcagtttcaagaagaaagtcagcagcactgaccccaggccccgagactggcgaggccccccaaacagcccggacttgaagctcagtgacagtgacattcctgggagctctgaggaatcgccgcaggtggtggaggcgccaggcacggaatccgatccccgtctgcccaccgtcctggagtcggagcttgtccagcggatccagacactgtcccagctgctcctgaaccttcaggcggtaatcgcccaccaggacagctatgtggagacgcagcgggctgccatccaggagcgggagaagcagttccggctgcagtcgacgcgtgggaacctgctgctggagcaggagcggcaacgcaacttcgagaagcagcgggaggagcgcgcggccctggagaagctgcagagccagctgcggcacgagcagcagcgctgggagcgcgagcgccagtggcagcaccaggagctggagcgtgcgggcgcgcggctgcaggagcgcgagggcgaggcgcggcagctacgcgagcggctggagcaggagcgggccgagctggagcgccagcgccaggcctaccagcacgacctggagcggctgcgcgaggcccagcgtgccgtggagcgcgagcgggagcgcctggagctgctgcgccgcctcaagaagcagaacaccgcgccaggcgcgctgccgcccgacacactggccgaggcccagcccccaagccaccctcccagcttcaacggggaagggctggagggccctcgtgtgagcatgctgccatccggcgtggggccagagtacgcagagcgccccgaggtggctcgccgggacagcgcccccaccgagaaccggctggccaagagcgatgtgcccatccagctgctcagcgccaccaaccagttccagaggcaggcggccgtgcagcagcagatccccaccaagctggcggcctccaccaagggtggcaaggacaagggcggcaagagcaggggctctcagcgctgggagagctcagcgtccttcgacctgaagcagcagctgctgctcaacaagctcatggggaaagatgagagcacctcacggaaccgccgctcgctgagccctatcctgcccggcagacacagtcctgcgcccccaccagaccctggcttccccgccccgagcccaccgccagctgacagcccctccgagggcttctctctcaaggccgggggcacagccctcctgcccgggcccccagctccctcgccactgccggccacaccactcagcgccaaggaggacgccagcaaagaagacgtcatcttcttctaaaagggccgtgactcaaggaaagtttttaatggaaagttgagccagaactaaaccagggagctgtctgaaatcatagcaccccatccgggtggcggggagatcaactccgagctgtttttccgaggcagtgaggaacggtgccggctctgcacggagctgaggacaggacagaccttgctttgagaaggagctgccggccggggccacgctccacagccgccgcgcgacagtggagccaagggttagggcaccaggaggggccaggtggcgtcggcagcatctgtccccagaatcaggcagaatccacttcccaaacagagccccacgcaggttcaccatgaacctcagggtcagggaatgagccaggcacgggggcatgggcagagagggccacggggcagggcccactgagggaacatcagtggccctccagtcaggttctgtgggtttggaagcccatcgtgaaaggggctgacctttgcccctttttacttggcattggttttgaaaccagctgtttcccaaactctgcttcccaagggcaaccgttgctgttcacacgctcagcctgtctgggggagcgggcctctagcttcagccagggcgggtacacaccctgggcacagggtcctcagcccccgggaaatgagctcccagggctggcgtcccaccttccaggtgggggctggcacatcacagactgtcgagagcgccatgtcccagggcatgcagaggatgcacctagagacgttgcagcaagtggacaagtggccgctgtgcgggcccctcgcttgtagtgagctgttgcagcttacggtccgttccctggaggggtggaggaaggaggtgttgggcagcatcaaaggtgctgggacatcccagggtggtgagatccatccacgatccagctccggtggagaaagggcccatgtcaagccttgttctgcaccccaagcattggtggtaggactgggtcctggctgatcgtccttgttcccagtggggtacatgtgagcccctgccagggccaagtccttctcccgaacccagggtcctgggaactgcagatcccggggggattcagcccttctcccactgtgctggcagaggcactcctgtgacgctgaatacagtgaacagggacattcccgccactcggggacagatgggcacaagggaggggaaactccatcaggaagtgctcccctgggcagaggcgcccactgggtgctgtgggctcaggagggggcggggcaggagctggtgccaaccgggaaccagagccccacagccatacagcccattggtgacaaggtcctgagaacacagtggccaggtgtccccaggctcctggcccctccgacgacctcaactctgcccagcccggtccctggccatcagcgacgctgtccgccccccgtcagatcccatgtgtgccatgtttatcatcagtgttttgtatttttgtactgagtatcggagcactttacagaagctgactgtacattcctgttctgttgtgaagagaacattcccagaccctggcaccctcctgagccggcgtgtgccggtccagccctccgagatgccacaattccttggatgggggagaagttcaaggaatttctgctcggccacgcggtgggaaccccgcgtccccgccatgtggcagaggggtctcagtcgtgctaggcatcgggcggcagcgccgacagcccttccctcgccagtgcccctcggccactcctgggttggagcccgattttatttgtaaagttgacagtcgagcaaatgttcctattttcgtgggatctgcacacgtctttgtcagttgtggtcatgatcttagtcacctgctaattatttttacaatgattacaacatttcctcactgcgggatatttctgacccgctttagaacttaagacctgattctagcaataaacgtgtccgagatgagcggtg

SEQ ID NO: 1478 - DNA, 2034 bp, Homo sapiens
  source 1..2034: mol_type = genomic DNA
gttgagaggccccaagacccagttcctttacagaatcaaccctggggtggctttaggactgggctctttggagctcatccttggacccacagtggagtgctggtccgtgctgatgtcttcagataccaatcaatgggcatttggctccttgcttccactgacctcttgagtactttcaacgatcggtgtcaggagtgccccagctgctgtttctagagcatctctgcaacccacggtggcctctcctctctctgcgggccatggacagcacagtcccttcagccctggagctgccccagcggctggcactgaacccaagggagagcccgaggagtccagaagaggaggagccccacctgctgagcagcttggctgcagtccagaccctggccagtgtcatccggccttgctatggcccccacggccggcagaagttcctggtgaccatgaaaggagaaacagtgtgcacggggtgtgccactgccatcctcagggccctggagctggagcacccagcagcatggctcctccgggaagcaggacaaacccaggcagagaatagtggggacggcacagccttcgtggttctgctgacggaagccttgctggaacaggcagagcagctgctgaaggctggcctgcctcgcccgcagctccgggaggcctacgccacggccactgcagaggtcctggccacactgccctccctggccatccaatctctggggcctttggaagatccatcctgggccctccattctgtgatgaatacccacaccctgtcccccatggaccacttgaccaagctggtggcccacgcctgctgggctatcaaggaactagacggcagcttcaagcctgagcgtgttggggtgtgcgcgctgcccggggggacactggaggattcctgcctcctcccggggttagcaatatctgggaagctctgtgggcaaatggccacagtgttaagtggtgccagggtggctctctttgcttgcccctttggtcctgcccatccaaatgcaccagcaacggcccgtctttctagtcctgctgatctagctcaatttagtaaaggaagcgatcaattactagaaaagcaagtaggccagctagcagctgcaggaattaatgtggcagtggtgttgggggaggtcgacgaggagaccctcacactggcggacaagtatggcatcgtggtgattcaagctaggtcttggatggagatcatttacctgagtgaggtgttggacacacctctgctgcctcgtctgctccctccccagaggccaggcaagtgccagagggtttacaggcaggagctgggagatggtttggctgtggtatttgaatgggaatgtacaggcacacctgccctcactgtggttctcaggggagccaccacccaggggctgcggagtgcagagcaggccgtctaccacggcattgatgcctatttccagctatgtcaagatcccagactgattccaggagctggggccacagaaatggctttggcaaaaatgctttctgataaaggaagcagattggaagggcccagtgggcctgcattcctagcatttgcctgggccctgaagtatcttcctaaaactttggcagagaatgcaggcttagctgtctcagacgtgatggcagaaatgagtggagtgcaccaaggtgggaacctcctaatgggtgtgggaactgaagggataataaatgtggcccaggaaggggtgtgggacaccctaatagtcaaagcccaaggatttcgagcagtggctgaggtggtgctacagctcgtgactgtagatgaaatcgtagtggccaagaaaagtcccacacatcaggagatctggaatcctgactctaagaagacaaagaaacacccacctcctgtggaaacaaaaaaaatccttggattgaataactagtgataccctcaataaaacagggattgccaagaagggaacaatcaccccaaaaatgaatgtttgcctttattccgtgtttggtacttgattcactttcttt

SEQ ID NO: 1479 - DNA, 2900 bp, Homo sapiens
  source 1..2900: mol_type = genomic DNA
ggcagtcaggcctccccgctctgtgctacctgcggcccggctctcctccgcgcccccactcgcgctgcgatgacgcgctcactgttcaagggaaacttttggagtgcagacatcctcagcaccatcggctatgacaacattatccaacatctgaacaatggccgcaagaactgcaaagagtttgaagactttctaaaagaaagggcagcaattgaagagaggtatggcaaagatctgctcaacctctctaggaagaagccgtgtggacagtctgaaatcaacaccctgaagcgggcccttgaagtcttcaagcagcaagtagacaatgtggcacaatgtcacattcagcttgcacagagtttaagagaagaggccaggaagatggaagaattcagggaaaagcaaaaactacaacgaaaaaagacagagctcataatggatgctatccataaacaaaagagcttacaattcaagaaaaccatggatgcaaagaagaactatgagcagaaatgccgggacaaagatgaggcagaacaggccgtcagccggagtgccaacctggtgaacccgaagcaacaagaaaagctttttgtgaaactggcaacttcaaagaccgcagtagaggactcagacaaagcatacatgctgcacatcggcaccctggataaggtccgagaagagtggcagagtgagcacatcaaggcctgcgaggcatttgaggctcaagaatgtgaacgaataaacttcttccggaatgcattgtggttacatgtgaatcagctgtcacaacaatgtgtcaccagtgatgaacacccatcatgtatgagaatttctactcctcccagaagaatgcagtcccagcaggaaaggctacagggcctaacttggcaaggagaggacccctcccaattcctaaaagctcaccagatgatcccaattactctttggttgatgactacagtttgctctatcagtaaaatcaatgaaaccagagctttttccggctagtgcttctgtgatatggaaagggcacccagagcagcaggacctatagccacgttatgtcagcaatgaagactttgaagtgaacccttgctataattttttagagatttaaaatttatggtagacatttaggacaacataagcaagtagagttctgcagttttttgaagtttacaaattgccccattctgaagaattattctttcccagttactcaggttatgaatgaattaggttttcaacatgggaagcatgaaatccacttctggatttggagcatccacttgaggagcagaggtggcagcagaggattctgagccaccaactgcagtagtggctcctttggctttgggcagcctggctgtggagtttccacggcgacacacagcctcagtggtgcaagatttaaaattaccttcctttttggctggaagacttagaagccgcctgatcatactttctcattttacagatgaggaaataaagcctacaagtgtgaaattaatttccttacagttttcctagctgatgagggacagaaccagaactagagcctgagcccaacccacatcactattcttctaacccttcctgaagttgtgatgctcatgctgaaatttaagatgccaaatatttttgccagcactttttcagttgggagaatcaccagggtttaaatgtcagatttatttttatgtggatccctgtgtatgctgaactacagagcatgatgtttaatctaatttaaggagccactgattgtaaaacatgccattattttatgttgcactaagaaggtggggtcgaggagttgccaataaacttgggacagactattgatggccaagcccatctgaatttaagatgctaaagtatgaaaaaaatacatcttagaatcaatgaaataccatattttgattccattcctcaagataattttagagttataaaaccagtcctcaattttgggtcttcacagagaatctttcccttgctagaccccagaattttaaatgcatccgtcttacactttcacaaatatttgggttttcctttttcactcacaaacagcagggaggtcatgtactttttgtacaacacctgtgcactatgagaaaatggtaccttttagttattgacaagttaaaatagcactctcagtttttcagtattacagagagcaaatagtttcctctcctgctctgtgcagtagcttttccagaactatggacaaattgatcagaagaagattgattatttcctcatctttttttcttttttttgagacagagtctctctctgtcccccaggctgaagtgcagcggcatgatctcagctcactgcaacctctgcctcccgggttcaagtgattctcctgcctcagcctcctgagtagctgggattacaggcacccaccaccacacctggctaattttttgtatttttagtaaagacagggttttaccatgttggtcaggctggtctcaaactcctgacctcaggtgatccacctgcctcggcctcccaaagtgctgggattacaggcgtgagccactgcgcccggcctatttccccacctttcgtgtaaggtgctactgaacatgacagcttcttgtcatgacaggaaacttgcatcagttggatatccttttgagaaactgaattttgcaaagggccaaatttccccaaactgaacgggctcaggaaatgttcctttacactcagaacattctattttaagtatattatttattgttggcagttcctcagggatttcccttttctctgtattggtcagtgtagttgatgtaaaaccgttttgtggatggaaaatatttttattttattgctcttttagtttggtaggttaaataaaggttcttggtaatttggga

SEQ ID NO: 1480 - DNA, 4948 bp, Homo sapiens
  source 1..4948: mol_type = genomic DNA
taggcgccattttcgagtgaaggacccggagccgaaacaccggtaggagcggggaggtgggtactacacaaccgtctccagccttggtctgagtggactgtcctgcagcgaccatgccccgtaaaggcacccagccctccactgcccggcgcagagaggaagggccgccgccgccgtcccctgacggcgccagcagcgacgcggagcctgagccgccgtccggccgcacggagagcccagccaccgccgcagagactgcaagtgaggaacttgataatagaagtttagaagagattttgaacagcattcctcctcccccgcctccagcaatgaccaatgaagctggagctcctcggcttatgataactcatattgtaaaccagaacttcaaatcctatgctggggagaaaattctgggacctttccataagcgcttttcctgtattatcgggccaaatggcagtggcaaatccaatgttattgattctatgctttttgtgtttggctatcgagcacaaaaaataagatctaaaaaactctcagtattaatacataattctgatgaacacaaggacattcagagttgtacagtagaagttcattttcaaaagataattgataaggaaggggatgattatgaagtcattcctaacagtaatttctatgtatccagaacggcctgcagagataatacttctgtctatcacataagtggaaagaaaaagacatttaaggatgttggaaatcttcttcgaagccatggaattgacttggaccataatagatttttaattttacagggtgaagttgaacaaattgctatgatgaaaccaaaaggccagactgaacacgatgagggtatgcttgaatatttagaagatataattggttgtggacggctaaatgaacctattaaagtcttgtgtcggagagttgaaatattaaatgaacacagaggagagaagttaaacagggtaaagatggtggaaaaggaaaaggatgccttagaaggagagaaaaacatagctatcgaatttcttaccttggaaaatgaaatatttagaaaaaagaatcatgtttgtcaatattatatttatgagttgcagaaacgaattgctgaaatggaaactcaaaaggaaaaaattcatgaagataccaaagaaattaatgagaagagcaatatactatcaaatgaaatgaaagctaagaataaagatgtaaaagatacagaaaagaaactgaataaaattacaaaatttattgaggagaataaagaaaaatttacacagctagatttggaagatgttcaagttagagaaaagttaaaacatgccacgagtaaagccaaaaaactggagaaacaacttcaaaaagataaagaaaaggttgaagaatttaaaagtatacctgccaagagtaacaatatcattaatgaaacaacaaccagaaacaatgccctcgagaaggaaaaagagaaagaagaaaaaaaattaaaggaagttatggatagccttaaacaggaaacacaagggcttcagaaagaaaaagaaagtcgagagaaagaacttatgggtttcagcaaatcggtaaatgaagcacgttcaaagatggatgtagcccagtcagaacttgatatctatctcagtcgtcataatactgcagtgtctcaattaactaaggctaaggaagctctaattgcagcttctgagactctcaaagaaaggaaagctgcaatcagagatatagaaggaaaactccctcaaactgaacaagaattaaaggagaaagaaaaagaacttcaaaaacttacacaagaagaaacaaactttaaaagtttggttcatgatctctttcaaaaagttgaagaagcaaagagctcattagcaatgaatcgaagtagggggaaagtccttgatgcaataattcaagaaaaaaaatctggcaggattccaggaatatatggaagattgggggacttaggagccattgatgaaaaatacgacgtggctatatcatcctgttgtcatgcactggactacattgttgttgattctattgatatagcccaagaatgtgtaaacttccttaaaagacaaaatattggagttgcaacctttataggtttagataagatggctgtatgggcgaaaaagatgaccgaaattcaaactcctgaaaatactcctcgtttatttgatttagtaaaagtaaaagatgagaaaattcgccaagctttttattttgctttacgagataccttagtagctgacaacttggatcaagccacaagagtagcatatcaaaaagatagaagatggagagtggtaactttacagggacaaatcatagaacagtcaggtacaatgactggtggtggaagcaaagtaatgaaaggaagaatgggttcctcacttgttattgaaatctctgaagaagaggtaaacaaaatggaatcacagttgcaaaacgactctaaaaaagcaatgcaaatccaagaacagaaagtacaacttgaagaaagagtagttaagttacggcatagtgaacgagaaatgaggaacacactagaaaaatttactgcaagcatccagcgtttaatagagcaagaagaatatttgaatgtccaagttaaggaacttgaagctaatgtacttgctacagcccctgacaaaaaaaagcagaaattgctagaagaaaacgttagtgctttcaaaacagaatatgatgctgtggctgagaaagctggtaaagtagaagctgaggttaaacgcttacacaataccatcgtagaaatcaataatcataaactcaaggcccaacaagacaaacttgataaaataaataagcaattagatgaatgtgcttctgctattactaaagcccaagtagcaatcaagactgctgacagaaaccttcaaaaggcacaagactctgtcttgcgtacagagaaagaaataaaagatactgagaaagaggtggatgacctaacagcagagctgaaaagtcttgaggacaaagcagcagaggtcgtaaagaatacaaatgctgcagagatttcaaaaatatcactgcatcctatagaagataatcctattgaagagatttcggttctaagcccagaggatcttgaagcgatcaagaatccagattctataacaaatcaaattgcacttttggaagcccggtgtcatgaaatgaaaccaaacctcggtgccatcgcagagtataaaaagaaggaagaattgtatttgcaacgggtagcagaattggacaaaattacttatgaaagagacagttttagacaggcatatgaagatcttcggaaacaaaggcttaatgaatttatggcaggtttttatataataacaaataaattaaaggaaaattaccaaatgcttactttgggaggggacgccgaactcgagcttgtagacagcttggatcctttctctgaaggaatcatgttcagtgttcgaccacctaagaaaagttggaaaaagatcttcaacctttcgggaggagagaaaacacttagttcattggctttagtatttgctcttcaccactacaagcccactcccctttacttcatggatgagattgatgcagcccttgattttaaaaatgtgtccattgttgcattttatatatatgaacaaacaaaaaatgcacagttcataataatttctcttcgaaataatatgtttgagatttcggatagacttattggaatttacaagacatacaacataacaaaaagtgttgctgtaaatccaaaagaaattgcatctaagggactttgttgaactttatgctgaagattcttcaagttgattcagtgtattactgatttttttctatttgtaaaggattatgagttgtataaaatacatactccctaaactagatcatgaaactggtttctgttttatgcagttgtcatttgtaaagtctaataaaatattctctataattgcttctagattacaaaaatatgacaatcttgtaagtagcagactatggagaaaaatgagttacctggagggtcaggtaacttgccaaactaaaaagtatgttagttgaggcaaagtcctaagcaaggttgtgctatcaaggctcagcataccttcgtgggcctttgatttaccaacactggaaatgcctgccaactaatcttggatagattctttaaggcattccacttagcttgccagttgagacaatcaccacagttattacccaaatactatgaacatatttttgtaaaccagtcattctgaattatagtgatgagaatttaaatatatgcttttctagaatttgatgtttgaccatttatgacttaattaccagagagccagtaaattaggacagtgtttcaacaagcctaggctatctcgtaagttgaaaaatatcccactatagttgcttcatgagtatgaagtaagatggcctctgatttacactggttcaatttacaaattttcaactttatgataggtttatccgggtactaaatgcatttcaacttgatagtttcaacttatgataggtttaccaggatgtagtcccactgttgaggagcatctatttaggggttaattactttagtaataagtggaaagtaagataccttgagtaatgtttgcctataaaattgtcagcgtatttttacactattggctcaagaatgttataatgctaagggacataagttggcaaccacttggtttttggaaggactttcggtattgtattagaagtctgccctagctgttaaatttctgggtatttatcctaaggaattaattaaagagttaattgttcctttcttcagtgggccattgttttagatatttaaaaaatccaacagtttctatcataatgtaactgtaaaaatgtaaacacattattagcatggacttttaaataaagatttaaagaaagc

SEQ ID NO: 1481 - DNA, 3177 bp, Homo sapiens
  source 1..3177: mol_type = genomic DNA
ggcaccgcggcgctcgggtgtttttgggggcccgggtggagggcccgggtgccggggcccaaggtgcggcctcgctagcgggagagggagcgggatcaccggcccggagagagctctcagggccagagcggggcaggaggatgctttcccagccccaccatggagctgcgctgtgggggattgctgttcagttctcgctttgattcagggaatctagcccacgtggagaaggtggaatctttgtccagtgatggggaaggggtaggaggtggggcgtcagccctgaccagtggcattgcctcttcccctgactatgaattcaacgtgtggacccgaccagactgtgctgaaacggaatttgagaatgggaacaggtcatggttctacttcagcgtccggggaggaatgccaggaaaactcatcaagatcaacattatgaacatgaacaagcagagcaagctgtattcccagggcatggccccctttgtgcgcacactgcccacccggccacgctgggaacgcattcgagaccggcccacctttgagatgacagagacgcagtttgtgttatcctttgttcatcgtttcgtggagggccgtggggccaccaccttcttcgccttctgctaccccttctcctacagtgactgccaggaactgctaaaccagctagaccagcgctttccggagaaccaccctacccatagcagccccctggataccatctattaccatcgggagctcctttgctattctctggatggacttcgtgtagatctgctgacgatcacttcctgccatgggcttcgagaagatcgagagccccgtctagagcagctatttcctgataccagcacccctcgaccattccgtttcgcaggcaagaggatattcttcttaagcagtagagtacacccaggggagactccatctagctttgtcttcaatggctttctggacttcatcctccgacctgatgatccccgggcccaaaccctccgtcgcctcttcgtctttaagctgattcccatgttgaaccccgatggtgtggtccggggacactaccgcacagactcacgtggagtgaatctgaaccgtcagtacctgaagcctgatgccgtcctgcacccggccatctatggggccaaagctgtgcttctctaccaccatgtgcactctcgtctgaactcccagagttcctctgagcaccagcccagttcctgtctccctcctgatgctcctgtttctgacctggagaaagccaacaatctccaaaatgaagctcagtgtgggcactcagctgacaggcataacgctgaagcctggaaacaaacagagccagcagaacagaagctcaacagtgtgtggattatgccacaacagtctgcggggcttgaagagtcagcccctgataccatcccccccaaagagagtggcgttgcttactatgtggacctgcatggacatgcttccaaaaggggctgcttcatgtacggaaacagctttagtgatgagagcacccaggtggaaaacatgctatatccaaagctcatctccttgaattcagcccacttcgacttccagggctgcaatttctcagagaagaatatgtatgcccgagaccgtagagatggccagtctaaagagggaagcggccgtgttgcaatctacaaagcctcagggataatccacagctacacacttgaatgcaactacaacactggacgctcagtaaacagcatccctgctgcctgccatgacaatgggcgtgccagcccccctcccccgccggctttcccctccagatacactgtggaactatttgagcaggtgggacgagctatggccattgcagccctggacatggcggaatgtaatccgtggccccgaattgtactgtcagagcacagcagccttactaatctacgggcctggatgctgaaacatgtacgcaacagccgaggcctaagcagcactctgaatgtgggtgtcaacaagaagaggggccttcgaactccacccaaaagtcacaatgggttgcctgtctcctgctccgaaaacaccttgagtcgggcacgaagttttagcaccggcacaagtgccggtggtagcagcagcagccaacaaaattctccacagatgaagaattcccccagctttccttttcatggcagtcggcctgcagggctgccaggcctgggctctagtacccaaaaggtcacccaccgggtgctgggccccgtcagagagccccgaagccaggacaggagacggcagcagcagcccctgaaccatcgtcctgcaggcagcctcgctccatccccagctcctactagttctggcccagcctcctcacacaagctgggctcctgtctactgcctgattcattcaacataccagggagcagttgctcactcttgtcctctggagacaaaccagaggctgtcatggtaatcgggaaaggtctgctagggactggagctcggatgccctgcatcaagactcgattgcaggctaggcccaggttgggccggggctcaccgccgactcgcagagggatgaaaggctcttcaggccccacatcccctaccccccggaccagggagagcagtgagctggagctgggatcctgctctgctacaccagggctgcctcaggccaggcccccacggccccgctctgcccctgccttttctcctatatcctgtagtctatctgactccccatcctggaattgttacagcaggggtcccttgggccaacctgaggtttgttttgtccctaaatctcccccactgactgtttctccccgggtctgataatgcctttatgttcaagcccaggatatagccccaagatggggtaacagtgggaaatatgctagttcccctccaggccgctgattccatgtgacagccgttaagtccttggaatgccagccacgctgtccaaggcattacagagtatcaccttgagacagaacaaaacagggacctgccaccccttccctccctccgcagcacaagattttgggaccacaaaaaaaagtctatatttttatattggggggagggagtagaaaagcaagcccctatactgggccctattcagtggcagcttcttgttccataggattaaggaagactctgaggaaataaaagttgtttggaaaaatc

SEQ ID NO: 1482 - DNA, 5559 bp, Homo sapiens
  source 1..5559: mol_type = genomic DNA
gcgggactcaagagtagccttcctcgaggacctgcctttcccatttgctgcctgaagttaatgtttcttgctggccaaatcagggacatgccggcattagcgggatgagtgggtgttccggcagggatgtggtcattgacggccagtgagggcgagagtaccacggcccacttcttccttggagctggagatgaggggctgggcacccgtggaataggcatgaggccagaagagagtgacagcgagctccttgaggatgaggaggatgaagtgcctcctgaacctcagatcattgttggcatctgtgccatgaccaagaaatccaagtccaagccaatgactcaaatcctagagcgactctgcagatttgactacctgactgttgtcattctgggagaagatgtaatccttaatgaacctgtggaaaactggccatcctgccactgcctcatctctttccactccaaaggctttcctctggacaaagctgttgcttactccaagcttcgaaacccctttcttatcaatgatctggccatgcagtattacatccaagataggagggaggtgtaccggatcctgcaggaagagggtattgatctgcctcgatatgctgtgctcaaccgtgatcctgcccggcctgaggaatgcaacctgatagaaggtgaagaccaagtagaggtcaatggagctgtctttcccaagccctttgtggagaagccagtgagtgcagaagaccacaatgtttacatctactaccccagctcagctggaggaggaagccagcgtctctttcgtaagattggcagccgaagcagtgtttactctcctgagagcagcgtccgaaagacggggtcgtacatctatgaggagtttatgccaacagatggcacagatgtcaaggtgtatacagtggggccagattatgcccatgctgaagctagaaaatctccagctttggatgggaaggttgaacgagacagtgaggggaaagagattcgatatccagtcatgctgactgccatggaaaagctggtggccaggaaagtctgcgtagctttcaagcaaacagtttgtggatttgaccttcttcgtgccaatggtcattcctttgtgtgtgatgtcaatggctttagttttgtcaagaactcgatgaaatactacgatgactgtgccaagattctggggaacaccataatgcgggagcttgccccacagttccagattccatggtccatccccacggaggctgaggacattcccattgttcccaccacatctggcactatgatggaacttcgttgtgtcattgcaattattcgtcatggggatcgtactcccaagcagaagatgaagatggaagtgaaacacccaaggttttttgctctgtttgaaaaacatggtggctacaagacagggaaattaaaactcaagcgacctgagcagctccaggaggtgctggatatcacaaggctgttgttggctgaactggagaaagaaccaggtggtgagatcgaggagaagactggaaaactagagcagctgaagtctgtactggagatgtatggtcacttctcaggtataaaccggaaggtacaattgacttactaccctcatggagtaaaagcttctaatgaggggcaagatccacagagggaaactctggccccatctctgttgctggtactgaagtggggtggagaactgactcctgctggccgtgttcaggctgaggagctggggcgagcttttcgctgcatgtaccctggaggacagggtgactatgctggcttccctggttgtgggctgcttcgtctccatagcactttccgccacgatctcaagatctatgcctctgatgagggtcgtgttcagatgactgctgctgccttcgccaagggccttctggctctagaaggggagctgacacccattttggtgcaaatggtgaagagtgccaacatgaatgggctactggacagcgatggggattccttgagcagctgccagcaccgggtgaaggctcggctgcaccatattctacagcaggatgcgccctttggccctgaggactacgatcagctggctcccaccagaagtacttccctgctcaactccatgactatcatccagaatcctgtgaaggtctgtgatcaggtatttgccctgatcgaaaacctcacccaccagatccgggaacgaatgcaggaccccaggtctgtagacctgcagctctaccacagtgagacactagagctaatgctacagcgttggagcaagctggagcgtgactttcgacagaagagtgggcgctatgatatcagtaagatccctgacatctatgactgtgtcaagtatgatgtgcagcacaatgggagtctgggacttcaaggcacagcagagttgctccgtctctctaaggcactggctgatgtggtcattccccaggagtacgggatcagtcgggaggagaaactggaaattgctgtgggcttctgtcttccactgttgcggaagatactacttgacctgcagagaacccacgaggatgagtctgtcaacaagctgcatcccctgtactcccgaggcgtgctctccccaggtcgccacgttcgaacgcgtctctatttcaccagtgagagccatgtccactccctgctcagtgtcttccgttatggaggacttcttgatgagacccaggatgcacaatggcagcgagctttggattatcttagtgccatctcagagcttaactacatgacccagattgtcatcatgctttatgaggacaacacacaggatcccttatcagaggaacggttccatgtggagctacacttcagccccggagtgaaaggtgttgaggaagaaggcagtgccccggctggctgtggattccgtccagcctcttctgagaatgaggagatgaaaaccaaccaaggcagtatggagaacctgtgtccaggaaaggcatcagatgaaccagaccgggcattgcagacttcaccccagcctcctgagggccctggccttccgaggagatcacccctcattcgtaaccgaaaagctggttccatggaggtactttctgagacttcatcctcgaggcctggtggctaccggctcttttcatcttcacggccacccacagaaatgaagcagagtggcctagggtttgaagggtgttccatggtgcctaccatctaccctctggaaacactgcataatgccctttccctacgtcaagtgagtgaattcttgagtagagtctgccagcgccacactgatgcccaggcacaggcatctgcagccctctttgattccatgcacagcagccaggcctcagataacccattttctccaccacgtactcttcattcacctcccctgcaactccagcagcgctctgagaagcccccttggttagagacaaggttttgccatgttggccaggctggtttagagctcctgacctcaagtgatctgcctgcctcggcctcccaaagtgctgggattacaggcgtgagccaccgcacccagccagacagcagtggcccttctagcactgtgtccagtgctggtccttcttcccctactacagtagatggtaactcccaatttggcttcagtgatcaaccctccctaaattcacacgtggctgaagaacatcaaggccttgggctgctccaggagacccctgggagtggagcacaagagctctccatagaaggggagcaagagctttttgaaccaaatcagtccccacaggtgccacctatggaaaccagccagccatacgaggaggtcagccagccatgtcaggaggtccctgacatcagccagccatgccaggacatttctgaggcgctcagccagccatgtcagaaggtccctgacatcagccagcaatgccaggagaaccatgacaatggtaaccacacatgccaggaggtccctcacatcagccagccatgccagaagtccagccaactgtgccagaaagtctctgaggaagtttgccagctatgtctggagaactccgaggaggtcagccagccatgccagggggtctctgtggaggttggcaagctggtccataagttccatgtaggggttggtagcttggtccaggaaacccttgtagaagttggcagcccagctgaagagatccctgaggaggtcatccagccataccaggagttctctgtggaggttggcaggctggcccaggagacttctgcgatcaatctgttatctcagggcatccctgagattgataaaccatcccaagagttccctgaggagattgatctgcaggcccaggaggtccctgaggagataaattagaagtcctgggtggtccctgaagtgattgatcagctgcctggagagggtattcctcaagcccagcatccatctggtgatccaaaccctcagagccagtctctagcccatgaccagcactcaccccttccaccagcaacatgtgattaattttctcattagtggtatcacactataccagccatttgagccagcaaccttttctgttggctaactcactggccagctctcaccagcggtgtctggggaagtagttctctttgtatgaagcatacctgtgccagagctgtggttgaggaggagccagttttaggttcgaagaagccattggctcctcacttagccattagacttgaataggatttccttggggtgggttggtctgtcattacccagccttctctgagcatcctaggaaatcacagattgttaaaggaaatgccgcttcactgctgaagacaccatctggcgacagcaaatgcaaaagaggggactctagggtcttcacttttctggggaaatgttcacgacttctcaaggtacgcttagaccatatgtgcattcaggggactcttgtctttgccagcactcctcaggtgagcccgggatggctatctgaaatgtctggaaaatagagtcccttccccaaacatctgacatggccactaaatctttagacttgccttatagatccttccatatcatccccaagtgccccttctgcctcagtcctgttcctctgggcaatagctctagggaaaagtaggtattagactgctgtgcaaaattcagagcaactacttaaaatgctctagaggattcttagccagtctgtgaaagtgggcctcctctgtggtggggctgtttggcttaggagatgctgtagtagtagagataatcaggttctattttaagcaatcagcagagatcaatattgtacagatacaagcaaaggtttaataaatatatatatatatatttatttctgtagttgtgccagggacagactggccaaagaccaaacactgcagggtccccaagaaatttgtccttatatcattgtgtctgagggccagatatgattatgaagctttttccaaagatccagggatgggaatgggagtgggtaggaggggtaatgcggtcattggagtcgggggctggaacattatgagtgctcaataaatataaactaatgagaatggtggtgatgga

SEQ ID NO: 1483 - DNA, 1757 bp, Homo sapiens
  source 1..1757: mol_type = genomic DNA
aacccgtttccatggctgcgagaactgacgctccccaaccgtcccgcaactgtcctgtcccagactttggcaccgtcggggtccgtcgtccccgaatgtgacagcatccccaccccggctgctgcccaggatccgccggaccccggcctcgatatgggagacctggaactgctgctgcccggggaagctgaagtgctggtgcggggtctgcgcagcttcccgctacgcgagatgggctccgaagggtggaaccagcagcatgagaacctggagaagctgaacatgcaagccatcctcgatgccacagtcagccagggcgagcccattcaggagctgctggtcacccatgggaaggtcccaacactggtggaggagctgatcgcagtggagatgtggaagcagaaggtgttccctgtgttctgcagggtggaggacttcaagccccagaacaccttccccatctacatggtggtgcaccacgaggcctccatcatcaacctcttggagacagtgttcttccacaaggaggtgtgtgagtcagcagaagacactgtcttggacttggtagactattgccaccgcaaactgaccctgctggtggcccagagtggctgtggtggcccccctgagggggagggatcccaggacagcaaccccatgcaggagctgcagaagcaggcagagctgatggaatttgagattgcactgaaggccctctcagtactacgctacatcacagactgtgtggacaggcagtggtcagtctcccagcccccacagctggctcacttgaagagaattcaacgtctgcacccagtgtgctggttcctctccccaggcaagctgcagcagttcgagggcagccgttggcatactgtggccccctcagagcagcaaaagctgagcaagttggacgggcaagtgtggatcgccctgtacaacctgctgctaagccctgaggctcaggcgcgctactgcctcacaagttttgccaagggacggctactcaagcttcgggccttcctcacagacacactgctggaccagctgcccaacctggcccacttgcagagtttcctggcccatctgaccctaactgaaacccagcctcctaagaaggacctggtgttggaacagatcccagaaatctgggagcggctggagcgagaaaacagaggcaagtggcaggcaattgccaagcaccagctccagcatgtgttcagcccctcagagcaggacctgcggctgcaggcgcgaaggtgggctgagacctacaggctggatgtgctagaggcagtggctccagagcggccccgctgtgcttactgcagtgcagaggcttctaagcgctgctcacgatgccagaatgagtggtattgctgcagggagtgccaagtcaagcactgggaaaagcatggaaagacttgtgtcctggcagcccagggtgacagagccaaatgagggctgcagttgctgagggccgaccacccatgccaagggaatccacccagaatgcacccctgaacctcaagatcacggtccagcctctgccggagccccagtctccgcagtggagagcagagcgggcggtaaagctgctgaccgatctccctcctcctcaccccaagtgaaggctcgagacttcctgccccacccagtgggtaggccaagtgtgttgcttcagcaaaccggaccaggagggccagggccggatgtggggaccctcttcctctagcacagtaaagctggcctccaga

SEQ ID NO: 1484 - DNA, 1377 bp, Homo sapiens
  source 1..1377: mol_type = genomic DNA
atgaatgaagctatggctacagattccccaagaagacccagtcgttgtactggtggagttgtggttcgcccccaggctgtcacagagcagtcctacatggaaagtgttgtgacttttctgcaggatgttgtgccacaggtatattgttgtggagacaacattcagtcttatactgccacagtcattagtgctgctaaaacattgaaaagtggcctgacaatggtagggaaagtggtgactcagctgacaggcacactgccttcaggtgtgacagaagatgatgttgccatccacagtaattcacggcggagtcctttggtcccaggcatcatcacagttattgacaccgaaaccgttggagagggccaggtgcttgtgagtgaggattctgacagtgatggcattgtggcccacttccctgcccatgagaagccagtgtgctgcatggcttttaatacaagtggaatgcttctagtcacaacagacacccttggccatgactttcatgtcttccaaattctgactcatccttggtcctcatcacaatgtgctgtccaccatctgtatactcttcacaggggagaaactgaagccaaagtacaggacatctgcttcagccatgactgtcgctgggttgtggtcagtactctccggggtacttcccacgttttccccatcaacccttatggtggccagccttgtgttcgtacacatatgtcaccacgagtagtgaatcgcatgagccgtttccagaaaagtgctggactggaagagattgaacaagaactgacgtctaagcaaggaggtcgctgtagccctgttccaggtctatcaagcagcccttctgggtcacccttgcatgggaaactgaacagccaagactcctataacaattttaccaacaacaaccctggcaaccctcggctctctcctcttcccagcttgatggtagtgatgcctcttgcacaaatcaagcagccaatgacattggggaccatcaccaaacgaaccggcaaagttaaacctcctccacaaatttcacccagcaaatcgatgggcggagaattttgtgtggctgctatcttcggaacatccaggtcatggtttgcaaataatgcaggtctgaaaagagaaaaagatcagtccaaacaagttgtagttgagtccctgtacattatcagttgctatggcaccttagtggaacacatgatggagccgcaacccctcaatggaatgaattgcagccaccgtttaatgcaaaccaccctctgctcctcgctgcagatgcagtacagtattatcagttcctgcttgctggcctggttccccctggaagtcctgggcccattactcgacatgggtcttacgacagtttag

SEQ ID NO: 1485 - DNA, 1116 bp, Homo sapiens
  source 1..1116: mol_type = genomic DNA
gagagactacaactcccagtatgcaccgcgatgcgcgcctcaccctgcatctcccagcccgcagccagctggcatcctagaccctctgccctgcgaccaacagccgggagcggaccagacaccagaactcccggaacggttgaagacggttccgctccctgtcccgcctttcgcagcccagcagtttcgccctgcggagaggagccttgctgtttccaaatctctcctgctgaagagacattggagctagggcggctagtttcacctggctgtcacaaatcctctgcaccccaggagcgccgcttggacccccgggctcgctgcgtggtccatatctaggtcgggcctctcacggagactttcccaccagtgtaataaagaggagaaaacgtcacagcggaagggcctgaccctgctgcatccactaaggaaacagctacggggatgggaccctgggagctgctgtggagcctcatccaccgcttctctgaccccacccaggctgcttcccaggcctcagggtcttagtgtggacctccgggccgtgattaatgcaggtcagcaggaccagagcgccccttggtccctcccaacacatgagggtagtttgtgtggtgaggtcagggatagtgtctgcgcttctaccctgaatagggctcccttggaaaatactttaatatctctttttaaatacccccttggaccacttttaatagttttctgatagaactaaacagtgatcattctcttaattcatgtttccattaagtttttcaggttaagtactgcacgactactcgcttctgaaactgatagacactgcctcagctccgtgcagggcagacgcacaagagcagaatctccgtgggacatctctctggagcatcaatattactgcagtatttggaagaaacaaatttaaataagttctaaggtgaagaatggaacatttaagacaagtctggaaagtcatctgcctttaataactgtcgtttgtccttaacgtcagactttctccaagaccaaaactctaagaacttatttccattcttacaaatagtaaaaatgataaatcatatcaagtcaattgaaagtcctgcctgctgctttcctaaa

SEQ ID NO: 1486 - DNA, 5565 bp, Homo sapiens
  source 1..5565: mol_type = genomic DNA
gcgggactcaagagtagccttcctcgaggacctgcctttcccatttgctgcctgaagttaatgtttcttgctggccaaatcagggacatgccggcattagcgggatgagtgggtgttccggcagggatgtggtcattgacggccagtgagggcgagagtaccacggcccacttcttccttggagctggagatgaggggctgggcacccgtggaataggcatgaggccagaagagagtgacagcgagctccttgaggatgaggaggatgaagtgcctcctgaacctcagatcattgttggcatctgtgccatgaccaagaaatccaagtccaagccaatgactcaaatcctagagcgactctgcagatttgactacctgactgttgtcattctgggagaagatgtaatccttaatgaacctgtggaaaactggccatcctgccactgcctcatctctttccactccaaaggctttcctctggacaaagctgttgcttactccaagcttcgaaacccctttcttatcaatgatctggccatgcagtattacatccaagataggagggaggtgtaccggatcctgcaggaagagggtattgatctgcctcgatatgctgtgctcaaccgtgatcctgcccggcctgaggaatgcaacctgatagaaggtgaagaccaagtagaggtcaatggagctgtctttcccaagccctttgtggagaagccagtgagtgcagaagaccacaatgtttacatctactaccccagctcagctggaggaggaagccagcgtctctttcgtaagattggcagccgaagcagtgtttactctcctgagagcagcgtccgaaagacggggtcgtacatctatgaggagtttatgccaacagatggcacagatgtcaaggtgtatacagtggggccagattatgcccatgctgaagctagaaaatctccagctttggatgggaaggttgaacgagacagtgaggggaaagagattcgatatccagtcatgctgactgccatggaaaagctggtggccaggaaagtctgcgtagctttcaagcaaacagtttgtggatttgaccttcttcgtgccaatggtcattcctttgtgtgtgatgtcaatggctttagttttgtcaagaactcgatgaaatactacgatgactgtgccaagattctggggaacaccataatgcgggagcttgccccacagttccagattccatggtccatccccacggaggctgaggacattcccattgttcccaccacatctggcactatgatggaacttcgttgtgtcattgcaattattcgtcatggggatcgtactcccaagcagaagatgaagatggaagtgaaacacccaaggttttttgctctgtttgaaaaacatggtggctacaagacagggaaattaaaactcaagcgacctgagcagctccaggaggtgctggatatcacaaggctgttgttggctgaactggagaaagaaccaggtggtgagatcgaggagaagactggaaaactagagcagctgaagtctgtactggagatgtatggtcacttctcaggtataaaccggaaggtacaattgacttactaccctcatggagtaaaagcttctaatgaggggcaagatccacagagggaaactctggccccatctctgttgctggtactgaagtggggtggagaactgactcctgctggccgtgttcaggctgaggagctggggcgagcttttcgctgcatgtaccctggaggacagggtgactatgctggcttccctggttgtgggctgcttcgtctccatagcactttccgccacgatctcaagatctatgcctctgatgagggtcgtgttcagatgactgctgctgccttcgccaagggccttctggctctagaaggggagctgacacccattttggtgcaaatggtgaagagtgccaacatgaatgggctactggacagcgatggggattccttgagcagctgccagcaccgggtgaaggctcggctgcaccatattctacagcaggatgcgccctttggccctgaggactacgatcagctggctcccaccagaagtacttccctgctcaactccatgactatcatccagaatcctgtgaaggtctgtgatcaggtatttgccctgatcgaaaacctcacccaccagatccgggaacgaatgcaggaccccaggtctgtagacctgcagctctaccacagtgagacactagagctaatgctacagcgttggagcaagctggagcgtgactttcgacagaagagtgggcgctatgatatcagtaagatccctgacatctatgactgtgtcaagtatgatgtgcagcacaatgggagtctgggacttcaaggcacagcagagttgctccgtctctctaaggcactggctgatgtggtcattccccaggagtacgggatcagtcgggaggagaaactggaaattgctgtgggcttctgtcttccactgttgcggaagatactacttgacctgcagagaacccacgaggatgagtctgtcaacaagctgcatcccctgtactcccgaggcgtgctctccccaggtcgccacgttcgaacgcgtctctatttcaccagtgagagccatgtccactccctgctcagtgtcttccgttatggaggacttcttgatgagacccaggatgcacaatggcagcgagctttggattatcttagtgccatctcagagcttaactacatgacccagattgtcatcatgctttatgaggacaacacacaggatcccttatcagaggaacggttccatgtggagctacacttcagccccggagtgaaaggtgttgaggaagaaggcagtgccccggctggctgtggattccgtccagcctcttctgagaatgaggagatgaaaaccaaccaaggcagtatggagaacctgtgtccaggaaaggcatcagatgaaccagaccgggcattgcagacttcaccccagcctcctgagggccctggccttccgaggagatcacccctcattcgtaaccgaaaagctggttccatggaggtactttctgagacttcatcctcgaggcctggtggctaccggctcttttcatcttcacggccacccacagaaatgaagcagagtggcctaggctcacagtgcacagggctgttcagcaccacagtgctgggtggctcctccagtgccccgaatcttcaggactacgcccgcagccatggcaaaaagctaccacctgccagtctgaagcaccgagatgggtttgaagggtgttccatggtgcctaccatctaccctctggaaacactgcataatgccctttccctacgtcaagtgagtgaattcttgagtagagtctgccagcgccacactgatgcccaggcacaggcatctgcagccctctttgattccatgcacagcagccaggcctcagataacccattttctccaccacgtactcttcattcacctcccctgcaactccagcagcgctctgagaagcccccttggtacagcagtggcccttctagcactgtgtccagtgctggtccttcttcccctactacagtagatggtaactcccaatttggcttcagtgatcaaccctccctaaattcacacgtggctgaagaacatcaaggccttgggctgctccaggagacccctgggagtggagcacaagagctctccatagaaggggagcaagagctttttgaaccaaatcagtccccacaggtgccacctatggaaaccagccagccatacgaggaggtcagccagccatgtcaggaggtccctgacatcagccagccatgccaggacatttctgaggcgctcagccagccatgtcagaaggtccctgacatcagccagcaatgccaggagaaccatgacaatggtaaccacacatgccaggaggtccctcacatcagccagccatgccagaagtccagccaactgtgccagaaagtctctgaggaagtttgccagctatgtctggagaactccgaggaggtcagccagccatgccagggggtctctgtggaggttggcaagctggtccataagttccatgtaggggttggtagcttggtccaggaaacccttgtagaagttggcagcccagctgaagagatccctgaggaggtcatccagccataccaggagttctctgtggaggttggcaggctggcccaggagacttctgcgatcaatctgttatctcagggcatccctgagattgataaaccatcccaagagttccctgaggagattgatctgcaggcccaggaggtccctgaggagataaattagaagtcctgggtggtccctgaagtgattgatcagctgcctggagagggtattcctcaagcccagcatccatctggtgatccaaaccctcagagccagtctctagcccatgaccagcactcaccccttccaccagcaacatgtgattaattttctcattagtggtatcacactataccagccatttgagccagcaaccttttctgttggctaactcactggccagctctcaccagcggtgtctggggaagtagttctctttgtatgaagcatacctgtgccagagctgtggttgaggaggagccagttttaggttcgaagaagccattggctcctcacttagccattagacttgaataggatttccttggggtgggttggtctgtcattacccagccttctctgagcatcctaggaaatcacagattgttaaaggaaatgccgcttcactgctgaagacaccatctggcgacagcaaatgcaaaagaggggactctagggtcttcacttttctggggaaatgttcacgacttctcaaggtacgcttagaccatatgtgcattcaggggactcttgtctttgccagcactcctcaggtgagcccgggatggctatctgaaatgtctggaaaatagagtcccttccccaaacatctgacatggccactaaatctttagacttgccttatagatccttccatatcatccccaagtgccccttctgcctcagtcctgttcctctgggcaatagctctagggaaaagtaggtattagactgctgtgcaaaattcagagcaactacttaaaatgctctagaggattcttagccagtctgtgaaagtgggcctcctctgtggtggggctgtttggcttaggagatgctgtagtagtagagataatcaggttctattttaagcaatcagcagagatcaatattgtacagatacaagcaaaggtttaataaatatatatatatatatttatttctgtagttgtgccagggacagactggccaaagaccaaacactgcagggtccccaagaaatttgtccttatatcattgtgtctgagggccagatatgattatgaagctttttccaaagatccagggatgggaatgggagtgggtaggaggggtaatgcggtcattggagtcgggggctggaacattatgagtgctcaataaatataaactaatgagaatggtggtgatgga

SEQ ID NO: 1487 - DNA, 6773 bp, Homo sapiens
  source 1..6773: mol_type = genomic DNA
cggccgccgccggccgggccccaagcccccgagggcgccagggcgggatcgcgaccggtgcaacttctagccttgttgtcctcctggtgcgaagagctcggccgcctgctgctgctccgacatcagaagagccgccagagcgatccccctgggaaactccccatgcagccccctctcagctccatgagctccatgaaacccactctgtcgcacagtgatgggtcgttcccctatgactctgtcccttggcagcagaacaccaaccagcctcccggctccctttccgtggtcaccacggtttggggagtaaccaacacatcccagagccaggtccttgggaaccctatggccaatgccaacaaccccatgaatccaggcggcaaccccatggcgtcgggcatgaccaccagcaacccaggcctcaactccccacagtttgcggggcagcagcagcagttctcagccaaggctggccccgctcagccctacatccagcagagcatgtatggccggcccaactaccccggcagcgggggctttggggccagttaccctgggggtcctaacgcccccgcaggcatgggcatccctccgcacaccaggccgcctgctgacttcactcagcccgcggcagccgctgcagcagcggcagtggcagcagcagcagccacagctacagccacagccacggccactgtggcagccctgcaggagacacagaacaaggatataaaccagtatggaccgatgggtcccacccaggcgtataacagccaattcatgaaccagcccgggccgcgggggcctgcctccatggggggcagcatgaaccccgcgagcatggcggctggcatgacgccctcggggatgagcggccctcccatgggcatgaaccagccccggccgcccggcatcagcccctttggcacacacgggcagcggatgccccagcagacctacccgggcccccggccccagtcccttcctattcagaacataaagaggccataccctggagagcccaactatggaaaccagcaatatggaccaaacagccagttccccacccagccaggccagtacccagcccccaaccccccgaggccactcacctcccccaactacccaggacagaggatgcccagccagccgagctccgggcagtacccgccccccacggtcaacatggggcagtattacaagccagaacagtttaatggacaaaataacacgttctcgggaagcagctacagtaactacagccaagggaatgtcaacaggcctcccaggccggttcctgtggcaaattacccccactcacctgttccagggaaccccacaccccccatgacccctgggagcagcatccctccatacctgtcccccagccaagacgtcaaaccacccttcccgcctgacatcaagccaaatatgagcgctctgccaccacccccagccaaccacaatgacgagctgcggctcacattccctgtgcgggatggcgtggtgctggagcccttccgcctggagcacaacctggcggtcagcaaccatgtgttccacctgcggcccacggtccaccagacgctgatgtggaggtctgacctggagctgcagttcaagtgctaccaccacgaggaccggcagatgaacaccaactggcccgcctcggtgcaggtcagcgtgaacgccacgcccctcaccattgagcgcggcgacaacaagacctcccacaagcccctgcacctgaagcacgtgtgccagccgggccgcaacaccatccagatcaccgtcacggcctgctgctgctcccacctcttcgtgctgcagctggtacaccggccctccgtccgctctgtgctgcaaggactcctcaagaagcgcctcctgcccgcagagcactgtatcacgaaaatcaagcggaatttcagcagcgtggctgcctcctcgggcaacacgaccctcaacggggaggatggggtggagcagacggccatcaaggtgtctctgaagtgccccatcacattccggcgcatccagctgcctgctcgaggacacgattgcaagcatgtgcagtgctttgatctggagtcatacctgcagctgaattgcgagagagggacctggaggtgtcctgtgtgcaataaaaccgctctgctggagggcctggaggtggatcagtacatgtggggaatcctgaatgccatccaacactccgagtttgaagaggtcaccatcgatcccacgtgcagctggcggccggtgcccatcaagtcggacttacacatcaaggacgaccctgatggcatcccctccaagcggttcaagaccatgagtcccagccagatgatcatgcccaatgtcatggagatgatcgcagccctgggccccggcccgtccccctatcccctcccgcctcccccagggggcaccaactccaacgactacagcagccaaggcaacaactaccaaggccatggcaactttgacttcccccacgggaaccctggagggacatccatgaatgacttcatgcacgggcccccccagctctcccaccccccggacatgcccaacaacatggccgccctcgagaaacccctcagccaccccatgcaggaaactatgccacacgctggcagctctgaccagccccacccctccatacaacaaggtttgcacgtaccacaccccagcagccagtcagggcctccattacatcacagtggggctcctcctcctcctccttcccagcctccccggcagccgccacaggccgctcccagcagccatccacacagcgacctgacctttaacccctcctcagccttagagggtcaggccggagcgcagggagcgtccgacatgccggagccttcgctggatctccttcccgaactcacaaatcctgacgagctcctgtcttatctggacccccccgacctgccgagcaatagtaacgatgacctcctgtctctatttgagaacaactgagggccacccggtcggggccatccctccacactctgcatcctaccccacctacccaacacacttttccacctgggagcctgtgccctcagaccgccccgcaccagagccacgggctgtggggcggggagccctcccccgctgcagccctctcagaacagaggggtagggagggtgcaccagtgcaccaggaaggctgtgtgggtctggagcccacgtcccacctccacacccttggcttgggcccatgcccagcgcaggcctgaagaccaccctcccgagaggaaccagcccggtaagagggcacacgctgatgcggcttcccggtccctccgcgtgtgccgattccagatgaccttccagtgtccccaaggttcttccatcttctagactgtaaccctgcctccctgcttcctggtccagagcctccctccagtgactgtggagcctgagaaggcccccgggccccagcatgggccccgagccttggaggagcactggcagttggtggcagtgagaccagcccacccaccaccacccaccacagaaaagcacaaacctctgggaaagacaacgtctctcgggggccaggggtcatcggtttgacccctgacctataagccaagataccccataaacacactcagaaagcagagaaaaaggacaagagtctgtgtttgagagggggtctgccattcctgcttggggactggtggggaagagggccaggacatcttctgagccaggacgtccctgaggctccacctccaagctcagacagggcccaggcttggggaacagagagagcaggtgtacacccaaccaaagtgattgtgcccttggttggggggcgcgggcatataacctgtcagaagcaaacaggagcggcaacttctaactttgctccaagccactctctttttaaacagcaacaatttaaagctatgaagtcacctggagaaaaggaacgttgctcttggacagcaagcaaaccatttctctccgtctgttctgtttttctcctagtccctctcctgccacctctccaagacttccgtgggacacccacttccctctgtcctagttctctttgtccaatcagatggcaagggcagtgcgtggaaaggccggggaggtgcagaaaccagagcccagggcaatggtgtctgtccagcccctccctctgtccctgtgctccaagctgcccccggctgcagcccaggccatggacatgtgcaccagtatgtacctgcaggcatgggggggaggggggcgtgtttctgggcctgccccagacactgcccttggctgccagcctaccctgcctgcactcctccaccatcacaatctcacccaaactcctgctcactcaagcaaaagcagcctctggccttccctccaccgctttgctccatctggcttaccactctccagggcctcctggggagcctgtcctgtgttcactttgtttcaggctggtctgtgccccgtgagccacatggcctagggtgatgccaggttgtcccgtcactggggtcccatctgtaaattctttgcgcccttcccggctgctgcctggggccctttcctgctctcccgtccgctgtgggtggtccccagctctcctctgtgggttttaccggaaaggtggccccagctgttgacttccagtcactgtcccagacggcacaaggttttctgtaggaaagctgccattgccccggccccttttcttcctttgtcccgttgtcgaggttttttcaaatagcgtgttgttcagtatgcaaatcaattattttaagaatcgcttttgtaaatatctttgtgaatattttagtatcgtctttgataatattcaacattttcatgacctggttatagcctttgctggtgtttttaaaatacctggactcaatgacaaagaccgagtcttctttttttttaaacaaaaacaaaaaaagcaaccagggctatttgtacagttgaaggggtgaacagaatgggcggctgtgctgggagttggaagaccgggcagcccgctatttagagccatccctcagtcagctggcagggacaagccaacgccaggtagcatgtggccacccttgcccagtgtctgtggcctggcaagtggccacgccctgtgtcagaccatctgggaattaagctccagacagacttacagatgccttccttaggagttcttgcttcttgcgttgatactttgccccagaaaggcctgggattcattctggttcttatcagggtgtgtccacactctgctcacaggtggatccacggctttccagtgcggagagtcgagatgctccctgcagcccaggccccgggcacctcctgcaaccatctctgggctcagcacctgaggcgggtttcctgggtcccctctccagcaagcctccaccagcaagctcggcccagagcttcccttccggctggctctgaaccgtgcgtggtgcctacagcctgcagtctggagacaagctcttccggagtgctctgggagccaggccagggtgtgagggaggtgcagaggcatccggggcgggagcaagccccaggttgtgacaggtgcaggtagacaacgcccataaacagagatggtcctgaactctggagagatccttccctgatcctttcggacgactacttggagccataagtaacctcagcaaaaacgaggcctctgcaagccacttttccatgccaagcatccacccggcccacaggcatgtttctgccgccactccgcaagatggacagggagccagcaggcaggcgggaagggccaagtacaggcaatcacccccatcttcttggtttgaagctttatccatgtatcatgttccgtgtagccattttattttttaagaaactgctaatactttctccctaatggaagccctgatcccccagagagctacaggtctgctcccgacgggcctcgggcctgacccgtccacacagggccgtgtcaacagcagcgactcaagggacgtgtgtacatatgtaaatgagaaatagagacgtgtcaacagatgcattcatttctcttggaatgtgtattgtttttattttgcgaaacaaaacaaaacaaaaaaaaaagcttggaactccatcacgtggaaaaactagatcctgttggttatagcatttgtgagttctccacgtctgtctctctcgctcatgtaatatactctgaccctgagtggaaaggggtttttgttctgtttttattttacctacatgtactatttagcttcagtgtactagtcctgccacctgtgtatttttagggtgctatggaaataatgaaaagaaacggggatttcagaagaaaattgtaaccaaattcatactttgtataatttttgatatcatgatcacaggtgattcacacgtacacacataaacacacccaccagtgcagcctgaagtaactcccacagaaaccatcatcgtctttgtacatcgtatgtacaatgcaatcatttcatactttaaactggtcaaaaaactaattgtgatttctagtcttgcaaagctgtatgtagttagatgatgtgacaacctctaatatttatctaataaatatgtattcagatgaaacctgtatattaggtgttcatgtggttattttgtatttaaagatcaaattatttgactattgctagacatttctatactctgttgtaacactgaggtatctcatttgcccatgttaatttttttctaaataaattgacaaaaacaaaggtttggcg

SEQ ID NO: 1488 - DNA, 6336 bp, Homo sapiens
  source 1..6336: mol_type = genomic DNA
tcgtggggaaaaggcagggagggggtggtgtccccagccggtttggggggtgcgttgcccggagacggaaagtttgggagcccgagcaggctcggctgcagcctcggggagggggtccagcgggtggcggccctggggatggggaaggagcaggagctgctggaggcggcccgcaccgggcacctcccggcggtggagaagctgctgtccgggaagcggctctcctcaggctttgggggcggcggcggcggtggctctgggggcggcggcggcggcagcggcggcggcggcggcggcctcggctcttccagccaccccctctccagtctgctcagcatgtggagagggccaaatgtgaactgtgttgacagcactggctacacacccctgcaccatgctgctttgaatggccataaggatgtggtcgaggttcttctgaggaacgatgcgctgaccaacgtggctgactcaaaaggctgctaccctctgcatttggcagcctggaaaggagatgcccagatagtgcggttgctcatccatcaagggccttcacacaccagagtcaatgaacagaacaatgacaacgagacagccctgcattgtgcagcgcagtatggccacacagaggtggtgaaggtgctcttagaggagctgacggaccccaccatgcgcaacaacaaattcgagacccctttggacctggcagcactgtacgggcgactggaggtggtgaaaatgctccttaatgcacaccccaacctcctgagctgcaacactaagaagcacacccctctgcacttggcagcaaggaatggccacaaagccgtggtccaggtcctcctcgatgctggcatggacagcaactaccagacggagatgggcagtgctttgcatgaggctgctttgtttggcaagaccgatgtggtgcaaatcctgctggctgcaggaactgacgtcaacataaaagataaccatggactgactgccctagacactgttcgggaactgccttctcaaaagagccagcaaatagcagcattaattgaagatcacatgactggaaaaagaagtacaaaagaagtagataaaacccccccaccccagccacctctcatctccagtatggactccatatcacagaagtctcagggtgacgtggagaaagcagtgactgaactgattatagattttgatgcaaatgctgaagaagagggtccctacgaagctctgtataatgccatctcctgccattcgttggacagcatggccagcgggcgatcatctgaccaagactccacgaacaaggaggctgaggcagcaggagtgaaacctgctggagtgaggcctagggaacgtccaccacctccagcaaagccaccgcccgatgaagaggaagaagaccacatagataagaagtattttcccttgacagcttctgaggttctgtccatgagacctaggattcatgggagtgcagcccgggaagaagacgaacacccttatgaactgttgttaacagcagagacaaagaaagtggtgttggtggatggaaaaacaaaagaccacaggcggagcagcagcagccggagccaggactctgcggaggggcaggacgggcaggtcccagagcagttctcaggcctcctccacggctcctccccggtgtgcgaggtggggcaggaccctttccagctgctctgtaccgctggccagagccatccagacgggtccccccagcagggcgcctgccacaaggccagcatgcagctggaggagacgggtgtgcatgctcctggagcctcccagcccagtgccctggaccagagcaagagagtgggctacctcacaggcctgcccaccaccaacagccgctcgcaccctgaaactttgactcacacagcatctccgcaccctggtggtgctgaggaaggagaccggagtggggccaggagccgagcgcctcccactagcaaacccaaagctgaactcaaactcagccgcagcttgtccaagtctgactctgatctcctgacctgctcacccacagaggacgctaccatggggagtcggagtgagtccttatccaactgcagcattgggaagaaaaggctagagaagtcaccctccttcgcctcggagtgggatgagattgagaaaatcatgagttctattggagaagggattgacttttctcaggaacggcagaagatctcaggtttacggacgctggagcagagtgtcggggagtggctggagtcgattgggctgcagcagtatgagagcaagttgcttctgaatggctttgacgatgtccacttcctggggtctaatgtgatggaagagcaggacctgcgggacatcggcatcagcgacccacagcaccggcggaagctgctccaggcggcacgctccctacccaaggtgaaggctctgggttatgacgggaacagcccccctagcgtgccctcctggctggactccctggggctgcaggactacgtccattccttcttgtcaagtggttacagctccattgacaccgtgaagaacctctgggagctagagctcgtcaatgtcctgaaggtccagctgctcggccatcgcaagcgcatcatcgcctccctcgcagacagaccgtacgaggagccgccccagaagccccccagattctcccagctgaggtgccaagatttgctctcccagacgtcatccccactgagtcagaatgattcctgcactgggcggtcggcagatctgctgctgcctccaggggacacaggcaggaggcgccatgacagtctccatgaccctgcggcaccctcccgagcggagcgcttcaggatccaggaggagcaccgtgaggccaagctgaccctgcggcccccgagcctggcagccccctacgccccagtgcagagttggcaacaccagccagagaaactcatcttcgagtcctgtggttatgaagccaattatctgggctccatgctgatcaaagatctgcgagggacagaatccacgcaagacgcctgtgccaagatgcggaaatctacggagcacatgaagaagatccccaccatcatcctgtccatcacatacaaaggtgtcaagttcatcgatgcctccaacaagaacgtcattgcagagcacgagatccggaacatttcctgtgcggcccaggacccggaggacctctgtacctttgcctacatcaccaaggacctgcagaccagccaccactattgccatgtgttcagcaccgtggatgtgaacctgacctacgagatcatcctgacgctggggcaggccttcgaagtggcctatcagttggccctgcaggcccagaagtccagggcgacgggcgcctctgcagctgagatgattgaaacaaaatcttccaaaccggtgcctaagcctcgggtcggcgtgaggaaatccgcactggaaccacctgatatggaccaagatgcccaatcccatgccagtgtctcctgggttgtggaccccaaaccagactctaagcggagcctcagcaccaactgagccactgaggaaccacactgtgctgcggaaacatagacgtgggggcataggctcccactgccaccaccgccatcgcctcacctgcagctctgaagacccaggcctcacctccgcctgcaggacctcctcttggccacttggcctgggcctgccaccaccacgtcctgcagaacgagccctgccttggctgtggagaagcactccaggccgctagcagatgggactggcattccagagggtcaagaagtgacttgttcagaacacattgtttttaacagaaaaaaaatctttttataaaatgaacttttaacacttggctcaaacctctaggtcatactgccaatctttagacaaatggccatggggcagaggacaggggagctgaggttggttcagaggccagcctgcatagcctctgtcctcaggacggaacttgggtgcagctcagtgggtcggaagagaaggcggtggcctgtgggtgaggggaacggagcaggctcaggcagaattgagtacggtgcgtctgcttttcaaacccaaccatatcagctgctgctctttatgaactgcccaacttcctgtccctttcaggggctagacacaggcttctcgtaagaacacagccttagaggcacctgagcaactcaaaggtttccggtccatttctggggttcccgatgggaaggttcagtggccaaatgaagataagtgtgcagtttctagtgctgggaagtcttagccagcaccagagcgccaggcctctccctggcctcttacctgtcagtgatcggagcactgccctgggctggccggcgccgtactgcctgcgttgtgtcagagaataggaaaagcagctttgtttggggcattaatgcttggagtggggtcagctaaggttgctacttgccaatttgtgatttgtctaatcagcctgtgtgattggggctcattttgattctctgaattatcggtttgacggttacacttggctgctgggcccatccctggcccccggtgtggaaaaggctaaataaggtgacagtgcatcgatgctcccccgcgtggcctttggggcaggctggcatcccggtgcgcctctgcttcttaagctttcctgctgctcgctttgtttttaaaagtaacttgggttgcattcttccctctggactagagtagaaatgcaggggaaactgctgtggatttgagaggcaaagttggctcagctgtgtgcccagttcctcctgtgggcactttagcaggctccgagctttcctggcataggtcaatcaggtcccaggatgaataatccaggcttcagcaacactcctctttcccagccagcaaaggctgtgaatttgaattctttgttggtatgtatgtgcagggagtactgttaggcacattcttaacccatgtggttggccagaaatcagaagtggggctgtgtctctgactggctagaggccaggccttgtgggtttctatctgctaagcacccagcaggttggggcctgggactcagctctctctgcggtagaggcaggccctcctccacttcttggtactaaacgaagatctcgacaccttgcagttttacttcatttcctgcccctttcagggcctgtgaggatgcccatgagctaccgctgtacagttctcggccccggctttcttccaagagttgaccaggaaccctaaagcatccagagtagactgcgctgccactgcgcacatgctggtgcccgtcttcctcctaaggggccaggccacatccaagtgggcctctgtcgggggcggggcggtaggtccgaaagaaaccgcagacactacgatgcactcctcaagctgtcttttgtgcttagatcatccataggtgtttcttctgcttgaagctgctatatcatctttatttattcagggtattttcatattggaagccttggctagtctgctctagctctgggttctgtttagagattggtttatttctgaatattcaagaaaggaaaatgactgggcctttctttcttttcttctcctctgggatgggtagtctccctttcctagaaaggttattataactttaaggacaggcttcaagtgggaaggcccctacttttgcacttctccaagtgcaggtcacaccaggggcagaccctgtcgctgcgtttctgaactgtgaaggagcccattcgggtgggagacttcagatgggctcagtacctgtcccagccacaggcttcttgtccacctcttctcccctgcccaccagctgctcagcgcataagaccttcccgacaggctctgcgtgtgcagctctctgcgtccctcctgggccctccagcgtcagacactaatgggagttcccgagatgctcgggtttgagcagggagcaggcagagctgcagtcagagacattagaaaaccagtctgaattgggtctgtctttgagatgcccaggccagcagaaagcagctcagaagtattgttgctcatggtgtggcaatggactgaactgtaatgaaaatgttatttaatctttgtctctgtattttgatacttgaatgactttcccttttgttttactgtatataaaattgttaatctgtctgattttgtctgaattataaacactttgaggtaccaaacataaccaatctgtgcaacaacatagactgacctcagtacccaagagagtgtaaatatttctgggcttccagctttggttttgttattttcataactgtacacaacttagaacagactgaattaataaatgagaagcgacatgaa

SEQ ID NO: 1489 - DNA, 3813 bp, Homo sapiens
  source 1..3813: mol_type = genomic DNA
gggaaagttcccggctgtcggttggagggtgggtcctcgccccgccccgccccctcgggccgcccttccgcgcttccgggaggcttgtcccaagctcacggacccctcgctgggtgccggttaagaccccgctccccgtcgccagtgctatggaggcggcggcggcggtggtggcggcagaggcggaagtggaaaacgaagacggcgacagcagctgcggggatgtatgcttcatggacaaaggcttgcagagcatatcagaattatctttagattcaactcttcatgccgtcaatcttcattgcaataacatctccaagatcgaagccattgatcatatttggaatttacaacatctagatctgtcatctaatcaaataagtagaattgaaggactaaacacactgacaaaactgtgcacattaaatttgtcctgcaatttgattacaaaagtagaaggacttgaagaactaattaatctgactagactaaatgtatcttataaccacatagatgatcttagtggattgattccccttcatggaattaagcataaacttagatatattgatctacatagtaatcgtatagatagtatccatcacttacttcagtgtatggtaggattgcacttcctgaccaatcttattttggagaaagatggagacgataatcctgtctgtcgactgccagggtacagagcagttattctccagactttgccacagcttagaatcctagattgcaagaacatatttggtgaaccagtaaatttgacagaaataaattcatcacagctgcagtgcctagaaggtcttttggataatttagtttcttctgattctcccctaaatataagtgaagatgagatcattgatagaatgccagtgataacagcacctatcgatgagttagttcccttggaacagtttgcaagtacaccaagtgatgctgtgttgacgtcttttatgtctgtgtgtcaatcttctgagccagagaaaaataatcatgaaaacgatttgcagaatgagataaaacttcagaaattagatgaccaaattctacaacttctaaatgaaacttctaattcaatagataacgttcttgagaaagaccccagaccaaaaagagacacagatataacttctgaaagtgactatggaaacagaaaagaatgcaatagaaaagttcctcgaagatcaaaaatcccttatgatgccaaaaccattcaaactattaagcaccacaataaaaactacaactcttttgtaagttgtaatcgtaaaatgaaaccaccttaccttaaagaattatatgtaagctcatctttagcaaactgtcctatgttacaagaatcagaaaagccaaagactgaaataattaaagtagaccaaagtcactcagaagacaacacttaccagtcccttgttgaacagctagaccaagagagagagaagagatggagagctgagcaagccgaaaataaactcatggattatattgatgagctgcataaacatgcaaatgaaaaagaggatattcatagtctggctctacttaccacagataggctaaaggaaattatttttagagagagaaattccaaaggacaactcgaagttatggttcacaaacttcaaaatgaaattaaaaaactgactgttgaactaatgaaagcaaaagatcaacaagaggatcaccttaaacacttaagaaccctcgaaaaaacattagaaaaaatggagagacaaaaaaggcagcagcaggcagcacagataagactgatccaagaggtggaactcaaagcttcagctgccgatagagaaatatacttacttagaacttcccttcatcgagaaagagaacaagcgcaacaacttcatcaacttcttgcattgaaagaacaggaacacaggaaggaacttgaaacaagggagttttttactgatgctgacttccaggatgccttagctaaagaaatagccaaagaagagaaaaagcatgagcaaatgataaaagaataccaagagaaaattgacgtgttaagccagcagtatatggatttagaaaatgaattccgtattgctttaactgttgaagccagaagatttcaagatgttaaagatggttttgaaaatgttgcaactgagttagcaaagagcaaacatgctcttatttgggctcaacgaaaagaaaatgagtcttcctctttaattaaagatctgacctgtatggtaaaggaacaaaaaacaaaactggcagaagtttctaaattgaaacaagaaacagcagcaaatttacagaatcaaatcaacacccttgaaattttaattgaagatgacaagcagaagagtattcaaatagaacttctcaagcacgaaaaagtccagcttatttctgagctagcagccaaggaatcactaatatttggtttaaggacagaaagaaaagtatggggacatgagctggcacaacaaggatcttctctagcccaaaatcgtggaaaattggaggctcaaattgagagtttatctagagagaatgaatgtctgcgaaagacaaatgaaagtgatagtgatgcattaagaataaagtgcaaaatcatagacgaccaaactgaaactattagaaaattaaaagattgtttacaagaaaaagatgaacacatcaaaagattacaagaaaagatcacagaaatagaaaaatgcactcaagaacaacttgatgaaaaatcttcacaactggatgaggtacttgagaagttggaaaggcacaatgaaagaaaagaaaaactaaaacaacagttgaaaggaaaggaagtagaacttgaagaaatcagaaaagcttacagtacactgaatcggaagtggcatgataaaggagaacttctatgtcatcttgaaacacaagtaaaagaagtgaaagaaaaatttgaaaacaaggaaaagaaacttaaagcggaaagagacaaaagtattgaactacaaaagaatgcaatggaaaaacttcatagtatggatgatgcctttaaaagacaagttgatgcaattgttgaagctcatcaagctgaaatagcacagctggccaatgaaaagcagaagtgtattgattctgcaaatttaaaggtccatcaaattgaaaaagaaatgcgtgaacttttggaagaaacatgcaagaacaaaaaaacaatggaagcaaaaattaagcaacttgcttttgctttaaatgaaattcagcaagatatgtgatggttctgagaatgaatttaattgaaatagaccagcagacctattgtaaaaatgattaaatattgtaatagtagtaactgctatgactttgaaatgtctctttctatacatttcattatgaatatatttttaaagacttttgatcaagtatttattaattgtataggttttttataataaattgttgacaattttgtctattagaaaaaactatcataactagacttacaatatttttcttgtttctgtactatacattgtttggtaattacacatttgcctacaaatttgtgaatgaaaagattagtattttcaccatatgaggtaaaacattttaatcattgttatcttattgtgatgatgaagaactaattatatttgttatttaattgatgtagctcaattcttttaaagtacttatgtagccaaaaagcatttgaaatctgtatgataaaagatgtggcattcttaagaaagtatatgtagccatctccacatcactcattatgaccccttcttttataatgcttatatcttttcattaaagattacatttaaggtttta

SEQ ID NO: 1490 - DNA, 682 bp, Homo sapiens
  source 1..682: mol_type = genomic DNA
aactcctggtactctagcaccgatctgctttggagaacctgatcctgagactccagcaggatgtcttatcaacagcagcagtgcaagcagccctgccagccacctcctgtgtgccccacgccaaagtgcccagagccatgtccacccccgaagtgccctgagccctgcccatcaccaaagtgtccacagccctgcccacctcagcagtgccagcagaaatatcctcctgtgacaccttccccaccctgccagccaaagtgtccacccaagagcaagtaacagcttcaggattcatcaggagcatgagaggataaggataattggctcacctcgttccacagctccacttgcatcttctcaccaaagccttccatggatgcacagggagcttctttctccttaacctgtggcctgcctgtgatgatctgtgacagcaaaagattccctttctgaggctgccatactgccactgtccaggtggagctaagaaaaggaagtcctcagctgtgccagctcccagagcttcggaagaaagagcagcagctctctccctgggaaccatcagacaattctgttgatgtgttctgtgtctgtctgtcacctggtcatgagcttctaccacctttgcaattgtcatttatctttcactccctgaataaagtatctatgcatatatatttgt

SEQ ID NO: 1491 - DNA, 1390 bp, Homo sapiens
  source 1..1390: mol_type = genomic DNA
accctcagggcagagagcagccctacactccctacaccacacccatactcagcccctgcaggcaaggagagaacaggtcaggttcccgagagctcaggaacatggagctgatccaggacacctcccgcccgccactggagtacgtgaagggggtcccgctcatcaagtactttgcagaggcactggggcccctgcagagcttccaagcccgacctgatgacctgctcatcaacacctaccccaagtctggcaccacctgggtgagccagatactggacatgatctaccagggcggcgacctagagaagtgtaaccgggctcccatctacgtacgggtgcccttccttgaggtcaatgatccaggggaaccctcagggctggagactctgaaagacacaccgcccccacggctcatcaagtcacacctgcccctggctctgctccctcagactctgttggatcagaaggtcaaggtggtctatgttgcccgaaacccaaaggacgtggcggtctcctactaccatttccaccgtatggaaaaggcgcaccctgagcctgggacctgggacagcttcctggaaaagttcatggctggagaagtgtcctacgggtcctggtaccagcacgtgcaggagtggtgggagctgagccgcacccaccctgttctctacctcttctatgaagacatgaaggagaaccccaaaagggagattcaaaagatcctggagtttgtggggcgctccctgccagaggagaccatggacttcatggttcagcacacgtcgttcaaggagatgaagaagaaccctatgaccaactacaccaccgtcccccaggagctcatggaccacagcatctcccccttcatgaggaaaggcatggctggggactggaagaccaccttcaccgtggcgcagaatgagcgcttcgatgcggactatgcggagaagatggcaggctgcagcctcagcttccgctctgagctgtgagaggggctcctggagtcactgcagagggagtgtgcgaatctaccctgaccaatgggctcaagaataaagtatgatttttgagtcaggcacagtggctcatgtctgcaatcccagcgatttgggaggttgagctggtaggatcacaataggccacgaatttgagaccagcctggtaaaatagtgagacctcatctctacaaagatgtaaaaaaattagccacatgtgctggcacttacctgtagtcccagctacttgggaagcagaggctggaggatcatttcagcccaggaggttgtggatacagtgagttatgacatgcccattcactacagcctggatgacaagcaagaccctccctccaaagaaaataaagctcaaaataaaatatgatttgtgttca

SEQ ID NO: 1492 - DNA, 3211 bp, Homo sapiens
  source 1..3211: mol_type = genomic DNA
acttcctgccgggctgcgggcgcctgagcggctcttcagcgtttgcgccggcggctgccgcgtctctctcggctcccgcttcctttgaccgcctcccccccccggcccggcggcgcccgcctcctccacggccactccgcctcttccctcccttcgtcccttcttcctctcccttttttccttcttccttcccctcctcgccgccaccgcccaggaccgccggccgggggacgagctcggagcagcagccagagtttattaaccacttaacctctcagaactgaacaaagacaacattgttcctggaacgccctctttttaaaaaagaaagcataacccctactgtagaactaaatgcactgtgcatgaaacttggaaaaaaaccaatgtataagcctgttgacccttactctcggatgcagtccacctataactacaacatgagaggaggtgcttatcccccgaggtacttttacccatttccagttccacctttactttatcaagtggaactttctgtgggaggacagcaatttaatggcaaaggaaagacaagacaggctgcgaaacacgatgctgctgccaaagcgttgaggatcctgcagaatgagcccctgccagagaggctggaggtgaatggaagagaatccgaagaagaaaatctcaataaatctgaaataagtcaagtgtttgagattgcacttaaacggaacttgcctgtgaatttcgaggtggcccgggagagtggcccaccccacatgaagaactttgtgaccaaggtttcggttggggagtttgtgggggaaggtgaagggaaaagcaagaagatttcaaagaaaaatgccgccatagctgttcttgaggagctgaagaagttaccgcccctgcctgcagttgaacgagtaaagcctagaatcaaaaagaaaacaaaacccatagtcaagccacagacaagcccagaatatggccaggggatcaatccgattagccgactggcccagatccagcaggcaaaaaaggagaaggagccagagtacacgctcctcacagagcgaggcctcccgcgccgcagggagtttgtgatgcaggtgaaggttggaaaccacactgcagaaggaacgggcaccaacaagaaggtggccaagcgcaatgcagccgagaacatgctggagatccttggtttcaaagtcccgcaggcgcagcccaccaaacccgcactcaagtcagaggagaagacacccataaagaaaccaggggatggaagaaaagtaaccttttttgaacctggctctggggatgaaaatgggactagtaataaagaggatgagttcaggatgccttatctaagtcatcagcagctgcctgctggaattcttcccatggtgcccgaggtcgcccaggctgtaggagttagtcaaggacatcacaccaaagattttaccagggcagctccgaatcctgccaaggccacggtaactgccatgatagcccgagagttgttgtatgggggcacctcgcccacagccgagaccattttaaagaataacatctcttcaggccacgtaccccatggacctctcacgagaccctctgagcaactggactatctttccagagtccagggattccaggttgaatacaaagacttccccaaaaacaacaagaacgaatttgtatctcttatcaattgctcctctcagccacctctgatcagccatggtatcggcaaggatgtggagtcctgccatgatatggctgcgctgaacatcttaaagttgctgtctgagttggaccaacaaagtacagagatgccaagaacaggaaacggaccaatgtctgtgtgtgggaggtgctgaaccttttctggccatgaaccattataaaatcccaacatatatactgaaaatactgaaactgctttgaaaatttggaatttctgatacctccagtgggccgagagacacggtgggtaaaggatgtgggcagcagcagggaagacaacagaaacacaaggaggcggctgtggccgggctggactgtgctggggtttgttgtgatggccactcggtgacctggcggtccctacgcaatagcagctgcctgtggggaagaagggctgcccagccagctggttctcccgggacaccagcagatccacaccctgggcacctccgtgtttggtcttttttttcccctgtgtgaaagaagaaacggcacgaccccttctcaagctggctcactcagacacattgggacaaaccctggacagccatgccagagagaggcctttgaccggccccagagctaaaagcaccagagaaaatcaaatgcttcctactcagcgtgacccaacttttctagtgtgccacggccccaccacctcctgcagtacccacaccatcaccactgctttctcttccaacagtgatctgtattcttagtttcattattttcttttgattgatatgacactatataaaattttcatttgagaatttctcaattgtatctagttaaatagcacagtttggaaacttgtctgagactgactttatcaataatctaaccgacaaagatcatatccatgtgtatgtggttagacatttttatttcattgactaacccaggacagtttcagtgatgcaaattgtgtgccctctggttcagctgaaacagtcctggactttcaaaaaccttgaataagtctcccacagttgtataaattggacaatttaggaattttaaactttagatgatcatttggttccatttttatttcatttttatttttgttaatgcaaacaggacttaaatgaactttgatctctgttttaaagattattaaaaaacattgtgtatctatacatatggctcttgaggacttagctttcactacactacaggatatgatctccatgtagtccatataaacctgcagagtgattttccagagtgctcgatactgttaattacatctccattagggctgaaaagaatgacctacgtttctgtatacagctgtgttgcttttgatgttgtgttactgtacacagaagtgtgtgcactgaggctctgcgtgtggtccgtatggaaagcctggtagccctgcgagttaagtactgcttccattcattgtttacgctggaatttttctccccatggaatgtaagtaaaacttaagtgtttgtcatcaataaatggtaatactaaa

SEQ ID NO: 1493 - DNA, 1960 bp, Homo sapiens
  source 1..1960: mol_type = genomic DNA
aagctgagccgagccgagccgagctgggggcgcagagcgcgggaggcggcggcggcgcggagcccaggtggctccgctgccggatgggagtgccccagtgtgctggatgaagctggcgcatgcaccatgtcatcatgtgtctctagccagcccagcagcaaccgggccgccccccaggatgagctggggggcaggggcagcagcagcatccacctgggcatggagtccttcattgtggtcaccgagtgtgagccgggctgtgctgtggacctcggcttggcgcgggaccggcccctggaggccgatggccaagaggtcccccttgacacctccgggtcccaggcccggccccacctctccggtcgcaagctgtctctgcaagagcggtcccagggtgggctggcagccggtggcagcctggacatgaacggacgctgcatctgcccgtccctgccctactcacccgtcagctccccgcagtcctcgcctcggctgccccggcggccgacagtggagtctcaccacgtctccatcacgggtatgcaggactgtgtgcagctgaatcagtataccctgaaggatgaaattggaaagggctcctatggtgtcgtcaagttggcctacaatgaaaatgacaatacctactatgcaatgaaggtgctgtccaaaaagaagctgatccggcaggccggctttccacgtcgccctccaccccgaggcacccggccagctcctggaggctgcatccagcccaggggccccattgagcaggtgtaccaggaaattgccatcctcaagaagctggaccaccccaatgtggtgaagctggtggaggtcctggatgaccccaatgaggaccatctgtacatggtgttcgaactggtcaaccaagggcccgtgatggaagtgcccaccctcaaaccactctctgaagaccaggcccgtttctacttccaggatctgatcaaaggcatcgagtacttacactaccagaagatcatccaccgtgacatcaaaccttccaacctcctggtcggagaagatgggcacatcaagatcgctgactttggtgtgagcaatgaattcaagggcagtgacgcgctcctctccaacaccgtgggcacgcccgccttcatggcacccgagtcgctctctgagacccgcaagatcttctctgggaaggccttggatgtttgggccatgggtgtgacactatactgctttgtctttggccagtgcccattcatggacgagcggatcatgtgtttacacagtaagatcaagagtcaggccctggaatttccagaccagcccgacatagctgaggacttgaaggacctgatcacccgtatgctggacaagaaccccgagtcgaggatcgtggtgccggaaatcaagctgcacccctgggtcacgaggcatggggcggagccgttgccgtcggaggatgagaactgcacgctggtcgaagtgactgaagaggaggtcgagaactcagtcaaacacattcccagcttggcaaccgtgatcctggtgaagaccatgatacgtaaacgctcctttgggaacccattcgagggcagccggcgggaggaacgctcactgtcagcgcctggaaacttgctcacgaagcaaggcagcgaagacaacctccagggcaccgacccgccccccgtgggggaggaggaagtgctcttgtgagaggcagtccctgcgtggaaagttgctgggcccccgcccccggctcccccgcacgcatgcatccactgcggccggaggaggccatggagcccgagtagctgcctggatcgctcgacctcgcatgcgcgccgcgtcgcctctggggggctgctgcaccgcgtttccatagcagcatgtcctacggaaacccagcacgtgtgtagagcctcgatcgtcatctctggttatttgttttttcctttgttgttttaaaggggac

SEQ ID NO: 1494 - DNA, 2154 bp, Homo sapiens
  source 1..2154: mol_type = genomic DNA
aacagatgattccctgattctccagagagattacacacttcgtttgtggctaaggtgacccaatgaaagaagaaaatgaaagccataaagaaaagtcttacagaagaagaatacctgtacctggacttttctcaccaaacagaaggatgcatctttcctcttcatacatctgtaactttatttctgttatcttactgtgactgtaaaatctttaaaatttgcttagttgtcaccaaagaggtgagtagagatagttcactactaagagatgacctgatccaggatgttgaaatacagattatttcaaggcaggagctcccaccaatagtccaaaattgctgtttgcctgcagtagtagaacgatcagacaatttttgtagagcaggacttgctgttgtattgagacacataatccagaaatcctatgaagcagaccccttaaagaaggaacttttggaacttctgggctttaaaaagacttgcttgaaagcctgtgctgaagttagtcagtggaccaggctatgtgaactcaccatccctttggctattgagaattttctcagagaatcttctgaccagcccccaactatacctgtagaaatactacagctagagaaaaagcttagtgagcctgttagagtgcataatgatgataaactccgcaggcagaagctcaagcaacagaaggctgatggagttgggcctccccttactaagggaaaggcaaagagcaaggtccacacacaggaaacatctgaagggttggattcttcatccaagagtctggaactgaaagtggcattctcaaagctcacagtacaggaagaaccagctactaccaacagagagccttctcacatcagaaaagcaaaagcctccgaccttccacctctggagcatgtgtttgcagaagggctttacttcactctggcagatattgtgctcttgccctgtatccatcatttcttggtaattatcagcaggaaattttctgagaagctggtagaatttccattgctagcctcttggtaccagaggattcaggaagtgccaggagtaaaaacagcagcttctaagtgtgggatccaatttctccatttaccaaagttgttgacaacctcaactgaacagcatccaaacttatgtgaagtcccaggtgtagaagagcaaagcgatcctttatttataggaggaccaagaccaaccatggccaagttaatggaaaagggcattgaagtgatgttttctccccacccttgccctacttggactcttgattggaatgttctccctgcagcagtcagcccaaaggaaggtaaaatgtccagtgatcgagctttgaggaagcagcaacagttgaacaaccttgtctatgtggtaacaaatcaggccaaacctggtgacagaattgtggatttctgcagcggtgggggccatgttggaattgtccttgctcacatgctgccatcatgtcaggttacattaatagaaaacaaggaattatcattaattcgtgctaagaagagaagtgatgaactgggtttaagcaacatttggttcattcaagcaaatatggaatattttactgggatgtttaatattggagtagcattgcatgcttgtggagtggcaacagacatggtgattgagcactgtatcaaaacacgggcttccttcgtcacatgcccttgctgttatggtttcattcagaacacctcaaagttcaattttccaaaaagtgaacaattcaagaaaactttatcatacaaggaacacatgattctgtgcagatttgcagaccagacagctgtccagctcccaccccaacgaaggctcataggaaaacagtgcatgtgcttggtggatctggatcgagcaagagctgcagaagaatgtggatactccgttcaagtgatatccatggagccagagagctgctctcccaaaaataacatgattgtgggagtccccatttaaaatgagatattcacatttgatattttgccatccgtcttcacgttggatgcccagtggcattcaggaggttcttggcataactaggaaacagcattagccatcttgaacctattgtgctcaggaaggaaagcaacagggaaatcttggaagtaaaggctccctgcaaagcatcacaaa

SEQ ID NO: 1495 - DNA, 632 bp, Homo sapiens
  source 1..632: mol_type = genomic DNA
gcgggcgctgcggcccctgctctacctcctagcgccggtgcgcggccgaggccgcactacctgtctgcgggaaagcgggatccaccccaggacgtcgggtcgctgccgacataatgtcaagtggaaactatcagcagtcagaggctcttagcaaacccactttcagtgaggaacaagcctctgcgttagtggagtcagtgtttgggttgaaagtttccaaggtccggccacttcctagctatgatgaccaaaactttcatgtctacgtttcaaaaaccaaagatggcccaactgaatatgtcctcaaaataagcaacaccaaggctagcaaaaatccagacctgattgaagtgcagaatcacatcatcatgtttctgaaagccgctggatttccaacagcctctgtgtgtcacactaaaggagacaacacagcttctctcgtgtctgtagatagtggctctgaaatcaaaagctacttggtgaggctgctgacttacctcccaggaagacccatcgctgagcttcccgtcagcccccagctattgtatgaaattggaaaactagctgccaaattggataagacactgcaggagggtaagccccgcgttacacccctattggccaaaaactga

SEQ ID NO: 1496 - DNA, 3233 bp, Homo sapiens
  source 1..3233: mol_type = genomic DNA
acttccggtgcttgccctgcccatccccgtggcgggggcgtggccatggcgggggcgctccggcgggggcgggccctgggctcccgcccttcgggtcccacagtttccagccgccgctctcctcagtgcccggtggcccaggagggcctgggagcccgaagccgtccccgagtcgctcctaggtcactggcgcgatgcgggccgtcctctcggctgatgggttggaagcccagcgaggctagaggccagtcccaaagtttccaggcatcagggctgcagcccaggagcctcaaggcggcccggcgggcgactggacggccggacaggtcccgagcagcccggcccaccatggacccctctgcccacaggtcccgagcagccccgcccaacatggacccagacccccaggcgggcgtgcaggtgggcatgcgggtggtgcgcggcgtggactggaagtggggccagcaggacggcggcgagggcggcgtgggcacggtggtggagcttggccgccacggcagcccctcgacacccgaccgcacagtggtcgtgcagtgggaccagggcacgcgcaccaactaccgcgccggctaccagggcgcgcacgacctgctgctgtacgacaacgcccagatcggcgtccggcaccccaacatcatctgtgactgctgcaagaagcacgggctgcgggggatgcgctggaagtgccgtgtgtgcctggactacgacctctgcacgcagtgctacatgcacaacaagcatgagctcgcccacgccttcgaccgctacgagaccgctcactcgcgccctgtcacactgagtccccgccagggcctcccgaggatcccactaaggggcatcttccagggagcgaaggtggtgcgaggccccgactgggagtggggctcacaggatggaggggaagggaaaccgggccgtgtggtggacatccgtggctgggatgtggagacaggccggagtgtggccagcgtgacgtgggctgatggtaccaccaatgtgtaccgtgtgggccacaagggcaaggtggacctcaagtgtgtgggcgaggcagcgggcggcttctactacaaggaccacctcccaaggctcggcaagccggcggagctgcagcgcagggtgagtgctgacagccagcccttccagcacggggacaaggtcaagtgtctgctggacactgatgtcctgcgggagatgcaggaaggccacggcggctggaaccccaggatggcggagtttatcggacagacgggcaccgtgcatcgtatcacggaccgcggggacgtgcgcgtgcagttcaaccacgagacgcgctggaccttccaccccggggcgctcaccaaggccctgggccgcgtcgggaaggtggtgaaagtgtttggagacgggaacctgcgtgtagcagtcgctggtcagcggtggaccttcagcccctcctgcctggtggcctaccggcccgaggaggatgccaacctggacgtggccgagcgcgcccgggagaacaaaagctcactgagcgtggccctggacaagcttcgggcccagaagagtgacccagagcacccgggaaggctggtggtggaggtggcgctgggtaacgcagcccgggctctggacctgctgcggaggcgcccagagcaggtggacaccaagaaccaaggcaggaccgctctgcaagtggctgcctacctgggccaggtggagttgatacggctgctgctacaagccagggcgggcgtggacctgccggacgacgagggcaacacggcactgcactacgcggccctggggaaccagcccgaggccaccagggtgctcctgagtgctgggtgccgggcggacgccatcaacagcacccagagcacagcactgcacgtggccgtgcagaggggcttcctggaggtggtgcgggccctgtgtgagcgcggctgtgacgtcaacctgcccgacgcccactcggacacgcccctgcactccgccatctcggcgggcactggagccagcggcattgtcgaggtcctcacggaggtgccaaacatcgatgttaccgccaccaacagccagggtttcaccctgctgcaccatgcctccctcaagggtcacgcgctagctgtgagaaagattctggctcgggcgcggcagctggtggacgccaagaaggaggacggcttcacggcgctgcatctggctgccctcaacaaccaccgcgaggtggcccagatcctcatccgggagggccgctgtgacgtgaacgtgcgcaaccggaagctgcagtccccgctgcatctcgccgtgcaacaggcccacgtggggctggtgccgctactggtggacgctgggtgcagtgtcaacgccgaggacgaggagggggacacagccctgcacgtggcgctgcagcgtcatcagctgctgcccctggtggctgatggggccgggggggacccagggcccttgcagctgctgtccaggctacaggcctcgggcctccccggcagcgcggagctgacggtgggcgcggcggtcgcctgcttcctggcgctggagggcgccgacgtgagctacaccaaccaccgcggtcggagcccgctggacctggccgccgagggtcgcgtgctcaaggcccttcagggctgcgcccagcgcttccgggagcggcaggcgggcgggggcgcggccccgggccccaggcaaacgctcgggacccccaacaccgtgacgaacctgcacgtgggcgccgcgccggggcccgaggccgctgagtgcctggtgtgctccgagctggcgctgctggtgctgttctcgccgtgccagcaccgcaccgtgtgtgaggagtgcgcgcgcaggatgaagaagtgcatcaggtgccaggtggtcgtcagcaagaaactgcgcccagacggctctgaggtggcgagcgccgcccccgcccccggcccgccgcgccagctggtggaggagctgcagagccgctaccggcagatggaggaacgcatcacctgccccatctgcatcgacagccacatccgcctcgtgttccagtgcggccacggcgcatgcgccccctgcggctccgcgctcagcgcctgccccatctgccgccagcccatccgcgaccgcatccagatcttcgtgtgagccgcgccgtccgccgcgcccgagctgccttcgcgtgcccccgccctgtgttttataaaaagaaagattctcggacgttg

SEQ ID NO: 1497 - DNA, 4252 bp, Homo sapiens
  source 1..4252: mol_type = genomic DNA
ggcggctccggagtccgggaggctctggctgctccagtcgcgggtccgggccccgcctctccactcggcggtggcgtccgtgttgttattgtggtggtagcggcgtctggctgctgcggaccccgccgagtcctagcgcctggcctgcgcgccgctgcccgcgccacagccccatcactgagaagaattttttcactgtatagttgcctctgcacttaaagcaggcttggtccatgaatcccatgacaagagctttgaggacatgaggagcattctttgttcaaacatactgtgttttcctttggatcactggattaatttatttttggaaatcaagtgcaatattggaagccatttctactaattttatttcacttttaaatttatgatttgatttgaatactatcatgggaggagctgtgagtgctggggaagataatgatgacttaattgataatttaaaagaagctcagtatattcgtactgaaagagtggagcaagccttcagagcgattgatcgtggagattactatttggaaggctacagagacaatgcttacaaagacttagcctggaagcatggaaacatccacttgtcagcaccttgcatttattctgaagttatggaagcattgaaacttcaaccaggattgtcttttcttaacctgggaagtggaaccggatatttaagtacaatggtgggcttaattttaggtccttttggaataaatcatgggattgagcttcattcagatgtggtggaatatgccaaggaaaaactggagagcttcatcaaaaatagtgatagctttgataaatttgagttctgtgaacctgcatttgttgttggtaattgcctccagatagcttctgacagtcatcagtatgatcgaatttattgtggagctggagtgcagaaagaccatgaaaactacatgaaaatattactaaaagttggaggcatattagtcatgcctatagaggatcagttaacacagattatgcgaactggacagaacacttgggaaagtaaaaatatccttgctgtttcatttgctccacttgtgcaaccaagtaagaatgataatggcaaaccagattctgtgggactccctccctgtgctgtcaggaatctacaggacttggctcgtatttacattcgacgcacacttagaaatttcataaatgatgagatgcaggccaaggggattcctcaaagggctccacccaaaaggaaaagaaagagagttaaacagagaattaacacttacgtatttgtgggtaatcagcttattcctcagcctctagacagtgaagaggatgaaaaaatggaagaggataacaaagaagaggaggaaaaagatcacaatgaagcaatgaagccagaggagccacctcaaaatttactgagagaaaaaatcatgaagctgcccctccctgaatctttaaaagcttacttgacatattttagagacaaataacttagatcaagaagaaaaatgcctactgataattcctttagtcttgaaaatgtagcatttgttaggagttaaaagagagaattatttctttcatcagagcaaattatagtggaaaaaaaatcacttgtttctgtcagtaacacaaatgatgtattcagtgaataaaagaatcccttttataaaatctatttttctttaaatcttggaaaaatgttgttttagctcagagtgatttcaaagtggaatgcaacagtagtcaagacttgtgtactataaatccttttctgattccttacagatttgtagtgatgaggtttagatttaattttatatatggtttaaataattgttaagcttatataacctgatctgaattgcagttgtttgcatttcctctatgaaaacttcatttatctaataaggaagtcaaatgctttgtagactatttaccttacttttgttgcaatcactgttgttgggttgctgtatatatattccgggcaatatatgagtgcaataacaatacaagatattgaataatttagctttaaaaaatcccacaaattttatgaaattttacagccctgctacttttgcttttgaatctcttgccaaaagacatgggtaaaatatctgcctctctcatagagattttaagagcacagcaagtgaattattaaaacaaagtctatacttaatacaactctttatatggaccctttacattttcagtatttaaaaaaatgaggttatcttaactctatagaattttaaaagtatatttagaattgttttttctgtagttcactgtataaagtatttggttttttaaaaaaagcaaaaccattgttatgtgtgactcttgataggacacagaacgagtgaatgagcatgagtgaggccactttcttggatggctgtaagtagcagggccagggtagacctggtcagcggatgcactttagcagatggaacttctagtttatctgaatatttatctttgacaaggtagggctgagcctacatttgcttttgatctatctagtataagaaatattcacagaaattgtatgtagataccctttgttttgaaaatgctgttcagaatcatagtgtaatctttgggacctatgccatgttcatttcactccttcccatattttttgtgtttcttttggtaaaactataatggttttcattttttacttaatatcacacagttaaactgtccatatttgagctttattttagcttatcagtgataaaaaacaggtagtaactgccattgtttgtttgttttcctaataaggcctgaaaacagccattccttgttaagaaagtgtacaatgtaacatatttgctagagttacatggattatatatttcttaaagggaaaaatttgagagtatcatggactaccaccagcattattattacagtagttactcagatttggttaaggaagcccaagcaatgtatagtgaaaggattattatctctctgctaagattcagatattgtttcagaaatctcagctccagtaattccacaacatctaaaaacaaatgtttgtgatcatgtgtaagcatgaaattgttccaagtaagtgaggatattttagttatgtgaaagacagtttcatggaaggtatttgttttataccagtggctgggatggtggaattggggttatttctacaattattcttagacgattactaaactgttaagaaatgccccatatcatttttgtatctaggaaagaaaaaaatcagtttcatactgttgtcatctgtcagaaatgctcattttattttgaattaaatgtggcttttgaagtacctagttaccttgaattcctggtgaccacatgtttttatctggaaaacctggagaaagttatctgtcccatctcccctgcttgtttttttttttttttttggttggagctgctgtttagatgatgcttttactatgcaggagagagtttttgttaaggatatatttgaagattggcttttccatattgtccttcattctttgaccatggcaaagtgtacagtagattttcatgatcattgcatatttcttgtcattgaaatgtatcttttatgtttttaaatgcattcattttacacttgtgagtttatcattgactttaagaggtagaaatgaaaaatgaaaattaaagctaaagcctttttatctattaatgcagatatattagaataagaatattttgggtttgtgtttattttttaatgaatttatgtttacttgatatggaaaattacgctttataggtggaaaagtagcaaataaagattaagtaaaagtaagtgaaaatgatggggaatatagtattggaattttatagctagttaaaacagtaagtatcatctaatttgggtgtttattttgcagatgagaaaacagacctagaaccgtggcatgttttgcctgaaacatacagtgagttagagacagggcctaagatagcttctagcatcagatcaatcccaagaatccatcagcaacctcagaccaacccaagaagataatttaaatctatactgcttattggtcaatatatttggttctagtattaataaagaaaaatgttattaaaatagcatacatagtagtaaaataaaatacaaaaagtgtgttgatttatagctgtttgagatgataaaagtgaagcaaagcctgttaaatcattggaagacttggaaaattattttaaataaacaattacatgtaattaagca

SEQ ID NO: 1498 - DNA, 1156 bp, Homo sapiens
  source 1..1156: mol_type = genomic DNA
gtcgcattggtttatagatagacgtaatcaatggatggcattgcaaggagcatccagttttatggagggtggaagcctcacttccttggctataataaagagttctgatgcatcttcatacaacaagaggaagagtctgcacgcagaagcaccaccttctagggataaataaagggtcaagctaaggaagggcagaacaaacttcagacactcacttctttgcctcaacttcagcctgctctcacaacctcactatgtcttgccccaactactgctcgggaaactccaactcaggatctctcagaacctcccgccatattcctctcacctccatcgacctctgccctaccagcgtgagctgtggagatgtcctctacttacccactagctctcaagaccatacctgggtcacagacaactgccaagagacctgcggtgaaccaaccagctgccagccggtccactgtgagaccggcaatcttgaaacctcttgcggttcttccactgcttactacgtgcccaggccttgccaaggaagcagttttcttcctgcttctttcttctccagttcctgccttccagtatcctgtagaccacagaggtatgtgtccagcggctgtcgtccactgaggccgctgctcaatagttaccagcccataggagactgtgtgcccaatgcctatcgcccccaattctgcttgtccaagagttgccagccccaaaacctcctcacttctggatgccaaccctcgagttgcttggcctatcgtcctcaaagtcttcacgttgtgtccagcagcctcagacctctggggcctctgttcagtggttgccaacctctgacccatgtgttcagcacgtgtcgtccatcttgctctggactgtgaaaccagcagcttctttgttccagtgaataatcactctgagcatccacaacaaaaattcaaactccatggacttttgcttctttgctagtagcaactgatgtttcttagttttactgtgcctgatctaatgcaagctgcttctctcgcatgttttatcttgttttcatctttccttgacatcaaaaaaattagtttacaatgctattcaatgttgctctggtctgggaagaatgtatttgttttgcactataataaatgcgattaagtcc

SEQ ID NO: 1499 - DNA, 1157 bp, Homo sapiens
  source 1..1157: mol_type = genomic DNA
tgggtccgtggcggcgggaggggtggcctcctgcgctggtcgccccaggggacctgagaggcgcgacaaacagtcggcgcgtttggtactcgcgcctgcagagctttcaacctccgcgccggctgcgcctgtttctcggccaggggagcaaggccacgcggcctacgcagccgagtcggaaccaaccggttgtttggtgaaacctaccccagagcctcccgcggcccacagagcacagactgtttttgccaaccatggcatctggagatgacagtcctatctttgaagatgatgaaagccctccttacagcctagaaaaaatgacagatctcgtagctgtttgggatgttgctttaagtgacggagtccacaagatcgaatttgaacatgggactacatcaggcaaacgagtagtatatgtagatggaaaggaagagataagaaaagagtggatgttcaaattagtgggcaaagaaacattctatgttggagctgcaaagacaaaagcgaccataaatatagacgctatcagtggttttgcttatgaatatactctggaaattaatgggaaaagtctcaagaagtatatggaggacagatcaaaaaccaccaatacttgggtattacacatggatggtgagaactttagaattgttttggaaaaagatgctatggacgtatggtgcaatggtaaaaaattggagacagcgggtgagtttgtagatgatgggactgaaactcacttcagtatcgggaaccatgactgttacataaaggctgtcagtagtgggaagcggaaagaagggattattcatactctcattgtggataatagagaaatcccagagattgcaagttaatgaattttcatcttaagaagtaaagatcaggactttttaattactgtggtaattaaatgtgttcagtatgtacttatcagtacatttagtctgcaatgttttaattttttaaaaagttacatgaaactaacattccaagggtcaggaaaaaaaccaattatgtatagtcataaaaattacaatttatgatgcaaataatgtaaaatgttttaaagacaaatggcaaataagatatggaccaaagtcactaatgttttacaacagtaacctttactataataaatacttttaaaaaaa

SEQ ID NO: 1500 - DNA, 5996 bp, Homo sapiens
  source 1..5996: mol_type = genomic DNA
gcgggaagcagctcttgtggatcctcagtggcggaggctcggtcacccggataggtaaaggaaaacatgcctgccacacggaagccaatgagatatgggcatacagagggacacacggaggtctgttttgatgattctgggagttttattgtgacttgtggaagtgatggtgatgtgaggatttgggaagacttggatgatgatgatcctaagttcattaatgttggagaaaaggcatattcatgtgctttgaagagtggaaaactggtcactgcagtttctaataatactattcaagtccacacatttcctgaaggagttccagatggtatattgactcgcttcactacaaatgcaaaccatgtggtctttaatggggatggtactaaaattgctgctggatctagtgattttctagtcaaaattgtggatgtgatggatagcagccaacagaaaacatttcgaggacatgatgcccctgttttaagtctttcctttgatcctaaggacatctttctggcatcagctagttgtgatggatctgtcagagtgtggcaaatttcagatcagacatgtgctattagttggccactgctacaaaaatgcaacgatgtgataaatgcaaaatcaatctgcagacttgcttggcagccaaaaagtgggaagttactggcaattcctgtggaaaaatctgttaagctatatagaagagaatcttggagtcatcaatttgatctttcagataatttcatctctcagaccctcaatatagtaacctggtctccctgtgggcaatatttagctgcaggtagtattaatggtctaatcatagtttggaatgtggaaaccaaagactgcatggaaagggtgaaacatgagaaaggttatgcaatttgtggtctggcatggcatcctacttgtggtcgaatatcgtatactgatgcggaaggaaatctagggcttctagagaatgtttgtgaccccagtggaaagacatcaagcagtaaggtatctagcagagtggaaaaggattataatgatctttttgatggagatgatatgagtaatgctggtgattttctaaatgacaatgcagttgagatcccttctttttcaaaagggattataaatgatgatgaggatgatgaagacctcatgatggcttcaggtcgtcctagacagcgaagtcacatcctagaagatgatgaaaactcagttgatatttcaatgctaaaaactggttctagtcttctcaaagaggaggaggaagatggtcaagaaggcagcattcacaatctaccacttgtaacatcccaaaggccattttatgatggacccatgccaactccccggcaaaagccatttcagtcaggttctacaccgttgcatctcactcacagattcatggtgtggaactctattggaattattcgctgctataatgatgagcaagacaatgccatagatgtggagttccatgatacctccatacaccatgcaacacacttatcaaacactttgaattatacaatagcagatctttcccacgaagctattttgttggcatgtgaaagcactgatgaactagcaagcaagcttcactgcctgcactttagttcttgggattcaagcaaagagtggataatagacttgcctcagaatgaggatattgaagccatatgtctcggtcaaggatgggctgctgccgctactagtgccctgcttcttcgattgtttactattggaggggttcaaaaagaggtattcagccttgctggacctgtggtgtcaatggcaggacatggagaacagcttttcattgtttatcacagaggtacaggatttgatggggatcagtgccttggagttcaactgctagagctggggaaaaagaaaaaacaaattttgcatggtgaccctcttcctcttacaaggaaatcctaccttgcatggattgggttttcagctgaaggtaccccttgttacgtggattcagaaggaattgttcgaatgcttaacagaggacttggtaatacgtggactcctatatgtaatacaagagagcactgcaaaggaaaatctgatcactactgggtggttggtatccatgaaaatccccagcaactaaggtgcattccttgtaaaggttctcggtttcccccaacccttccacgccctgctgttgctatattatcctttaagcttccttactgtcagattgcaacagagaaaggacaaatggaggagcaattttggcgttcagttatatttcacaaccaccttgattatttagctaaaaatggttatgaatatgaagagagcactaaaaatcaagcaacaaaagagcaacaggaacttttaatgaaaatgcttgcgctttcttgtaaactggagcgagaattccgttgtgtggaacttgctgatctaatgactcaaaatgctgtgaatttagccattaaatatgcttctcgctctcggaaattaatactggctcaaaaactaagtgaactggctgtagagaaggcagccgaattgacagcaacccaggtggaagaggaagaagaagaagaagatttcagaaaaaagctgaatgctggttacagcaatactgctacagagtggagccaaccaaggttcagaaatcaagttgaagaagatgctgaggacagtggagaagctgatgatgaagaaaaaccagaaatacataagcctggacagaactcgttttccaaaagtacaaattcctctgatgtttcagctaagtcaggtgcagttacctttagcagccaaggacgagtaaatccctttaaggtatcagccagttccaaagaaccagccatgtcaatgaattcagcacgttcaactaatattttagacaatatgggcaaatcatccaagaaatccactgcacttagtcgaactacaaataatgaaaagtctcccattataaagcctctgattccaaagccgaagcctaagcaggcatctgcagcatcctatttccagaaaagaaattctcaaactaataaaactgaggaagtgaaagaagaaaatcttaaaaatgtattatctgaaaccccagctatatgtcctcctcaaaacactgaaaaccaaaggccaaagaccgggttccagatgtggttagaagaaaatagaagtaatattttgtctgacaatcctgacttttcagatgaagcagacataataaaagaaggaatgattcgatttagagtattgtcaactgaagaaagaaaggtgtgggctaacaaagccaaaggagaaacggcaagtgaaggaactgaagcaaagaagcgaaaacgtgtggttgatgaaagtgatgaaacagaaaaccaggaagaaaaagcaaaagagaacctgaatttgtctaaaaagcagaaacctttagatttttctacaaatcagaaactatcagcttttgcatttaagcaggagtaaaggaagaaagtgaccctagggaagtaatggatttttttttactcatctttgaatatagactcgagtctttgggaaactcattatatatatattttttaaagagtttgaagcaactgtttgtctttataagataatgtagtaattatattggtgtaggtaacaggacatatgtaaaaactatcatctttgcagattactctgcctccaaatgcagggcctttcagagatgcattgtgattgtaattactgagttgaagctccaaccaatttgaatttgtttcttaaccttgaaaaatcattaaagccaaggtattaaaacctttgtgcattaataccttctaggggtttggttcatttggtttttgtcatgtgcaaggaaggacaatagtcctctttccaagtgtgttagcatagacttctctatatgtttctactagacctaggggatgacgtcttttaataatactggccctaaacatgtaaataatcttgtaggtgagactttttcttttgtgtttcggaaatttcctatgtggctttcagttgtctgtttgtatagcctggatttttttgaggtaaatgaaactttctcatttgtatatttggcttgatatggtcttaatattatctttccacgaaatggatatatttctagaaaatatatatttactaccataatttctaccaccacccccattttgctctgcattatacacagtagagaagaactgaagacactgctgtgacagtattgcagtccaaggcatcatgtgctcttggtgggatactctgattatcagcatcaacagtactttactgagcaagactttgaaggcctgagaagagagcaaagttatggaaagtatttaactcttattttatattgaacaaacaaggtttaatcatgtcatacatttttggttttctaagcagagactaatacaaatgcagccacataaaggcagtgtactgggggtgggagggaaggaaacaatcacataaaatcagctgactcaaaattgaggatagttaataggttgaaagggaaaaagtatgttgaaaatttagacataaatgaaccaagaatattccttatctggtgatgattaaagttaggaaaacatacattttttattttttaattagtagctgctatcagagacattatagcacagtggttatgagcacagattccaaagccagattacctaggttcggagacccgcttctctacctactactaatagttgggtcatgttgggccggtgacccaaattctagccttcattcactcatctgtaaaatggatataatgatagtacctactttataggttgttatgagaattgaatgaaatgaaagcccttagtttctgacacatagtaatcttttatataaatgttagttactattctgataatgatgatgctgttggttatttcatcttgctttgtcattaggtttgattctgaatactatacaaactaattttgatttcaagatcttaagtaaaggtttatttatagtacattggaaagcatgtttgtagacatgtattttgtgtttggttcctcaacttgctttgtatatattttataatactaggttgatataaaagtaaatgcagtttcgccatttcagtggcaaaaaccgcgatttcttttgtgccaacctaatgcttaaggatataatctgtgtatattgtatttcagattcatagcaacctaataacaaggatttacaaaagggtttttacttccctacttttttttggctgaaggaaggtttttgtattgacttggtttaacttacaaatcagaactttgaaaccaagaaacattatccttatttctctgctatataatagtaaacctgtttttttccagtgttcttttttttttttccagagaattgggactgaatagtatgaaagtgaaaatggaaataaattaattattaatcatcatcatatcaataatattgcctacttgagcttattgtatactatagaaaattgacatatacttaattttattctccaaaagcaaaaactcctcacaggaggttactttacagatttattttggagaacaagtgaataggcactggggttatgtgcagctctggggactgtgctatgatctaaagcctctcatatctgtgcagcaacctggggtgagtcactgtcactaacatggaacagatgccaggtagtccctttggacaaaaggatgaggcccatccatgtagaaagcatcttaatcagtgactgtcttatgggccctctttgtttcccatctgttttattatcagaatatataattttcccccaagttttcatcttgaatctctcaaacctacagaaaatttgaaatttgacagtaagcacctgtatatccttcctctagtttgtcttattgttgacattttatcatgtatgctttatagacaggatttttcctgaaccatttggaatatgcatatacttcatccctcagttcccagcatgtaccctaagaataaagattttcttctgcata

SEQ ID NO: 1501 - DNA, 1576 bp, Homo sapiens
  source 1..1576: mol_type = genomic DNA
agtgggtcttctcactcttttccaggctccttggaggtcactgccctgatgacaacatggtcttcccttcaaggaagccacgtttctaagagggctctggcatatgcattggtggtcactaactgccaagagagaatccagcattggaagaaggtagataatgactataatgcccttcgagaaagactcagcaccttgcctgataaattgtcttataatataatggtaccatttggcccttttgccttcatgccaggaaaacttgtccatactaatgaagtcactgttttactgggggacaactggtttgcaaagtgctcagcaaagcaggctgtaggtttagttgagcaccggaaagaacatgtaagaaaaacaatagatgacttaaaaaaagtgatgaaaaattttgaatccagagttgaattcacagaagatttgcagaaaatgagcgatgctgcaggtgatattgttgacatacgagaagaaattaaatgtgacttcgaatttaaagcaaaacaccgaattgctcataaaccgcattccaaaccaaaaacttcagatatttttgaagcagatattgcaaatgatgtgaaatccaaggatttgctagctgataaagaactgtgggctcgacttgaagaactagagagacaggaagaattgctgggtgaacttgatagtaagcctgatactgtgattgcaaatggagaagatacgacatcttctgaagaggaaaaggaagatcgtaacacaaatgtgaatgcgatgcatcaagtaacagactctcatactccttgtcataaggatgttgcaagttcagaaccattcagtggtcaagtgaatagtcagttgaactgttcagtgaatggttccagttcttaccacagtgatgatgatgatgatgatgatgatgacgacgacgacgacaacattgacgacgatgatggtgataacgaccatgaggctttaggggttggagataattctataccaacaatatatttttcacatactgttgagcctaagagggtccgaataaatactggaaagaataccactttaaaattcagtgaaaagaaagaagaagccaaacgtaaacgaaagaacagcactggcagtggccactctgcccaggagctgccgaccatcaggacgcctgcagacatttacagagcctttgttgatgttgtgaatggagaatatgtccctcgcaaatccatcctgaagtctcgaagtagagagaatagtgtgtgtagcgacactagtgaaagcagtgctgctgaatttgatgataggcggggagttttgaggagtatcagctgcgaagaagccacttgcagtgacaccagtgagagcattttggaagaggaaccacaagaaaatcaaaagaaacttttgcccttatcagtaacacctgaggttttgcggctagttggctattcaagaaacctcgcccctctgaatgtcatactgtaatctttaaggaagaaagctacatgaattaattgtactctatgggaaaatttctttggaaagatattttgtaaaacttttttttccaagtaaaaactttatg

SEQ ID NO: 1502 - DNA, 2369 bp, Homo sapiens
  source 1..2369: mol_type = genomic DNA
agcggaccgacgcgacacgccgtgcgcctccgcggctgcgctacgaaaacgagtcccggagcggccccgcgcccgccgcacccggccctcgcccgcccgaagacaggcgccaagctgccccgccgtctccccagctagcgcccggccgccgccgcctcgcgggccccgggcggaagggggcggggtcccgattcgccccgcccccgcggagggatacgcggcgccgcggcccaaaacccccgggcgaggcggccggggcgggtgaggcgctccgcctgctgcgcgtctacgcggtccccgcgggccttccgggcccactgcgccgcgcggaccgcctcgggctcggacggccggtgtccccggcgcgccgctcgcccggatcggccgcggcttcggcgcctggggctcggggctccggggaggccgtcgcccgcgatgctgctctccaagttcggctccctggcgcacctctgcgggcccggcggcgtggaccacctcccggtgaagatcctgcagccagccaaggcggacaaggagagcttcgagaaggcgtaccaggtgggcgccgtgctgggtagcggcggcttcggcacggtctacgcgggtagccgcatcgccgacgggctcccggtggctgtgaagcacgtggtgaaggagcgggtgaccgagtggggcagcctgggcggcgcgaccgtgcccctggaggtggtgctgctgcgcaaggtgggcgcggcgggcggcgcgcgcggcgtcatccgcctgctggactggttcgagcggcccgacggcttcctgctggtgctggagcggcccgagccggcgcaggacctcttcgactttatcacggagcgcggcgccctggacgagccgctggcgcgccgcttcttcgcgcaggtgctggccgccgtgcgccactgccacagctgcggggtcgtgcaccgcgacattaaggacgaaaatctgcttgtggacctgcgctccggagagctcaagctcatcgacttcggttcgggtgcgctgctcaaggacacggtctacaccgacttcgacggcacccgagtgtacagccccccggagtggatccgctaccaccgctaccacgggcgctcggccaccgtgtggtcgctgggcgtgcttctctacgatatggtgtgtggggacatccccttcgagcaggacgaggagatcctccgaggccgcctgctcttccggaggagggtctctccagagtgccagcagctgatccggtggtgcctgtccctgcggccctcagagcggccgtcgctggatcagattgcggcccatccctggatgctgggggctgacgggggcgtcccggagagctgtgacctgcggctgtgcaccctcgaccctgatgacgtggccagcaccacgtccagcagcgagagcttgtgaggagctgcacctgactgggagctaggggaccacctgccttggccagacctgggacgcccccagaccctgactttctcctgcgtgggccgtctcctcctgcggaagcagtgacctctgacccctggtgaccttcgctttgagtgccttttgaacgctggtcccgcgggacttggttttctcaagctctgtctgtccaaagacgctccggtcgaggtcccgcctgccctgggtggatacttgaaccccagacgcccctctgtgctgctgtgtccggaggcggccttcccatctgcctgcccacccggagctctttccgccggcgcagggtcccaagcccacctcccgccctcagtcctgcggtgtgcgtctgggcacgtcctgcacacacaatgcaagtcctggcctccgcgcccgcccgcccacgcgagccgtacccgccgccaactctgttatttatggtgtgaccccctggaggtgccctcggcccaccggggctatttattgtttaatttatttgttgaggttatttcctctgagcagtctgcctctcccaagccccaggggacagtggggaggcaggggagggggtggctgtggtccagggaccccaggccctgattcctgtgcctggcgtctgtcccggccccgcctgtcagaagatgaacatgtatagtggctaacttaaggggagtgggtgaccctgacacttccaggcactgtgcccagggtttgggttttaaattattgactttgtacagtctgcttgtgggctctgaaagctggggtggggccagagcctgagcgtttaatttattcagtacctgtgtttgtgtgaatgcggtgtgtgcaggcatcgcagatgggggttctttcagttcaaaagtgagatgtctggagatcatatttttttatacaggtatttcaattaaaatgtttttgtacatagtggataa

SEQ ID NO: 1503 - DNA, 3111 bp, Homo sapiens
  source 1..3111: mol_type = genomic DNA
gcgagttgtgtgagccgccagtatggccgggctatggcggcgagcactggctacgtgcgactgtggggagcggcgcggtgctgggtgctgcggcggccgatgctggccgccgccggggggcgggttcccactgcagcaggagcgtggttgctccgaggccagcggacctgcgacgcctctcctccttgggcactgtggggccgaggcccggcaattgggggccaatggcgggggttttgggaagcgagcagccgcggcggaggcgcattctcggggggcgaggacgcctccgagggcggcgcggaggaaggagccggcggcgcggggggcagcgcgggcgccggggaaggcccggtcataacggcgctcacgcccatgacgatccccgatgtgtttccgcacctgccgctcatcgccatcacccgcaacccggtgttcccgcgctttatcaagattatcgaggttaaaaataagaagttggttgagctgctgagaaggaaagttcgtctcgcccagccttatgtcggcgtctttctaaagagagatgacagcaatgagtcggatgtggtcgagagcctggatgaaatctaccacacggggacgtttgcccagatccatgagatgcaggaccttggggacaagctgcgcatgatcgtcatgggacacagaagagtccatatcagcagacagctggaggtggagcccgaggagccggaggcggagaacaagcacaagccccgcaggaagtcaaagcggggcaagaaggaggcggaggacgagctgagcgccaggcacccggcggagctggcgatggagcccacccctgagctcccggctgaggtgctcatggtggaggtagagaacgttgtccacgaggacttccaggtcacggaggaggtgaaagccctgactgcagagatcgtgaagaccatccgggacatcattgccttgaaccctctctacagggagtcagtgctgcagatgatgcaggctggccagcgggtggtggacaaccccatctacctgagcgacatgggcgccgcgctcaccggggccgagtcccatgagctgcaggacgtcctggaagagaccaatattcctaagcggctgtacaaggccctctccctgctgaagaaggaatttgaactgagcaagctgcagcagcgcctggggcgggaggtggaggagaagatcaagcagacccaccgtaagtacctgctgcaggagcagctaaagatcatcaagaaggagctgggcctggagaaggacgacaaggatgccatcgaggagaagttccgggagcgcctgaaggagctcgtggtccccaagcacgtcatggatgttgtggacgaggagctgagcaagctgggcctgctggacaaccactcctcggagttcaatgtcacccgcaactacctagactggctcacgtccatcccttggggcaagtacagcaacgagaacctggacctggcgcgggcacaggcagtgctggaggaagaccactacggcatggaggacgtcaagaaacgcatcctggagttcattgccgttagccagctccgcggctccacccagggcaagatcctctgcttctatggcccccctggcgtgggtaagaccagcattgctcgctccatcgcccgcgccctgaaccgagagtacttccgcttcagcgtcgggggcatgactgacgtggctgagatcaagggccacaggcggacctacgtgggcgccatgcccgggaagatcatccagtgtttgaagaagaccaagacggagaaccccctgatcctcatcgacgaggtggacaagatcggccgaggctaccagggggacccgtcgtcggcactgctggagctgctggacccagagcagaatgccaacttcctggaccactacctggacgtgcccgtggacttgtccaaggtgctgttcatctgcacggccaacgtcacggacaccatccccgagccgctgcgagaccgtatggagatgatcaacgtgtcgggctacgtggcccaggagaagctggccattgcggagcgctacctggtgccccaggctcgcgccctgtgtggcttggatgagagcaaggccaagctgtcatcggacgtgctgacgctgctcatcaagcagtactgccgcgagagcggtgtccgcaacctgcagaagcaagtggagaaggtgttacggaaatcggcctacaagattgtcagcggcgaggccgagtccgtggaggtgacgcccgagaacctgcaggacttcgtggggaagcccgtgttcaccgtggagcgcatgtatgacgtgacaccgcccggcgtggtcatggggctggcctggaccgcaatgggaggctccacgctgtttgtggagacatccctgagacggccacaggacaaggatgccaagggtgacaaggatggcagcctggaggtgacaggccagctgggggaggtgatgaaggagagcgcccgcatagcctacaccttcgccagagccttcctcatgcagcacgcccccgccaatgactacctggtgacctcacacatccacctgcatgtgcccgagggcgccacccccaaggacggcccaagcgcaggctgcaccatcgtcacggccctgctgtccctggccatgggcaggcctgtccggcagaatctggccatgactggcgaagtctccctcacgggcaagatcctgcctgttggtggcatcaaggagaagaccattgcggccaagcgcgcaggggtgacgtgcatcgtcctgccagccgagaacaagaaggacttctacgacctggcagccttcatcaccgagggcctggaggtgcacttcgtggaacactaccgggagatcttcgacatcgccttcccggacgagcaggcagaggcgctggccgtggaacggtgacggccaccccgggactgcaggcggcggatgtcaggccctgtctgggccagaactgagcgctgtggggagcgcgcccggacctggcagtggagccaccgagcgagcagctcggtccagtgacccagatcccagggacctcagtcggcttaatcagagtgtggcatagaagctatttaatgattaaagtcatttgcagta

SEQ ID NO: 1504 - DNA, 2103 bp, Homo sapiens
  source 1..2103: mol_type = genomic DNA
ataattcaacagctcaactttcgggcccgcctctttcctgggggtgggagtttgctccaaactttgtttatgggacagtccgggagctgctgcggccgcgctgtctgcttctcctgcgcctccttttcgcccagcactagcgccttaggccagctcgggggatgtgagagccgaagcccttagactgccaggcacagagtcgggtcgggatttgtcagccaagcctcggctccagctccgcaatctcgggactcacccgagcgacccaggcccgacggcaagttcgggcgggacggcggccgccgcgcgctcaggctcagcttcgctgcccgcccagaagatgaatccggcctcggcgccccctccgctcccgccgcctgggcagcaagtgatccacgtcacgcaggacctagacacagacctcgaagccctcttcaactctgtcatgaatccgaagcctagctcgtggcggaagaagatcctgccggagtctttctttaaggagcctgattcgggctcgcactcgcgccagtccagcaccgactcgtcgggcggccacccggggcctcgactggctgggggtgcccagcatgtccgctcgcactcgtcgcccgcgtccctgcagctgggcaccggcgcgggtgctgcgggtagccccgcgcagcagcacgcgcacctccgccagcagtcctacgacgtgaccgacgagctgccactgcccccgggctgggagatgaccttcacggccactggccagaggtacttcctcaatcacatagaaaaaatcaccacatggcaagaccctaggaaggcgatgaatcagcctctgaatcatatgaacctccaccctgccgtcagttccacaccagtgcctcagaggtccatggcagtatcccagccaaatctcgtgatgaatcaccaacaccagcagcagatggcccccagtaccctgagccagcagaaccaccccactcagaacccacccgcagggctcatgagtatgcccaatgcgctgaccactcagcagcagcagcagcagaaactgcggcttcagagaatccagatggagagagaaaggattcgaatgcgccaagaggagctcatgaggcaggaagctgccctctgtcgacagctccccatggaagctgagactcttgccccagttcaggctgctgtcaacccacccacgatgaccccagacatgagatccatcactaataatagctcagatcctttcctcaatggagggccatatcattcgagggagcagagcactgacagtggcctggggttagggtgctacagtgtccccacaactccggaggacttcctcagcaatgtggatgagatggatacaggagaaaacgcaggacaaacacccatgaacatcaatccccaacagacccgtttccctgatttccttgactgtcttccaggaacaaacgttgacttaggaactttggaatctgaagacctgatccccctcttcaatgatgtagagtctgctctgaacaaaagtgagccctttctaacctggctgtaatcactaccattgtaacttggatgtagccatgaccttacatttcctgggcctcttggaaaaagtgatggagcagagcaagtctgcaggtgcaccacttcccgcctccatgactcgtgctccctcctttttatgttgccagtttaatcattgcctggttttgattgagagtaacttaagttaaacataaataaatattctattttcattttctgcaagcctgcgttcttgtgacagattatacagaattgtgtctgcaggattgattatgcagaatacttttctctttcttctctgctgccccatggctaagctttatgggtgttaattgaaatttatacaccaattgattttaaaccataaaaagctgaccacaggcagttacttctgagggcatcttggtccaggaaatgtgcacaaaattcgacctgatttacagtttcaaaaactgtattgatgacagtagtaccaaatgctttaaaaactatttaacttgagctttaaaaatcattgtatggatagtaaaattctactgtatggaatacaatgtaattttgaatcca

SEQ ID NO: 1505 - DNA, 3031 bp, Homo sapiens
  source 1..3031: mol_type = genomic DNA
atggagatggctaacagctagagcaggctgtcctcggagggaaccgggtcacatcgcagggccacctctagctgcaagagaatctgggaagctgagcaattcaaaccaggcacactgctgccccccacacaactggggttctgccgtatagaagaggagactggatctttggagacattccatctccagacacccagagacgctccagaatggaggtcctgagggagaaggtggaggaggaggaggaggccgagcgggaggaggcggccgagtgggctgaatgggcgaggatggagaaaatgatgaggccagttgaggtgcggaaggaggaaatcaccttaaagcaggagacgctcagagacctggagaagaagctgtcagagatccagatcactgtctcagcggagctcccggcctttaccaaggacactattgacatctccaagctgcccatttcctacaaaaccaacacacccaaggaggaacacctgctgcaggtggcagacaacttctcccgccagtacagccatctgtgcccggaccgcgtgcccctcttcctgcaccccctgaacgagtgtgaagtgcccaagttcgtgagcacaaccctccggcccacactgatgccctaccccgagctctacaactgggacagctgtgcccagtttgtctccgacttcctcaccatggtgcccctgcctgaccctctcaagccgccctcgcacctgtactcctcgaccactgtgctcaagtaccagaaggggaactgctttgacttcagtacgctgctctgctccatgcttatcggctctggctatgatgcttactgcgtcaacggctacggctcgctggacctgtgccacatggacctgacgcgggaggtgtgcccactcactgtgaagcccaaggagaccatcaagaaggaggaaaaggtgctgcctaagaagtataccatcaaaccccccagggacctgtgcagcaggtttgagcaggagcaagaggtgaagaagcagcaggagatcagagcccaggagaagaagcggctgagggaggaggaggagcgcctcatggaagcggagaaggcaaagccggatgccctgcacggcctgcgggtgcactcctgggtccttgtgctatcggggaagcgcgaggtgcctgagaacttcttcatcgacccattcacaggacatagctacagcacccaggatgagcacttcctgggcatcgaaagcctgtggaaccacaagaactactggatcaacatgcaggattgctggaactgctgcaaggacttgatctttgacctgggtgaccctgtgagatgggagtacatgctcctggggactgataagtctcagctgtccttgactgaagaagacgacagtgggataaacgatgaggatgatgtggaaaatctgggcaaggaggatgaggataagagcttcgacatgccccactcgtgggtggagcagattgagatctccccggaagcatttgagacccgctgcccgaacgggaagaaggtgattcagtacaagagggcaaagctggagaagtgggccccgtacctcaatagcaatggccttgtgagccgcctcaccacctatgaggacttgcagtgtaccaatattttggagataaaggagtggtaccagaaccgggaagacatgctggagctgaaacacataaacaagaccacagacctgaagacagactacttcaagcctggccacccccaggctctgcgcgtgcactcgtacaagtccatgcaacctgagatggaccgtgtcattgagttttatgaaacggcccgtgtggatggcctgatgaagcgggaggagacacccaggacaatgacagagtactatcaaggacgcccagacttcctctcctaccgccatgccagcttcggaccccgagtcaagaagctcactctgagcagtgcagagtcaaacccccggcccattgtgaaaatcacagagcggttcttccgcaacccagcgaagcccgcggaggaggacgtggcagagcgcgtgtttctggtcgcggaggagcgcatccagctgcgctaccactgccgtgaggaccacatcacggcctccaagcgcgagttcctgcggcgcaccgaggtggacagcaaaggcaacaagatcatcatgacgcccgacatgtgcatcagcttcgaggtggagcccatggagcacaccaagaagctgctctaccagtacgaggccatgatgcacctgaagagggaggagaagctgtccagacatcaggtctgggagtcagagctggaggtgctggagattctgaagcttcgagaggaagaggaggcggcgcacacactgaccatctccatctatgacaccaagcggaatgagaagagcaaggaatatcgggaggccatggagcgcatgatgcacgaagagcacctgcggcaggtggagacccagctggactacctggccccattcctggcccagctcccgccaggagagaaactaacatgctggcaggcggtgcgcctcaaggatgagtgcctcagcgacttcaagcagcggctcatcaacaaggccaacctcatccaggcccgctttgagaaggagacccaggagctgcaaaagaagcagcagtggtaccaggagaaccaggtgacgctgacacccgaggatgaagacctgtacctgagttactgctctcaggccatgttccgcatccgcatcctggagcagcgcctcaatcgacacaaggaactggccccactgaagtacctggctctggaggaaaagctctacaaggacccacgcctgggggagctccagaaaatattcgcttgatgtccctcctggggcctcagccagagctgccagagaaaggaaacctcttcccgcagcctggctcctgtgttccctctatccagccaatgcctgtttacacagacacctggcctcactgccagcccacctcccctacagccctgtttgttcctgcttctcatgattttcctgtaaataaacacactcttaatttgcca

SEQ ID NO: 1506 - DNA, 2686 bp, Homo sapiens
  source 1..2686: mol_type = genomic DNA
gtctttagctctcatggattgggagctgggaaaggaatgagaagacagaagtcagagacaagaagaggctaacatgactgataccactataatttagtggatcagtgtctttcaatgatgtgactgtggacttcactcaggaggagtggcagcacctggatcatgctcagaagactctatatatggatgtgatgttggaaaactattgccacctcatctctgtggggtgtcacatgaccaaacctgatgtgatcctcaagttggaacgaggagaagagccatggacatcatttgcaggtcatacctgcttggaagaaaactggaaagctgaagactttttagtgaaattcaaggaacaccaagagaagtattctagatcagttgtaagcatcaaccacaaaaaactggtgaaggagaagagtaaaatatatgaaaagacatttactctaggcaaaaaccctgtgaattcaaaaaatctacctcctgaatatgatactcatggaaggattttgaaaaatgtttcagaattaatcatcagtaatctaaatcctgcaagaaagagacttagtgagtataatggatatgggaaatcactcctgagtactaaacaagagactactcatcctgaagtcaaatcccataatcaaagtgccagagctttcagtcataatgaagttcttatgcagtatcagaaaacggaaactccagcacagtcatttggatataatgactgtgagaaatcattccttcaaaggggaggcctgattacacatagtagaccttacaaaggagaaaacccatctgtatataataaaaaaagaagagcaaccaatattgaaaaaaaacatacatgcaatgaatgtgggaaatctttctgcaggaaatcagtattgattctgcatcagggaattcactcagaagaaaaaccctatcaatgtcatcaatgtggaaatgcatttagaaggaaatcatatctcattgatcatcagagaactcacacaggagagaaaccctttgtttgcaatgaatgtggtaagtccttccgcctcaagacagccctcactgatcatcagagaacacacacaggggagaaatcgtatgaatgtctgcaatgtaggaatgccttcagattgaagtcacacctcattcgtcatcagagaactcacacgggagagaaaccatatgagtgtaatgactgtgggaagtccttccgccagaagacaacactctctctacatcagagaatccatacaggtgagaaaccctacatttgtaaagaatgtgggaagtcctttcaccagaaggcaaatcttactgtacatcagagaactcatacaggggaaaagccctatatttgtaatgaatgtgggaaatccttctcccagaagacaacccttgctcttcatgagaaaactcataatgaggagaaaccctatatttgtagtgaatgtggaaagtccttccgccagaagacaacccttgtagcacatcagagaacacatacaggggagaaatcttatgaatgtcctcactgtgggaaggcctttagaatgaagtcatacctcattgatcatcaccgaactcacacaggagagaaaccatatgaatgtaatgaatgtggtaaatcattcagtcaaaagacaaatctcaatctacatcagagaattcatacaggggagaaaccctatgtttgtaatgaatgtgggaagtcctttcgccagaaagcaaccctcactgtacatcagaaaatacataccggccagaaatcctatgaatgtcctcagtgtgggaaagcctttagcaggaagtcatatctcattcatcatcaaagaactcatacgggagagaaaccatataaatgtagtgaatgtggaaagtgcttccgccagaagacaaatcttattgtacatcagagaactcacacaggtgagaaaccctatgtttgtaatgagtgtggtaagtctttcagttataagagaaacctcattgtccatcaaagaactcacaagggagaaaacattgaaatgcaataaatgatgtggtttcttatatgaattctttacaagctgttgtaaacatttagttttaaaaagaaaagcatgctgaaacatgttaatgtaattttaaatcacaagtctaataattattaaagtaccatacggaataactgtctactgtttactagcatataaaataagtatgatcattattattgaactctatcagctatgaagctaaattttaaagtcaactgctcttcctactgactcaaatagtttattttttaaaaatacttatataatacatgcagagacaagatacacaatgattataagtattaatctccataagagaaaatatttatgaactatatttctcattgcactctgtaataaaaagcagttagttgttacttacctaagagttaccacttccgtagcctataacatcaaaacgtagtttttgcatgttttcaattttataaatatatattttatcagacatcatgaattattttgtgtcttgcttatttcactcaattttttaagatctgtacattattgcatgtggcagtagtgtattttcattttgcatactattccattttaagaatatattgctgtttatcctattgatggatatttgtattttttatacttttgtgtaataataaaaatactgctgt

SEQ ID NO: 1507 - DNA, 739 bp, Homo sapiens
  source 1..739: mol_type = genomic DNA
tcactgccctctgcctcgaccttatccagccacacgccaccatgtgtcataccagctgctcctcgggctgccagccagcctgctgcgcgcccagcccctgccagccagcctgttgtgtgcccagctcctgccaggcatcctgctgtgtgcctgtgggctgccagtcctccgtgtgtgtgcccgtgagcttcaagccagccgtgtgcctgcccgtgagctgccagtcttctgtgtgtgtgcccatgagcttcaagtcagctgtgtgcgtgcccgtgagctgccagtcttctgtgtgtgtgcctgtgagctgcaggcccattgtgtgtgcagccccctcctgccagtcctccctgtgcgtgcctgtgagctgcaggcctgtcgtgtatgcggctccgtcctgccagtcctctgggtgctgccagccctcctgcaccagcgtcctctgcagacccatctcctacagtatctcttcctgctgctgagcatgaatctccagacccgctgctcccagtgcagatgaggccacacctgtacactccctggatgagtcctcagttggtcttctgcacatggtgcaggtgaaaagcatgctcagttgaaccctctgaattctggattgagaatgtgacagaatgatctggagcccttgctgaccttgcccatccccccagggaagtctggggtcccagagtcattctctgaccccatgagagccaaataaaccagctttccccatgca

SEQ ID NO: 1508 - DNA, 1305 bp, Homo sapiens
  source 1..1305: mol_type = genomic DNA
gttgaggtcaagtagtagcgttgggctgcggcagcggaggagctcaacatgcgtgagtgtatctctatccacgtggggcaggcaggagtccagatcggcaatgcctgctgggaactgtactgcctggaacatggaattcagcccgatggtcagatgccaagtgataaaaccattggtggtggggacgactccttcaacacgttcttcagtgagactggagctggcaagcacgtgcccagagcagtgtttgtggacctggagcccactgtggtcgatgaagtgcgcacaggaacctataggcagctcttccacccagagcagctgatcaccgggaaggaagatgcggccaataattacgccagaggccattacaccatcggcaaggagatcgtcgacctggtcctggaccggatccgcaaactggcggatctgtgcacgggactgcagggcttcctcatcttccacagttttgggggtggcactggctctgggttcgcatctctgctcatggagcggctctcagtggattacggcaagaagtccaagctagaatttgccatttacccagccccccaggtctccacggccgtggtggagccctacaactccatcctgaccacccacacgaccctggaacattctgactgtgccttcatggtcgacaatgaagccatctatgacatatgtcggcgcaacctggacatcgagcgtcccacgtacaccaacctcaatcgcctgattgggcagatcgtgtcctccatcacggcctccctgcgatttgacggggccctgaatgtggacttgacggaattccagaccaacctagtgccgtacccccgcatccacttccccctggccacctacgccccggtcatctcagccgagaaggcctaccacgagcagctgtccgtggctgagatcaccaatgcctgcttcgagccagccaatcagatggtcaagtgtgaccctcgccacggcaagtacatggcctgctgcatgttgtacaggggggatgtggtcccgaaagatgtcaacgcggccatcgccaccatcaagaccaagcgcaccatccagtttgtagattggtgcccaactggatttaaggtgggcattaactaccagccccccacggtggtccctgggggagacctggccaaggtgcagcgggctgtgtgcatgctgagcaacaccacggccatcgcggaggcctgggctcgcctggacctggcagctctggagaaggattatgaagaggtgggcgtggattccgtggaagccgaggctgaagaaggtgaagaatactga

SEQ ID NO: 1509 - DNA, 5740 bp, Homo sapiens
  source 1..5740: mol_type = genomic DNA
gattggacagctggggaccttcttctgattaaccttaaaccaacttgtagccatagagacacctcacaaggttcccatttttgttgttgttgttgttgattttctgctcacacctttcctgaccttgcaaccatgtatggaagtgcccgctctgttgggaaggtggagccgagcagccagagccctgggcgttcacccaggcttccacgttcccctcgcttgggtcaccgtcgaaccaacagtacgggagggagttcgggaagcagtgttggaggtggcagtgggaaaaccctttcaatggaaaatatacaatctttaaatgctgcctatgccacctctggccctatgtatctaagtgaccatgaaaatgtgggttcagaaacacctaaaagcaccatgacacttggccgttctgggggacgtctgccttacggtgttcggatgactgctatgggtagtagccccaatatagctagcagtggggttgctagtgacaccatagcatttggagagcatcacctccctcctgtgagtatggcatccactgtacctcactcccttcgtcaggcgagagataacacaatcatggatctgcagacacagctgaaggaagtattaagagaaaatgatctcttgcggaaggatgtggaagtaaaggagagcaaattgagttcttcaatgaatagcatcaagaccttctggagcccagagctgaagaaggaacgagccctgagaaaagatgaagcttccaaaatcaccatttggaaggaacagtacagagttgtacaggaggaaaaccagcacatgcagatgacaatccaggctctccaggatgaattgcggatccagagggacctgaatcagctgtttcagcaggatagtagcagcaggactggcgaaccttgtgtagcagagctgacagaggagaactttcagaggcttcatgctgagcatgagcggcaggccaaagagctgtttcttcttcgaaagacattggaggaaatggagctgcgtattgagactcaaaagcagaccctaaatgctcgggatgaatccattaagaagcttctggaaatgttgcagagcaaaggactttctgccaaggctaccgaggaagaccatgagagaacaagacgactggcagaggcagagatgcacgttcatcacctagaaagccttttggagcagaaggaaaaagagaacagtatgttgagagaggagatgcatcgaaggtttgagaatgctcctgattctgccaaaacaaaagctctgcaaactgttattgagatgaaggattcaaaaatttcctctatggagcgtgggcttcgagacctggaagaggaaattcagatgctgaaatcgaatggtgctttgagtactgaggaaagggaagaagaaatgaagcaaatggaagtgtatcggagccattctaaatttatgaaaaataaggtagaacaactgaaggaggaactaagttcgaaagaggctcaatgggaggagctgaaaaagaaagcggctggtcttcaggctgagattggccaggtgaaacaggagctgtccagaaaggacacagaactactcgccctgcagacaaagctagaaacactcacaaaccagttctcagatagtaaacagcacattgaagtgttgaaggagtccttgactgctaaggagcagagggctgccatcctgcagactgaggtggatgctctccgattgcgtttggaagagaaggaaaccatgttgaataaaaagacaaaacaaattcaggatatggctgaagagaaggggacacaagctggagagatacatgacctcaaggacatgttggatgtgaaggagcggaaggttaatgttcttcagaagaagattgaaaatcttcaagagcagcttagagacaaggaaaagcagatgagcagcttgaaagaacgggtcaaatccttgcaggctgacaccaccaacactgacactgccttgacaactttggaggaggcccttgcagagaaagagcggacaattgaacgcttaaaggagcagagggacagagatgagcgagagaagcaagaggaaattgataactacaaaaaagatcttaaagacttgaaggaaaaagtcagcctgttgcaaggcgacctttcagagaaagaggcttcacttttggatctgaaagagcatgcttcttctctggcatcctcaggactgaaaaaggactcacggcttaagacactagagattgctttggagcagaagaaggaggagtgtctgaaaatggaatcacaattgaaaaaggcacatgaggcagcattggaagccagagccagtccagagatgagtgaccgaatacagcacttggagagagagatcaccaggtacaaagatgaatctagcaaggcccaggcagaagttgatcgactcttagaaatcttgaaggaggtggaaaatgagaagaatgacaaagataagaagatagctgagttggaaaggcaagtgaaagaccagaataagaaggtagcaaatctgaagcacaaggaacaggtggaaaaaaagaagagtgcacaaatgttagaggaggcgcgacgacgggaggacaatctcaacgacagctctcagcagctacaggacagtctccgtaagaaggatgacaggattgaagagctggaagaagcactaagagaaagtgtacagataactgcagagcgggaaatggtgctagcacaagaggaatcagccaggaccaatgctgaaaaacaggtggaggagttactgatggccatggagaaggtaaagcaggaactagaatccatgaaagcaaagctgtcctccacccagcagtctctggcagaaaaggaaactcacttgactaatcttcgggcagagagaaggaaacacttagaggaagttctggagatgaagcaagaagctcttctggctgccattagtgaaaaagacgccaatatagctctcttggagctttcgtcctctaagaagaagacccaagaggaagtggctgccctgaagcgggagaaggatcgtctggtacagcagcttaagcagcagacgcaaaatcgaatgaagctaatggccgacaactacgaggatgaccacttcaaatcctcccattccaatcaaacaaatcacaagccctccccagaccagatcatccagcccctcttagaacttgaccaaaatagaagtaaattaaagttgtacattggacacctgacaaccctctgccatgaccgagaccccctgatcctccgtggactcactccaccagcttcctataacttggacgatgaccaggcggcttgggagaatgagctgcagaagatgacccgggggcagcttcaggatgagttagagaaaggtgaacgggacaatgcagaactgcaggagtttgccaacgccattcttcagcagatagcagaccattgtcccgacatcctagagcaagtggtcaacgccctggaagagtcctcttgaccctgctttatggggaagcctgaggtagtcaacccaggagccaagaaaagagaactacgaggaacaggtgcccggaaccttcttggcaccaaacactacaaacttcatcccaacttgctcacttgaagaagtgtgattccagcaccgtttctacatctgccatcttactctgcctttctgctttggatgtggtctctacactaaccttcttgatgtccagggtagataaagggtcgaatctctctgaagaactgccacctggtcatcagcagtggagaactgtgggagctggtggctctgccctgacagagagccatggagcagaggagcctctcacctcctgtcctctgacatgagaatgaaaccaggaatggacttggagttcaacaggctgagaggatgcctccaatggaccagagagctgagtgttctaatatcacaataggtgctttctcctaaaagggcaaaaaacaatctcaaaaagattagaaaaagagaaggggggaagggaagagaaaatcgactcttctttttactgtctcttctgcttactttccacatgagatgctttgtaccggggagctgtgagcaggcctcacgatggcttgggagcactcgttctcccaaggtctgagtcttcatccagccctgcctgtctgtcgcagccttcctcactctgttcctcggccagttaacaagaagatggtgtgaggtgttctccaccagtctctcctgtttgagactgttgacgttatcatactgaggtgttagatcaaatatctctaattgaagaacatgtgaggttgaaagagcaccagccagggcaacatagcgtgaccctgtctctacaaaaaattaaaaagagaacatacaaagttgacatatgagaccctgttgtccccgcctgcagctttgccccagtaacagatgcccgttgctcttgggctggtttcccctgaacacctccaagaggctgcctgccttgccagcacccgtgtcctgagctcctgcagcccagtggctgctgaagttgtgatccctcactcaccctgctagctttgcccttgactcgtcttctctgaacctcagcctcgtgcattgcctggaaccttcttctagcataaatgaaggtttttcctcctacacacattccttcctcggttatttcattcagagaatatttatgaaatgcctactgtgtgcaagtcatccatccttgaaaaggccacttctcagtgagggagagatgtagtggattctgtgagacatacctgctggagttgaagcagtaaatagcatgtccttcccctccccgatcttaaggtgtgttttctagaaaagttccctaatggaattcatgagtttgggggtctcagtcacccgcttgcctgtaggattccatttgatgattctggatttttgctgtttgttattgcccttagaggggctctgagtatctacttgtgggtggccatttcctgacatctgcatgtacctcgtggaattcagccagcttcatgttgcaaatcagaaagctgaccccaagactgcaaatcaatgaaggtattggcattgttaaggacgtagcgtagacaacagcagtcataaataattaggcaggaacttaacccaaatctagttctttgaccacctctaccaccagaacccagcagacactcacatctcctgataagagttgctggactcgatgtttttgttttgcattttctcctctccttccccacttactcagagaatttaaagtctgtagagtcagcacagccccatcagtccaggaacttcccaccaccagcccttgactgtcccattaactgacatggtcagatttccagctccccctactccctgctgtgaaacaatccctctccctgtgagaggaaactgtggagcgtttcttatcgaaggttaaatggactctgctcataaacctcttactgagatgcttcctgatagccaggctggccagagaggggtgcaggggttagatagtaagtggtggtcgtttgtggtcagttacctcaattctgttcattgcagtgcccgtaaaccatgtagaaagctcccagcactgaaaggcaggagtgttagcatctcgctttatccaccataacgtaaagaactgcggtgtgataacagccttcacggggccacggtggaaccaagacagcaggcgaggccatgcctaaacaagtggtctggcacgggcactggccagctgctctctccaagcaggtgg

SEQ ID NO: 1510 - DNA, 3359 bp, Homo sapiens
  source 1..3359: mol_type = genomic DNA
tgtttatactccggagggtgtccccgtgcgtcatcggtggagtggaccaaaactggtgatctgtttgccctgtgtgaccttgcccagaaccctgctgactgagagaacacatctgctggaagtcctctgggattcaaggtacagggaatgaagagtagttttacagaaaaaagaggacaatattgggatcacctttgacctttccatttggaaataatattttctattgtgttatagaaaggtgggaagctttcatccagaacaatgaatttcataaaggacaatagccgagcccttattcaaagaatgggaatgactgttataaagcaaatcacagatgacctatttgtatggaatgttctgaatcgcgaagaagtaaacatcatttgctgcgagaaggtggagcaggatgctgctagagggatcattcacatgattttgaaaaagggttcagagtcctgtaacctctttcttaaatcccttaaggagtggaactatcctctatttcaggacttgaatggacaaagtctttttcatcagacatcagaaggagacttggacgatttggctcaggatttaaaggacttgtaccataccccatcttttctgaacttttatccccttggtgaagatattgacattatttttaacttgaaaagcaccttcacagaacctgtcctgtggaggaaggaccaacaccatcaccgcgtggagcagctgaccctgaatggcctcctgcaggctcttcagagcccctgcatcattgaaggggaatctggcaaaggcaagtccactctgctgcagcgaattgccatgctctggggctccggaaagtgcaaggctctgaccaagttcaaattcgtcttcttcctccgtctcagcagggcccagggtggactttttgaaaccctctgtgatcaactcctggatatacctggcacaatcaggaagcagacattcatggccatgctgctgaagctgcggcagagggttcttttccttcttgatggctacaatgaattcaagccccagaactgcccagaaatcgaagccctgataaaggaaaaccaccgcttcaagaacatggtcatcgtcaccactaccactgagtgcctgaggcacatacggcagtttggtgccctgactgctgaggtgggggatatgacagaagacagcgcccaggctctcatccgagaagtgctgatcaaggagcttgctgaaggcttgttgctccaaattcagaaatccaggtgcttgaggaatctcatgaagacccctctctttgtggtcatcacttgtgcaatccagatgggtgaaagtgagttccactctcacacacaaacaacgctgttccataccttctatgatctgttgatacagaaaaacaaacacaaacataaaggtgtggctgcaagtgacttcattcggagcctggaccactgtggagacctagctctggagggtgtgttctcccacaagtttgatttcgaactgcaggatgtgtccagcgtgaatgaggatgtcctgctgacaactgggctcctctgtaaatatacagctcaaaggttcaagccaaagtataaattctttcacaagtcattccaggagtacacagcaggacgaagactcagcagtttattgacgtctcatgagccagaggaggtgaccaaggggaatggttacttgcagaaaatggtttccatttcggacattacatccacttatagcagcctgctccggtacacctgtgggtcatctgtggaagccaccagggctgttatgaagcacctcgcagcagtgtatcaacacggctgccttctcggactttccatcgccaagaggcctctctggagacaggaatctttgcaaagtgtgaaaaacaccactgagcaagaaattctgaaagccataaacatcaattcctttgtagagtgtggcatccatttatatcaagagagtacatccaaatcagccctgagccaagaatttgaagctttctttcaaggtaaaagcttatatatcaactcagggaacatccccgattacttatttgacttctttgaacatttgcccaattgtgcaagtgccctggacttcattaaactggacttttatgggggagctatggcttcatgggaaaaggctgcagaagacacaggtggaatccacatggaagaggccccagaaacctacattcccagcagggctgtatctttgttcttcaactggaagcaggaattcaggactctggaggtcacactccgggatttcagcaagttgaataagcaagatatcagatatctggggaaaatattcagctctgccacaagcctcaggctgcaaataaagagatgtgctggtgtggctggaagcctcagtttggtcctcagcacctgtaagaacatttattctctcatggtggaagccagtcccctcaccatagaagatgagaggcacatcacatctgtaacaaacctgaaaaccttgagtattcatgacctacagaatcaacggctgccgggtggtctgactgacagcttgggtaacttgaagaaccttacaaagctcataatggataacataaagatgaatgaagaagatgctataaaactagctgaaggcctgaaaaacctgaagaagatgtgtttatttcatttgacccacttgtctgacattggagagggaatggattacatagtcaagtctctgtcaagtgaaccctgtgaccttgaagaaattcaattagtctcctgctgcttgtctgcaaatgcagtgaaaatcctagctcagaatcttcacaatttggtcaaactgagcattcttgatttatcagaaaattacctggaaaaagatggaaatgaagctcttcatgaactgatcgacaggatgaacgtgctagaacagctcaccgcactgatgctgccctggggctgtgacgtgcaaggcagcctgagcagcctgttgaaacatttggaggaggtcccacaactcgtcaagcttgggttgaaaaactggagactcacagatacagagattagaattttaggtgcattttttggaaagaaccctctgaaaaacttccagcagttgaatttggcgggaaatcgtgtgagcagtgatggatggcttgccttcatgggtgtatttgagaatcttaagcaattagtgttttttgactttagtactaaagaatttctacctgatccagcattagtcagaaaacttagccaagtgttatccaagttaacttttctgcaagaagctaggcttgttgggtggcaatttgatgatgatgatctcagtgttattacaggtgcttttaaactagtaactgcttaaataaagtgtactcgaagcca

SEQ ID NO: 1511 - DNA, 3122 bp, Homo sapiens
  source 1..3122: mol_type = genomic DNA
agcaccgtctgggctgtggaagcggagggggtggggacactctggcccggttctcggtggtgcgggagcgggcgggagcagcggccgctctggtcggcggacgtgctgccgagtagtcccggaagcgaagcagcgatggcggagagtccgactgaggaggcggcaacggcgggcgccggggcggcgggccccggggcgagcagcgttgctggtgttgttggcgttagcggcagcggcggcgggttcgggccgcctttcctgccggatgtgtgggcggcggcggcggcagcgggcggggccgggggcccggggagcggcctggctccgctgcccgggctcccgccctcagccgctgcccacggggccgcgctgcttagccactgggaccccacgctcagctccgactgggacggcgagcgcaccgcgccgcagtgtctactccggatcaagcgggatatcatgtccatttataaggagcctcctccaggaatgttcgttgtacctgatactgttgacatgactaagattcatgcattgatcacaggcccatttgacactccttatgaagggggtttcttcctgttcgtgtttcggtgtccgcccgactatcccatccacccacctcgggtcaaactgatgacaacgggcaataacacagtgaggtttaaccccaacttctaccgcaatgggaaagtctgcttgagtattctaggtacatggactggacctgcctggagcccagcccagagcatctcctcagtgctcatctctatccagtccctgatgactgagaacccctatcacaatgagcccggctttgaacaggagagacatccaggagacagcaaaaactataatgaatgtatccggcacgagaccatcagagttgcagtctgtgacatgatggaaggaaagtgtccctgtcctgaacccctacgaggggtgatggagaagtcctttctggagtattacgacttctacgaggtggcctgcaaagatcgcctgcaccttcaaggccaaactatgcaggacccttttggagagaagcggggccactttgactaccagtccctcttgatgcgcctgggactgatacgtcagaaagtgctggagaggctccataatgagaatgcagaaatggactctgatagcagttcatctgggacagagacagaccttcatgggagcctgagggtttagaccctgctcccatctccccttcccccactcaagagtcccagcagaatcccttccccccaccccagggatggagaggcactgtgtatctccctccagactcgaagtcatcctgcaagatggcaagaaccaagcaagctccgatcccagggtgtgggagtgggggcctgttcccggtctgacctccttggcactggagcatctggggcttcgttcatccattcatcccgtatcaggggccaaggtacctttacaggagcacctagagcgagggcctttggcaaaaacaaaacaaccaacacacctctccacagggccagctccttagggataagtggaagatggaaattgcaattccaagagggagtgtgcccaaatgatttatggggatacctggaagggagcttggggtgggggctgtctgtgacacttaagcagtctgggtggttgtctatttgtctgtcttcagtcttgaagcagggcttcccaatgcccttttcctccctgccttccttcccccattatttcccacaggccagcataattttgtttttcctaatttatagtcactgttctagacagaccaaagagaaggaacagtggtggagtctaggctgctgatcagtaagctttacctagcacctgagcacctttctcccctcccctctttcctcacccttttctagatgtaagacagaaagtaaatgtgactgggacttaaccaaggtcttggtaaagcctgcatggcaccgtaagaagctgaaaatactgtttgttcccgcaatcactgatttgaaaagttcccaacacaggcagctgctgtgtatatgggattagagccactacatagaatagtctcttacagattttcataaatactagtcacaataagggtatttttcttgggggtggagtaagggggagactgatgctagtccttgttgtattttgttgggctgtccttgtgtattttcaccccagcctgtagtcctcctcacttcaaccccagggatttttggggagcaagggtagccaatggcagagggggttggggctgggactctggaggctcctccccttctttctcttccttccgcctcccccgtgcccccagctgctcttgtcactgtctctgatgggtatttgcctggctttgttgcttctctatctgtatttagctgcagtgatcctttagctggttggctcagaaaaaaaaaaatgtgctttaggtgccctgtaatcctgggcatcaagggaatccatccttcccctttttgatatgttctccccgtacttccagatttattgttatggctcccagtgggtattggcgattcttgtgatgcagggcctcagtcagtgtccagccatgcataagggagaggatagtgtgtacctgccctgccctctgctatgaaggtctctgccttgtggatcatgggactccccttggaggatctgtgcaaaggggggctgggcacaaaggagaatgtcctatttgggagggcaggaagcaaaggaactggacagggattggtgggcttggggaacggaagtttatcttggatacccttgaagaggctgggtctcttcacatgaagatcgaaaagggaccctgcttccaatttccctcttccattcctcgagctactccagggcttagaagaatgctcttggtctgtgggtccagtgttgtctgtcatccatttaagtgttcccactttcaagtgacaatcctctccttggccctgccatagggcagagcatgtctggcatagcagcctgacttttatgccctaatcttgagttgaggaaatatatgcacaggagtcaaagagatgtctttatatctgactgtatataaatgaagtttttttgttttttttgttttcctttttggtgcaataaagtttgttttggcagaa

SEQ ID NO: 1512 - DNA, 3120 bp, Homo sapiens
  source 1..3120: mol_type = genomic DNA
ccaagccggagcccgagctggaggaagcccccaggtgccaggatctgcccggatccgcgcccgctccggccggcaccatggacagcgaggcattccagagcgcgcgggactttctggacatgaacttccagtcgctggccatgaaacacatggatctgaagcagatggagctggacacggcggcggccaaggtggatgaactgaccaagcagctggagtcgctgtggtcagactctcccgcgcctcctggcccgcaggccggacccccttctaggccgccccggtacagctccagctcgatccctgagcccttcggcagccgagggtccccccggaaggcggccaccgacggcgcagacaccccgttcggacgatcagagagtgccccaaccctacacccctacagcccgctgtcccccaagggacggccgtcgtcgccgcgcaccccgctctacctgcagccggacgcctacggcagcctggaccgcgcgacctcgccccggccccgcgccttcgatggcgcaggcagctccctcggccgtgcgccctccccgcggcccgggccaggcccgctccgccagcagggtccccccacgcctttcgacttcctgggccgcgcaggctccccccgcggcagccccctggcggaggggccccaggccttcttccccgagcgtgggccgtcaccgcgcccccctgccacagcctacgacgcgccagcgtccgccttcgggagctccctgctaggctccggcggcagcgcattcgccccgcctctgcgcgcgcaagacgacctgacgctgcgccggcggcctccgaaagcctggaacgagtctgacctggacgtggcgtacgagaagaagccttcgcagacagcgagctatgaacgcctggacgtcttcgcaaggcctgcctcgccgagcctgcagctgttgccttggagggagagcagcctggatggactggggggcaccggcaaggacaacctcactagcgccaccctgccgcgcaattacaaggtctctcctctggccagcgaccggcgttcagacgcgggcagctaccggcgctcgctgggctccgcggggccgtcgggcactttgcctcgcagctggcagcccgtcagccgcatccccatgcccccctccagcccccagccccgcggggccccgcgccagcgtcccatccccctcagcatgatcttcaagctgcagaacgccttctgggagcacggggccagccgcgccatgctccctgggtcccccctcttcacccgagcacccccgcctaagctgcagccccaaccacaaccacagccccagccacaatcacaaccacagccccagctgcccccacagccccagacccaaccccaaacccctaccccagccccccagcatccccaacagacatggccccctgtgaacgaaggaccccccaaaccccccaccgagctggagcctgagccggagatagaggggctgctgacaccagtgctggaggctggcgatgtggatgaaggccctgtagcaaggcctctcagccccacgaggctgcagccagcactgccaccggaggcacagtcggtgcccgagctggaggaggtggcacgggtgttggcggaaattccccggcccctcaaacgcaggggctccatggagcaggcccctgctgtggccctgccccctacccacaagaaacagtaccagcagatcatcagccgcctcttccatcgtcatggggggccagggcccggggggccggagccagagctgtcccccatcactgagggatctgaggccagggcagggccccctgctcctgccccaccagctcccattccacccccggccccgtcccagagcagcccaccagagcagccgcagagcatggagatgcgctctgtgctgcggaaggcgggctccccgcgcaaggcccgccgcgcgcgcctcaaccctctggtgctcctcctggacgcggcgctgaccggggagctggaggtggtgcagcaggcggtgaaggagatgaacgacccgagccagcccaacgaggagggcatcactgccttgcacaacgccatctgcggcgccaactactctatcgtggatttcctcatcaccgcgggtgccaatgtcaactcccccgacagccacggctggacacccttgcactgcgcggcgtcgtgcaacgacacagtcatctgcatggcgctggtgcagcacggcgctgcaatcttcgccaccacgctcagcgacggcgccaccgccttcgagaagtgcgacccttaccgcgagggttatgctgactgcgccacctacctggcagacgtcgagcagagtatggggctgatgaacagcggggcagtgtacgctctctgggactacagcgccgagttcggggacgagctgtccttccgcgagggcgagtcggtcaccgtgctgcggagggacgggccggaggagaccgactggtggtgggccgcgctgcacggccaggagggctacgtgccgcggaactacttcgggctgttccccagggtgaagcctcaaaggagtaaagtctagcaggatagaaggaggtttctgaggctgacagaaacaagcattcctgccttccctccagacctctccctctgttttttgctgcctttatctgcacccctcaccctgctggtggtggtccttgccaccggttctctgttctcctggaagtccagggaagaaggagggccccagccttaaatttagtaatctgccttagccttgggaggtctgggaagggctggaaatcactggggacaggaaaccacttccttttgccaaatcagatcccgtccaaagtgcctcccatgcctaccaccatcatcacatcccccagcaagccagccacctgcccagccgggcctgggatgggccaccacaccactggatattcctgggagtcactgctgacaccatctctcccagcagtcttggggtctgggtgggaaacattggtctctaccaggatccctgccccacctctccccaattaagtgccttcacacagcactggtttaatgtttataaacaaaatagagaaactttccttataaataaaagtagtttgcacagaaattga

SEQ ID NO: 1513 - DNA, 2072 bp, Homo sapiens
  source 1..2072: mol_type = genomic DNA
ggtagacgcgatctgttggctactactggcttctcctggctgttaaaagcagatggtggttgaggttgattccatgccggctgcctcttctgtgaagaagccatttggtctcaggagcaagatgggcaagtggtgctgccgttgcttcccctgctgcagggagagcggcaagagcaacgtgggcacttctggagaccacgacgactctgctatgaagacactcaggagcaagatgggcaagtggtgccgccactgcttcccctgctgcagggggagtggcaagagcaacgtgggcgcttctggagaccacgacgactctgctatgaagacactcaggaacaagatgggcaagtggtgctgccactgcttcccctgctgcagggggagcagcaagagcaaggtgggcgcttggggagactacgatgacagtgccttcatggagcccaggtaccacgtccgtggagaagatctggacaagctccacagagctgcctggtggggtaaagtccccagaaaggatctcatcgtcatgctcagggacactgacgtgaacaagcaggacaagcaaaagaggactgctctacatctggcctctgccaatgggaattcagaagtagtaaaactcctgctggacagacgatgtcaacttaatgtccttgacaacaaaaagaggacagctctgataaaggccgtacaatgccaggaagatgaatgtgcgttaatgttgctggaacatggcactgatccaaatattccagatgagtatggaaataccactctgcactacgctatctataatgaagataaattaatggccaaagcactgctcttatatggtgctgatatcgaatcaaaaaacaagcatggcctcacaccactgttacttggtgtacatgagcaaaaacagcaagtcgtgaaatttttaattaagaaaaaagcgaatttaaatgcactggatagatatggaagaactgctctcatacttgctgtatgttgtggatcagcaagtatagtcagccttctacttgagcaaaatattgatgtatcttctcaagatctatctggacagacggccagagagtatgctgtttctagtcatcatcatgtaatttgccagttactttctgactacaaagaaaaacagatgctaaaaatctcttctgaaaacagcaatccaggttgaagaagaaatgaagaagcatgaaagtaataatgtgggattactagaaaacctgactaatggtgtcactgctggcaatggtgataatggattaattcctcaaaggaagagcagaacacctgaaaatcagcaatttcctgacaacgaaagtgaagagtatcacagaatttgtgaattactttctgactacaaagaaaagcagatgccaaaatactcttctgaaaacagcaacccagaacaagacttaaagctgacatcagaggaagagtcacaaaggcttaaaggcagtgaaaatggccagccagagaaaagatctcaagaaccagaaataaataaggatggtgatagagagctagaaaattttatggctatcgaagaaatgaagaagcacagaagtactcatgtcggattcccagaaaacctgactaatggtgccactgctggcaatggtgatgatggattaattcctccaaggaagagcagaacacctgaaagccagcaatttcctgacactgagaatgaagagtatcacagtgacgaacaaaatgatactcagaagcaattttgtgaagaacagaacactggaatattacacgatgagattctgattcatgaagaaaagcagatagaagtggttgaaaaaatgaattctgagctttctcttagttgtaagaaagaaaaagacatcttgcatgaaaatagtacgttgcgggaagaaattgccatgctaagactggagctagacacaatgaaacatcagagccagctaagagaaaagaaatatttggaggatattgaaagtgtgaaaaaaaggaatgataatcttttaaaggctctacaattgaatgagctcaccatggatgatgataccgctgtgctcgtcattgacaac

SEQ ID NO: 1514 - DNA, 1698 bp, Homo sapiens
  source 1..1698: mol_type = genomic DNA
atgcctgcatccttcccgatgctgcgctgtgcgcgttcaccttgctggacagtgtgctggtcaccctggtgcagggccctgcccgatggaagatgcagctgtttgagcagccctccctccccactcggccccacccgagaccctgtggccacttttctggaaacttgtcgggagcctggcagccagccagcaggacccgcctccctgcgggccgagtacctgcccccatctgtggcttccatcaaggtgtcggcggagctgctcagagctgccttgaaggacggccactcaggcgtgcccctgtgctgtgccaccctgcagtggctccttgctgagaatgctgctgtggacgtcgtgagggcccgagcactatcttccatccagggagtggcccctgatggcgccaacgttcacctcatcgtccgagaggtggccatgactgacctgtgcccagcagggcccatccaggccgtggagattcaagtggaaagctcctctctggccgacatttgcagggcgcaccatgccgttgtcgggcgcatgcagacgatggtgacagagcaggccacccagggctccagcgctcctgatctccgtgtgcagtacctccgccagatccacgccaaccacgagacactgctgcgggaggtgcagaccctgcgcgaccggctctgcacggaggatgaggccagctcctgtgccaccgcccagaggctgctacaggtgtaccggcagctgcgccaccccagcctcatcctgctgtgaccaggcgggcctgcccctgggctctggccacgcttccagcctctgtcacagcccccccaggcctcatgggttagagggaaaccgagctggcctggccagagccgtcagggaaggtaggacctggccacgtaggagcagaacgctcatgaaagtgcttggaggccgtggagcacaaagcagattctgattgggagcaaccgaggcgggctctgaacctggccggtccagcttcgcgtcctctgctggtgtctctccttctctgaccgcggccgcagcccctgcactcgccttcctcactgctgggcagccttcccaccaccgcagcagcccctgaggccaggaggcagtgcagggcattctggacccggagggccagagaaacaggatttctggggtttggacttggggtgagtttgtaactgttgctgccacaccaccaggagcaccggctgcccctctgggtggcactaccaggtgccccacggtacccttgtcacactgttcacacctgcccggctgcccactctgggaccccgaggtaggagggtgctccctgagaccaaagcacaaaacagcatgcagggagctcctgcaagtgcccgtggtctcgtgccacaccaaggaagggccagcgggtggcctgtggccggaatgctcaacaactaggtgcctccagccggggcagtacccagcactgtgcactattttcagggccactcagggtggcgctgtggcccgggggggggccctgagccccagcccccagcctcctccctcagcctgggctacggcccacctcctggtgctggtgttttcatctggggagggtgctcgcgccgctcccgctgcaggcactgtccgcgatgagtgcgggtaggagccgtgaggtgcttctctgctgtgacaaacgaccctgtctgtccgtgaaccttc

SEQ ID NO: 1515 - DNA, 3141 bp, Homo sapiens
  source 1..3141: mol_type = genomic DNA
tggcggagcccgggaggcggagaaggctgtcgttgccttggccgtcgcatccccgagggagtcgtgtcggcgccaccccggcccccgagcccgcagattgcccaccgaagctcgtgtgtgcacccccgatcccgccagccactcgcccctggcctcgcgggccgtgtctccggcatcatgtgtggtatatttgcttacttaaactaccatgttcctcgaacgagacgagaaatcctggagaccctaatcaaaggccttcagagactggagtacagaggatatgattctgctggtgtgggatttgatggaggcaatgataaagattgggaagccaatgcctgcaaaatccagcttattaagaagaaaggaaaagttaaggcactggatgaagaagttcacaagcaacaagatatggatttggatatagaatttgatgtacaccttggaatagctcatacccgttgggcaacacatggagaacccagtcctgtcaatagccacccccagcgctctgataaaaataatgaatttatcgttattcacaatggaatcatcaccaactacaaagacttgaaaaagtttttggaaagcaaaggctatgacttcgaatctgaaacagacacagagacaattgccaagctcgttaagtatatgtatgacaatcgggaaagtcaagataccagctttactaccttggtggagagagttatccaacaattggaaggtgcttttgcacttgtgtttaaaagtgttcattttcccgggcaagcagttggcacaaggcgaggtagccctctgttgattggtgtacggagtgaacataaactttctactgatcacattcctatactctacagaacaggcaaagacaagaaaggaagctgcaatctctctcgtgtggacagcacaacctgccttttcccggtggaagaaaaagcagtggagtattactttgcttctgatgcaagtgctgtcatagaacacaccaatcgcgtcatctttctggaagatgatgatgttgcagcagtagtggatggacgtctttctatccatcgaattaaacgaactgcaggagatcaccccggacgagctgtgcaaacactccagatggaactccagcagatcatgaagggcaacttcagttcatttatgcagaaggaaatatttgagcagccagagtctgtcgtgaacacaatgagaggaagagtcaactttgatgactatactgtgaatttgggtggtttgaaggatcacataaaggagatccagagatgccggcgtttgattcttattgcttgtggaacaagttaccatgctggtgtagcaacacgtcaagttcttgaggagctgactgagttgcctgtgatggtggaactagcaagtgacttcctggacagaaacacaccagtctttcgagatgatgtttgctttttccttagtcaatcaggtgagacagcagatactttgatgggtcttcgttactgtaaggagagaggagctttaactgtggggatcacaaacacagttggcagttccatatcacgggagacagattgtggagttcatattaatgctggtcctgagattggtgtggccagtacaaaggcttataccagccagtttgtatcccttgtgatgtttgcccttatgatgtgtgatgatcggatctccatgcaagaaagacgcaaagagatcatgcttggattgaaacggctgcctgatttgattaaggaagtactgagcatggatgacgaaattcagaaactagcaacagaactttatcatcagaagtcagttctgataatgggacgaggctatcattatgctacttgtcttgaaggggcactgaaaatcaaagaaattacttatatgcactctgaaggcatccttgctggtgaattgaaacatggccctctggctttggtggataaattgatgcctgtgatcatgatcatcatgagagatcacacttatgccaagtgtcagaatgctcttcagcaagtggttgctcggcaggggcggcctgtggtaatttgtgataaggaggatactgagaccattaagaacacaaaaagaacgatcaaggtgccccactcagtggactgcttgcagggcattctcagcgtgatccctttacagttgctggctttccaccttgctgtgctgagaggctatgatgttgatttcccacggaatcttgccaaatctgtgactgtagagtgaggaatatctatacaaaatgtacgaaactgtatgattaagcaacacaagacaccttttgtatttaaaaccttgatttaaaatatcaccccttgaagcctttttttagtaaatccttatttatatatcagttataattattccactcaatatgtgatttttgtgaagttacctcttacattttcccagtaatttgtggaggactttgaataatggaatctatattggaatctgtatcagaaagattctagctattattttctttaaagaatgctgggtgttgcatttctggaccctccacttcaatctgagaagacaatatgtttctaaaaattggtacttgtttcaccatacttcattcagaccagtgaaagagtagtgcatttaattggagtatctaaagccagtggcagtgtatgctcatacttggacagttagggaagggtttgccaagttttaagagaagatgtgatttattttgaaatttgtttctgttttgtttttaaatcaaactgtaaaacttaaaactgaaaaattttattggtaggatttatatctaagtttggttagccttagtttctcagacttgttgtctattatctgtaggtggaagaaatttaggaagcgaaatattacagtagtgcattggtgggtctcaatccttaacatatttgcacaattttatagcacaaactttaaattcaagctgctttggacaactgacaatatgattttaaatttgaagatgggatgtgtacatgttgggtatcctactactttgtgttttcatctcctaaaagtggtttttatttccttgtatctgtagtcttttattttttaaatgactgctgaatgacatattttatcttgttctttaaaatcacaacacagagctgctattaaattaatattgatatattc

SEQ ID NO: 1516 - DNA, 2701 bp, Homo sapiens
  source 1..2701: mol_type = genomic DNA
gctttggcggcggttggtggccgtgcgggcggggagggagggggaggagagaagaggaggtggagaaggcttgggctcgcgccgctgaagtcggcttacccgctggccgcctcctgacaagcgggagggatccgcggtggacccagggaagcggaggagcctggcggccaccccctcttcctcacttccctgtactctcatcgctctcggcctccgacacgaaaaggaagcaaatgagctgatggaagatctgtttgaaactttccaagatgagatgggattctccaacatggaagatgatggcccagaagaggaggagcgtgtggctgagcctcaagctaactttaacacccctcaagctctacggtttgaggaactactggccaacctactaaatgaacaacatcagatagcgaaggaactatttgaacagctgaagatgaagaaaccttcagccaaacagcagaaggaggtagagaaggttaaaccccagtgtaaggaagttcatcagaccctgattctggacccagcacaaaggaagagactccagcagcagatgcagcagcatgttcagctcttgacacaaatccaccttcttgccacctgcaaccccaatctcaatccggaggccagtagcaccaggatatgtcttagctgggaacctttgctcaaagctccatcgcccttcaccatcagtacaaccccaagtttcagaccctgttccaaccctgtaacttgatgggagctatgcagctgattgaagacttcagcacacatgtcagcattgactgcagccctcataaaactgtcaagaagactgccaatgaatttccctgtttgccaaagcaagtggcttggatcctggccacaagcaaggttttcatgtatccagagttacttccagtgtgttccctgaaggcaaagaatccccaggataagatcctcttcaccaaggctgaggacaatttgttagctttaggactgaagcattttgaagggactgagtttcttaaccctctaatcagcaagtaccttctaacctgcaagactgcccgccaactgacagtgagaatcaagaacctcaacatgaacagagctcctgacaacatcattaaattttataagaagaccaaacagctgccagtcctaggaaaatgctgtgaagagatccagccacatcagtggaagccacctatagagagagaagaacaccggctcccattctggttaaaggccagtctgccatccatccaggaagaactgcggcacatggctgatggtgctagagaggtaggaaatatgactggaaccactgagatcaactcagatcaaggcctagaaaaagacaactcagagttggggagtgaaactcggtacccactgctattgcctaagggtgtagtcctgaaactgaagccagttgccgaccgtttccccaagaaggcttggagacagaagcgttcatcagtcctgaaacccctccttatccaacccagcccctctctccagcccagcttcaaccctgggaaaacaccagcccaatcaactcattcagaagcccctccgagcaaaatggtgctccggattcctcacccaatacagccagccactgttttacagacagttccaggtgtccctccactgggggtcagtggaggtgagagttttgagtctcctgcagcactgcctgctatgccccctgaggccaggacaagcttccctctgtctgagtcccagactttgctctcttctgcccctgtgcccaaggtaatgatgccctcccctgcctcttccatgtttcgaaagccatatgtgagacggagaccctcaaaaagaaggggagccagggcctttcgctgtatcaaacctgcccctgttatccaccctgcatctgttatcttcactgttcctgctaccactgtgaagattgtgagccttggcggtggctgtaacatgatccagcctgtcaatgcggctgtggcccagagtccccagactattcccatcgccaccctcttggttaaccctacttccttcccctgtccattgaaccagccccttgtggcctcctctgtctcacccttaattgtttctggcaattctgtgaatcttcctataccatccacccctgaagataaggcccacatgaatgtggacattgcttgtgctgtggctgatggggaaaatgcctttcagggcctagaacccaaattagagccccaggaactatctcctctctctgctactgttttccccaaagtggaacatagcccagggcctccaccagtcgataaacagtgccaagaaggattgtcagagaacagtgcctatcgctggaccgttgtgaaaacagaggagggaaggcaagctctggagccgctccctcagggcatccaggagtctctaaacaactcttcccctggggatttagaggaagttgtcaagatggaacctgaagatgctacagaggaaatcagtggatttctttgagctaggagaataagagtctggagactgggagccttcacttcggcctccgattggtggcgcatagggtgtaaccaataggaaacccctaaagggtacttaaaccccagattttgcaactggggctcttgagcagcttgctttagcctgctcccactctgtggaatatacttttgcttcaataaatctgtgcttttattgcttcattgtttca

SEQ ID NO: 1517 - DNA, 1636 bp, Homo sapiens
  source 1..1636: mol_type = genomic DNA
gctggatggggcccggcctcttcccagcgttcctcctccggccccaggtcaccgccagcacgcgcctgcttcccgtctgcgcgagtccacgcagctccccaggcccttcaccagcacagcagcagcaggcatggcagcaagcgtggagcagcgcgagggcaccatccaggtgcagggccaggccctcttcttccgagaggccctgcccggcagtgggcaggctcgcttctctgtactgctgctgcatggtattcgcttctcctccgagacctggcagaacctgggtacactgcacaggctggcccaggctggctaccgggctgtggccattgacctgccaggtctggggcactccaaggaagcagcagcccctgcccctattggggagctggcccctggcagcttcctggcggctgtggtggatgccttggagctgggccccccggttgtgatcagtccatcactgagtggcatgtactccctgcccttcctcacggcccctggctcccagctcccgggctttgtgccagtggcccccatctgcactgacaaaatcaatgctgccaactatgccagtgtgaagactccagctctgattgtatatggagaccaggaccccatgggtcagaccagctttgagcacctgaagcagctgcccaaccaccgggtgctgatcatgaagggggcggggcacccctgttacctggacaaaccagaggagtggcatacagggctgctggacttcctgcaggggctccagtgaagcccagcactgctgcagggggtgggctgcctgcctgctctgagctctctcttgcacgctctctcttctctcccaggctctggctcatgcacatgcaacaggtgcgtctgtctatatgtctgggttcttgtcttttgtggtctgtttgtcttttctacctctttctcttgcagtgatagactgagggggtaaaatcaagagaaaaaactctcaggaatcaaggaacataatcctgtggagggtaatccattacatgagcttctcctgttcttccactttcctgcctggctttcactccttcccctgctctgcccagcctttccctcccacccactcctccttctgcaaatgccctgaaggccagcccttaccccaacacccacttccccacctccttaggccccagatacatacatgcccacatgcacgcttacatgtttagagccatccttgtttccaaatatgacccttcgcttgagggcaactgcataggtacatctaactctggactggcatgcacattgtcatgtgcagctttgcatatacacacatgcatacatgagcctccacacaagcacttgcacacatgtggactcctaaccatgctaacctcactggctgggaaggtggggaccccatgggccagcccttgcaggaggcccttttgcaaggcttagggtgtggccagccctgaaagctacttggacacaggtttcagctggccccagcccagaagtgacccccagaaagggagggccaccgctttgccccctgcttttacccttccttctgggtgctctacacctcaggttaccaggcctgaggcatctcagccaagcttgtttcctgctctgaggcttgtggggtgggagc

SEQ ID NO: 1518 - DNA, 3838 bp, Homo sapiens
  source 1..3838: mol_type = genomic DNA
agccgttcccacgtgagaggctccgcggccgaattcctcgcgtgcagcaggcgcggaccgcccggcgtccggccggactgagagccctggtccggcgcgcgccgccggccgggcgggaggcgggggcgggctcggctgcgccccgatgcggcggcgacctccgggtctgtgagcccggcgcgcgccgtcggagcccctcgcgcagccgctggtagcgtccccccgggcacccggcatgcgggcggccgactcgggctcgtgggagcgcgtccgccagctcgcggcgcagggcgagccggcgccttcctgcggggcgggggccgggcccgcgcggcccccgggacccgcagcctgcgagcagtgcgtggacgcggcggggcccggcgatcggccccgcgccggggttccccgggtccgagcggatggcgactgcagccagcccgtgctcctgcgggaagaagtgtcgcggctccaggaggaagttcaccttctccggcagatgaaggagatgttggcgaaggacctggaggagtcgcagggcggcaagtcctctgaggtcctctcggccaccgagctcagggtccagctggcccagaaggagcaggagctagccagagccaaagaagccttgcaggccatgaaagctgatcggaagcgcttaaagggcgagaagacagacctggtgagccagatgcagcagctgtatgccacactggagagccgcgaggagcagctccgagacttcatccgcaactatgagcagcaccgcaaggagagcgaggatgcggtcaaagcgctggccaaggagaaggacctgctggagcgtgagaagtgggagctgcggcgccaagccaaggaggccacagaccacgccacggcactgcgctcccagctggacctcaaggacaaccggatgaaggagctggaggccgagctggccatggccaaacagtccttagctacgctgaccaaggacgtccccaagcggcattccctcgccatgccgggcgagacggtgctcaatggcaaccaggagtgggtggtgcaggcggacctcccgctgaccgcagccatccggcagagtcaacagactctctaccactcacacccccctcaccctgcggaccggcaagcggtcagggtgagcccctgccactcccggcagccctctgtcatctccgacgcatctgccgccgaaggcgaccggtcgtccacaccgagcgacatcaactcccctcgacaccggacacactccctctgcaacggcgacagtcccggcccagttcagaagaacctgcacaaccctattgtacagtcactagaggatcttgaagaccaaaaacggaaaaagaagaaagagaagatgggattcggctccatctcccgcgtcttcgccagagggaagcagcggaagtccctcgaccccggcctctttgatggtaccgcccctgattattacatagaggaggacgcggactggtgatacgcgctcccctgcgcctgctgcccgcaggcgtgtctgtgcgtgtgggcgtgtgtgcaagcgagcgtgggtgcgcgtgtggccgtgcgtggggtgcgtgtgcacgtgtgcgctggcacacatgggtgctgggtgtggccgagcgcctctaacaagtgaaaacacgagtgtgaacctctctcccctgcgtcgccacctctgtaattgatgtacataccgcaaaccgtgtgtgaacctgtcaactctctgtcgtctttggagcgatacagttgtgttgttaatctggtttattatttttcttcagtgtttggtttttctttttctttttgtttggttcgtcggtttgtttttgtttttgtttttttccccctttctcctcccctcctcctttttatgaaacttgaaaacttgaaggactgctgtgtatttgtaaataacaaaactattgtgcactctgtgcttgtaaatgtccctcgtccaaaccgctactcctggagcccgtctggcagaggatgtggtctgtttttgatgtcccccctcccgcccccctggtgtgaacgtgtgggaccagaccctgtcctgggggtgcgcccaagtcactttaaccacaaaacgccatcgtcgtcagggtaagctctgctctctacaaagactcgcgagccgggccaaggggccttgtcttggctgggtttgtcagaggtcaaaccggctcttttaaacggcctaccagtttttaaattgcattgccgtttctttctttatgaaaaaaaagaaaaaaagaaaattgtttcatttaatttatttgcacaaatgctgaaaacttattctatctaaattattacataaatattggaatgtctatttttccatggggtgggcgggaggtgggtgtctctgttgacttgtctgttctgttaccatgctgctacccaactgtgcaaagtagtttagggtggccagaacccagggaccattggatttcaaagcttgctttttctgttggttcttctctctccttctctctctgtctctcccattctcctgcccatgcatgaaaggatcctccaccttcttcccacccagagctccctccaggcctttctctatatatttatttatctgacatacagaacacgactttagtgagcagagtgctgacagtcatggtccccttctttgggtctgtcttttgagagaggttgagttcagggcaagacagcctgccacacatccaagggtacgaccagtgggaccctggcctgagtctgttctccgaggggcctccagcagcttctgttcctccctgcagctgtgtctttcttgtcctgggtttaggatgcaggtgggccaggcaggtgttgttaggggaggcacccacttcaaaaggagggccacagtggggacacagagtccagcacctgagccctccaccctccccattctggttggttccatcagccacacttagaatctcccaggatcccttggactccgtcccccaacttgtcacagcagcctgagcctacccaccccaggagacaagagctggcaggaacatctgcctatatggggggtggcgttggccccaaagaggcttcaccagcaaaggaactgtgtgtattttaatgccaggggacggaggatgtgtgagctgttcagcaaggtctgcccaaggcctaaaactcaatttccttattcttttgcttctgctcgtccttaacaactaacagctcaacccacacctctagacaacagtagtcgtgctttctgctaacggtgacattttcagctcttaaaaagaagcaaggagattttcaaatgctagagtatctctatcagaaggcataggacattgtgtccaaagtctcaagaacaaacaacactttccttctgacctggtccaaaagtcagcaaacagcaagcaggcagaggccctcataaggacttttctgtcctcctttgaccaaactgtttaaccgagcctaggggtgacggggagcgacccaagctggcatctttctctacggagacagattttagaaaatacttttcttgcccatgaatttcttttctggttgatttttatcattttccctttacttacaagaaaataagattgcaaccactcctgctaatgatttagtagttccttttcatttcagtttttgtaaattaggagataattctaagagttactaaaggatgatttatttaagagaactacgtcaaatagcgaatgagttatgggtaacattagacgaaaataacctttcccgtgggaaaggtttctcgaaggcatggatgcaaatataaaatattaaaaaaaatctaaataaagcttattttaaaatatga

SEQ ID NO: 1519 - DNA, 807 bp, Homo sapiens
  source 1..807: mol_type = genomic DNA
ggaaggcagctgaactcggcgcctggaaagatggaggcagcggagacagaggcggaagctgcagccctagaggtcctggctgaggtggcaggcatcttggaacctgtaggcctgcaggaggaggcagaactgccagccaagatcctggttgagtttgtggtggactctcagaagaaagacaagctgctctgcagccagcttcaggtagcggatttcctgcagaacatcctggctcaggaggacactgctaagggtctcgaccccttggcttctgaagacacgagccgacagaaggcaattgcagctaaggaacaatggaaagagctgaaggccacctacagggagcacgtagaggccatcaaaattggcctcaccaaggccctgactcagatggaggaagcccagaggaaacggacacaactccgggaagcctttgagcagctccaggccaagaaacaaatggccatggagaaacgcagagcagtccagaaccagtggcagctacaacaggagaagcatctgcagcatctggcggaggtttctgcagagggtaagctgttgttccctgaggctgaggctgaggcagagaatcttccagatgataaaccccagcagccgactcgaccccaggagcagagtacaggagacaccatggggagagaccctggtgtgtccttcaaggctgttggtctacaacctgctggagatgtaaatttgccatgacttcctggaggacagcagcatggagaaagatcctagaaaaggcctctgacttccctcacctcccaaccatcattacaggaaaga

SEQ ID NO: 1520 - DNA, 7011 bp, Homo sapiens
  source 1..7011: mol_type = genomic DNA
tgttaggaaagaaaaaaaaattcctgatgtctggtccaagcaggaattccccggtggattggggaatgtctggcttttcctcagcttattgatctctgtggtaaccactggaggcccccagaagacccatagaaatgagaggcctgaggtctacaagtcgctgctagaaatattttagcctctccaaagcccagaatgcagccccgacccaagtttgtaagggttctgggtgcacgctgaccctgcgcgggcagacgcgccctttgctccaggtccggacctgggcgctgctatagcaacgtcctggacgcccagaccttaggccgccgccgccgcggaagcgaggaacccggccttctcccgctcctgagggctgtggcggcggcggcccgggaggcggcccaggctgggtaaagaccgcccggctcctcctatgcaagctgaggcagcggattggttttcaagcatgcccttccagaagcatgtctactacccgctcgccagcggcccagaggggcccgacgtcgctgtggccgccgccgccgcgggtgcggcctccatggcctgtgcgccccccagcgcggcttcggggcccctgcccttcttccagttcaggccgcggctggagagtgtggactggcggcggctgagcgccatcgacgtggacaaggtggcgggggctgtggacgtgctgacgctgcaggagaacatcatgaacatcaccttctgcaagctggaagacgagaagtgcccacactgccagtcgggggtggacccggtgctgctgaagctcatccgtctggcgcagttcaccatcgagtacttgctgcactcacaagagttcctcacctcgcagctgcacaccctggaggagcggctgcgcctgagccactgcgacggcgagcagagcaagaagctgctcaccaagcaggcgggggagatcaagacgctcaaggaagagtgcaaacgccggaagaagatgatctccacccagcagctgatgatcgaggccaaagccaactattaccagtgccatttttgtgacaaggcctttatgaaccaagcttttctacaaagtcacattcaacgccgccacactgaagaaaattctcattttgagtatcagaaaaatgcacagattgagaagctccggagtgagatcgtcgtattgaaggaagagctgcagctcaccaggtctgagctagaggctgcacaccatgccagtgcagtcagattctccaaggaatatgaaatgcagaaaacaaaagaggaagactttttgaagttatttgacaggtggaaagaagaagaaaaggagaaactagttgatgaaatggaaaaagtcaaggagatgtttatgaaggaatttaaagaattaacttcgaagaattcagcattagaatatcaactgtcagaaatccagaagtccaatatgcagatcaagtccaacataggcacattaaaagatgcacacgagtttaaagaagaccgttctccatatccccaggatttccataatgtcatgcagcttcttgatagtcaggaaagcaaatggacagctcgagttcaagctattcatcaagaacacaagaaagagaagggtcggctcctgtcacatatagagaaacttcgaacctcaatgatagatgatctaaatgcaagcaatgttttctataagaaaaggatagaagagctagggcagagactccaggagcagaatgagctgattataactcagagacagcagattaaagactttacctgtaatccattaaacagtatcagtgaacccaaagtgaatgccccagccctgcacactttggaaactaaatcaagtctgccaatggtgcatgaacaggcattctcgtcgcacatactggaaccaatagaagaactttcagaggaagaaaaaggaagggaaaatgaacagaaattaaataacaacaaaatgcatttaaggaaagctttgaagagtaactcctccctcactaagggactaagaacaatggtggagcagaacttgatggagaaactggaaaccttggggattaatgcagatatacgtggcatttcaagtgatcagttgcatagagtactaaaaagtgtggaatcagaaagacataagcaagaaagagaaatacctaactttcatcaaattcgagaattccttgaacatcaagtcagctgtaaaattgaggagaaagcactactctcttcagatcagtgcagtgtttctcaaatggataccctttcaactggagaagtacccaaaatgatacaacttccttccaaaaacagacaactgattagacaaaaagctgtttctactgataggacatctgttccaaaaattaagaaaaatgtcatggaagatccttttcccagaaagtcttcaactattacgacccctccttttagttcagaggaggagcaggaggacgacgacctcatccgggcatacgcatccccaggcccacttcctgtgccgccaccacaaaacaagggcagcttcgggaagaacacagtgaaaagtgacgcggacgggaccgagggaagcgaaatcgaggacactgatgattctcccaagcccgcaggagtcgccgttaaaacacctactgaaaaagttgaaaagatgtttccacatcgcaaaaatgtgaacaaaccagtcggtggaactaatgtccctgagatgtttatcaaaaaagaagaattacaagaactaaagtgtgcggatgtggaggatgaagactgggacatatcatccctagaggaagagatatctttgggaaaaaaatctgggaaagaacagaaggaacctccacctgcgaaaaatgaaccacattttgctcatgtgctaaatgcctggggcgcatttaatcctaaggggccaaagggagaaggacttcaagaaaatgaatcaagcacattaaaaagcagcttagtaactgtgactgattggagcgacacttcagatgtctaattccacatgtcagaagattattccagaagccagcagtatttcagtatcacagtgtttcagtaatttgcctccatgattctagtgcttctgccttaccgtgtttcccacagcaacacagagactgattcaaagaacaatggtctctttaatggcacccaatacagtattgaaaatcagatcatcaacagtatttcgaagcatgtaaaggtgtttaagacttccgctgctgcttaaaaataacatgtcattgaagtcataaaaagttttttcttcagaaaggtactctagtgttaagtgtatttttttcaactaattttttagtgaattttttttaaacttacagcatgttttggtttgaattactaaaactttaaaaaatatttttcttatgtatgctgtcgtatcgtaggcgtttatattataaaattctgttagtagtcttaaaattgaattggtggaaccactaatccttaaaagttagtctggttatttttcatatagaagtaagtttaatccgagtgtggtggtgttcacctttaatcccagctacttgggaggctgaggtgggaggataacttgagcacaggagttcaagaccagcgtgggcaatatagcaagactccacccctccacaccccaaaaaagtaagtttaggattagaatatagctaggtccaatgttaaatacattttcctggagtacatttgtcacattcagctttgagccactgtaagcatgttactattaaatggttggttattttatatagcatattctttatcttggatattttatgaataaagtatagttattttaagtgccaattaatttatcagactaaatagaaaatatttgagccattactgaattcacatatgtatgtttttttttactatttaaaatacccaacatgtattatgaaatacctcaaaagtaatttagttacattcttaaacaatgacattgtcgaaagaaagttcttataagctgttttttgcatttttataacttggttatactatattctgtttccaagtaaccttttaactaaaagatttgttgggttttagatctcttttcatttgtcaaccttttcagtaaagccctctgttacatcactgtgactgtggctgtgttattagagatgaattctgagttaaatttgtacttattaggggtcttacagagggagaatctggccttgattgctatgccatatgacattctgtcctaatggttagaacaaatctttatctgtttccacccaccctgggatcctttttacttgtagcccattcctgccctctaaaagaatccttccaacttcctataggggccatttcatgcagatatactcactttatatgtatgtttctaaaagctttagtgaaggctgaatccaagtttcatgtagtaggacagagaacagaaggccgaatccaagtttcatgtggtaggacagagaacggcaatctacaaaactacaccaagcctaagatggcccatgtgccactttgttcattcatttatttattcagcagatatttattgaaccacttggtctggtttggttttgaacacgcactaattcatttaattacaacaactttgcgatgtagttattgttataatcctcatcctaaaggtgtgagaaacagagttattaagtaagttgccagaagccatacaagtacaaagtgtcaaggggagactttaagccaggtctctattccatgttttgtgtctgccatgttttcattcctgagcagaagagcttggggaaatgaacttttgctaagtaaacccagtatttaaattaagtcactatatctgtgtcttttaagagcccctcctttagcttacatggttagttgtatctttttttttttttttttttgagacagagtctcactatgttgcccaggcttgagcgcagtggcaccatctcggctcactacaacctccgcctcccagattcaagcgattttcctgcctcagcctcccaagtagctgggattacaggtgcccaccaccatgcctggcttaattttttgtatttttagtagagatgaggtttcaccatgttggccagactggtctcgaactcctgacctcaaatgatccgctgtcttgtcctcccaaagtgctgggattataggcgtgagccatcgcgccctgctgcatttcatttttttgtataaaatttggtttgttcgtttttgaggggaaccattcctttatgttgccccttactgatgcccaactaatgtgtttctggttactaacagaccttcatcccccaccctccctaaattcttcggtgtaatctaagcgttatctgcaccacttctgaataataaatgtgtttgaaatgcacacctacacaaccctgtcccacactggcctgtaggacctaatctaccttcatgtctttcagttgatttgtatttctgcaaaagatatttcaaggattatcaaggtatggaattttttttattttttatcttttaacaaacttgttcatttccttttctttccattgagcacctctgaacaatgtgattcttttttttaagtctttcacacttcaggaaaatactacattcacccacgttgtgattcatatcggacagtttcttactcaaagataacacaaataccaattcttattcatactttgaaactatattttaccctagactgccttggttcaaaggcctagtttcgacattactgtggcaaattatttaagctctctgttttcatttctttttctgtaaatgcaggatgaaaacaatatgtatctcctaggatggctgtgaggagtgagtgagacaggacatgaaaggtgtgtatgaactgtgataactgttgcccttgtgggcatgttatatagggctggctctaggaagaagcctgtgtcttttttcagaaatccctggagcaacttaaatgtctttagaaatgacaagtctctcagttatccagttagccgtaaacaggttctggaagacacacctagatagaactcggcccgtcagttctgagtgaggcacgtaccacttgggcttgggatgtccttaacccatttatgcctgaggttgcaattttttgaatttttccaatcacaccttggcgatgaccttgagcagtaggatataaataactcccacatgcttagtgttccaataatggaacactaggcataaacaggttttaattggctcctcagtcaaccatgaccaatatctctatctcagcttctgctgatgccctagctcagggctctgcattccgtgccagggacgcctcagccccttaacatggatgtgccacatgacaggcaataatatattggccccattagcccttcctggagcagtcataatgaattacagtcatgacaggcacatgtaagaaaccaaaatttgctaaatatgtacatgagtcttcatcacagcatcgtttatgaaaacaactaaatattcactaatggtgccagtggaataaatcagagaacatcccctgctacgtaactctctgcatacatcaaagagaatggtgtggctttgctttttcaacaatctactgagtggccatgggcatgtggatatggccatgaatgagcaagatcctctctgatcctgtagaagttaagttctaccagataacttgctgcttcaacaaaaagatttacctttttaaataaatgttgtagaatacttaaaaaaaacaaactagaatttgcctgtgtgcagccagtaacatgtctatttaacctggacaccttttgaggaatattctcagattgcccccatgctgtttataagacattgttccttatacacctgtttatgaatgaaaagaaacataaggagtgggtacaaagacttctatctatgaatgattaaaaaggctagagtacgaatacttcttgaacctttggtactaaatgcttttcatgttctatataaatgtagaaaacattttacaaatcctgtaaataaactgtttattttttatagaaagcc

SEQ ID NO: 1521 - DNA, 2147 bp, Homo sapiens
  source 1..2147: mol_type = genomic DNA
ggtagacgcgatctgttggctactactggcttctcctggctgttaaaagcagatggtggttgaggttgattccatgccggctgcctcttctgtgaagaagccatttggtctcaggagcaagatgggcaagtggtgctgccgttgcttcccctgctgcagggagagcggcaagagcaacgtgggcacttctggagaccacgacgactctgctatgaagacactcaggagcaagatgggcaagtggtgccgccactgcttcccctgctgcagggggagtggcaagagcaacgtgggcgcttctggagaccacgacgactctgctatgaagacactcaggaacaagatgggcaagtggtgctgccactgcttcccctgctgcagggggagcagcaagagcaaggtgggcgcttggggagactacgatgacagtgccttcatggagcccaggtaccacgtccgtggagaagatctggacaagctccacagagctgcctggtggggtaaagtccccagaaaggatctcatcgtcatgctcagggacactgacgtgaacaagcaggacaagcaaaagaggactgctctacatctggcctctgccaatgggaattcagaagtagtaaaactcctgctggacagacgatgtcaacttaatgtccttgacaacaaaaagaggacagctctgataaaggtatgcagtagccaactatatcagcatgaggccgtacaatgccaggaagatgaatgtgcgttaatgttgctggaacatggcactgatccaaatattccagatgagtatggaaataccactctgcactacgctatctataatgaagataaattaatggccaaagcactgctcttatatggtgctgatatcgaatcaaaaaacaagcatggcctcacaccactgttacttggtgtacatgagcaaaaacagcaagtcgtgaaatttttaattaagaaaaaagcgaatttaaatgcactggatagatatggaagaactgctctcatacttgctgtatgttgtggatcagcaagtatagtcagccttctacttgagcaaaatattgatgtatcttctcaagatctatctggacagacggccagagagtatgctgtttctagtcatcatcatgtaatttgccagttactttctgactacaaagaaaaacagatgctaaaaatctcttctgaaaacagcaatccagaaaatgtctcaagaaccagaaataaataaggatggtgatagagaggttgaagaagaaatgaagaagcatgaaagtaataatgtgggattactagaaaacctgactaatggtgtcactgctggcaatggtgataatggattaattcctcaaaggaagagcagaacacctgaaaatcagcaatttcctgacaacgaaagtgaagagtatcacagaatttgtgaattactttctgactacaaagaaaagcagatgccaaaatactcttctgaaaacagcaacccagaacaagacttaaagctgacatcagaggaagagtcacaaaggcttaaaggcagtgaaaatggccagccagagaaaagatctcaagaaccagaaataaataaggatggtgatagagagctagaaaattttatggctatcgaagaaatgaagaagcacagaagtactcatgtcggattcccagaaaacctgactaatggtgccactgctggcaatggtgatgatggattaattcctccaaggaagagcagaacacctgaaagccagcaatttcctgacactgagaatgaagagtatcacagtgacgaacaaaatgatactcagaagcaattttgtgaagaacagaacactggaatattacacgatgagattctgattcatgaagaaaagcagatagaagtggttgaaaaaatgaattctgagctttctcttagttgtaagaaagaaaaagacatcttgcatgaaaatagtacgttgcgggaagaaattgccatgctaagactggagctagacacaatgaaacatcagagccagctaagagaaaagaaatatttggaggatattgaaagtgtgaaaaaaaggaatgataatcttttaaaggctctacaattgaatgagctcaccatggatgatgataccgctgtgctcgtcattgacaac

SEQ ID NO: 1522 - DNA, 1826 bp, Homo sapiens
  source 1..1826: mol_type = genomic DNA
gcttgtggggttggcagttctttaagtctgcaaataactacagaacacaatagagtcctcctcccttcctctctctctctttcttttttttttttcttttcctgcttccaaacgccttcttcgaggctgaagctgggcaggtctccagaggtgcagcagccacaacaatcccgcagttcaaagttaagcagcagttgcacaacttccagcaactttctcagccggctactaatgagctgaaagccaggaacatccgaggagaagagaaagcttccagccctcctcccttcaccctggaaatccagacacccccacccccaccctcagatcactttaagataatttctttattcgtttgcccgacagaccatggctccctttggaagaaacttgctaaagactcggcataaaaacagatctccaactaaagacatggattcagaagagaaggaaattgtggtttgggtttgccaagaagagaagcttgtctgtgggctgactaaacgcaccacctctgctgatgtcatccaggctttgcttgaggaacatgaggctacgtttggagagaaacgatttcttctggggaagcccagtgattactgcatcatagagaagtggagaggctccgaaagggttcttcctccactaactagaatcctgaagctttggaaagcgtggggagatgagcagcccaatatgcaatttgttttggttaaagcagatgcttttcttccagttcctttgtggcggacagctgaagccaaattagtgcaaaacacagaaaaattgtgggagctcagcccagcaaactacatgaagactttaccaccagataaacaaaaaagaatagtcaggaaaactttccggaaactggctaaaattaagcaggacacagtttctcatgatcgagataatatggagacattagttcatctgatcatttcccaggaccatactattcatcagcaagtcaagagaatgaaagagctggatctggaaattgaaaagtgtgaagctaagttccatcttgatcgagtagaaaatgatggagaaaactatgttcaggatgcatatttaatgcccagtttcagtgaagttgagcaaaatctagacttgcagtatgaggaaaaccagactctggaggacctgagcgaaagtgatggaattgaacagctggaagaacgactgaaatattaccgaatactcattgataagctctctgctgaaatagaaaaagaggtaaaaagtgtttgcattgatataaatgaagatgcggaaggggaagctgcaagtgaactggaaagctctaatttagagagtgttaagtgtgatttggagaaaagcatgaaagctggtttgaaaattcactctcatttgagtggcatccagaaagagattaaatacagtgactcattgcttcagatgaaagcaaaagaatatgaactcctggccaaggaattcaattcacttcacattagcaacaaagatgggtgccagttaaaggaaaacagagcgaaggaatctgaggttcccagtagcaatggggagattcctccctttactcaaagagtatttagcaattacacaaatgacacagactcggacactggtatcagttctaaccacagtcaggactccgaaacaacagtaggagatgtggtgctgttgtcaacatagttccaatggctcctttctgacctgctttcatgttttaatgtttgtttaatttaataggaaacctcattttaaatataacactcaaaaaaatgtaaatcatattgtagtattcaatagttaataaaaactcgagaaatgtgttgtttctg

SEQ ID NO: 1523 - DNA, 3974 bp, Homo sapiens
  source 1..3974: mol_type = genomic DNA
gagaggagtgttttcttgcatccagaaaagacctgagaggcggacgacacctgtgctccgcagagcagaacgtgggaggaacggcgggatgttaaggagctcaagaagcagagagtctacctgcccgacgcgttcgtggagaggagcagcggttgctgttggaggaggtgggtgcaaggacggcagatggcatccctgagaggtggtgactgagactagatgcgggtgcaggtccatctccactggtggctgtggtggctttggattgttggaagaccatcaccttcagcaggtctgcacttgggaacaatcattctcccccagcccgagcgtgcctctgccctctgtatcattgacagaggctgtatgtttggaaagagaactttgtgactgcagaactgacagttgactctaattcttgctaccaagtttttccccgacccagtgaaagagtgttaagacttcgacctaggacacattgagaaccaaggccaagactggacagggccatataactgggcttcaaccatggctgggactaagaataagacaagagcccaggccaaaactgaaaaaaaggctgctatacaagctaaagctggagcagagagggaggctactggtgttgttaggcctgtagccaagaccagggccaaagcaaaagccaagacagggtctaagacagatgcagtagcagagatgaaggcagtgtctaagaacaaggttgttgctgagacgaaggaaggagctctgtcagagcctaagactctgggcaaagccatgggagatttcactcccaaggctgggaatgagtccaccagctccacatgtaaaaatgaggctggtactgatgcctggttctgggctggggaagaggccactatcaattcctggttctggaatggagaagaggctggtaatagtttcagcactaagaatgataaacctgaaattggtgcccaggtctgtgctgaggagttggaacctgcggctggggccgattgcaaacctaggtcaggggctgaggaggaggaggaagagaatgttattgggaactggttttgggaaggagatgatactagttttgaccctaatcctaaacctgtgagcaggatagttaagcctcagcctgtgtatgaaattaatgaaaaaaataggcccaaggactggtctgaggtaactatctggcccaatgcccctgctgtaactccagctgtgttaggatttagatcccaggcaccatctgaggcaagccctccttcatatattgttctggcctccgctgaagaaaatgcctgttctttgcctgtggcaacagcttgccgcccttctaggaacactcgctcatgctcacagcctatccctgagtgtcgttttgattctgacccctgcatccagaccatagatgagattagacgtcaaatcaggatcagggaggtaaatgggattaagccatttgcttgtccttgcaaaatggaatgctatatggattctgaggaatttgaaaaacttgttagcttacttaagtcaactactgatcctcttattcataaaatagcacggattgcaatgggtgtccataatgttcacccatttgcccaagagtttattaacgaagtaggtgtagtgacacttattgaaagcttgctcagttttccttcccctgaaatgagaaaaaagactgtaattactctgaatcctccttctggggatgaaagacaacgcaaaattgaattacatgttaagcatatgtgtaaagaaaccatgtcatttcctttgaactcaccgggacagcaatctggattaaagatactaggacaactgactactgattttgtccatcactacattgttgccaattacttttcagagcttttccatttgctgtcctcaggaaattgcaaaaccagaaatcttgttttgaaactacttttaaatatgtctgaaaatccaactgcagccagagacatgatcaatatgaaggcattggcagcattaaaactcatctttaaccagaaagaggcaaaagccaatcttgttagtggtgtggccatatttattaacataaaggagcatatcagaaaaggctcaattgtagttgttgatcacttgagttataatacactcatggccattttcagggaagttaaagagattattgaaacaatgtaaaatgagccagagatagaacattttaagccatcttcaaactctagcaggctgtacattacagtgtacacattatacactgcatctttaacacagagtcacctgtgacaggctctaggtttgagctagactattttgggggtatcaaatgaatattataccttgggctgaaaatgtttgatttttatcttgtctagattggcatatttttaacattttacttaagatagcaaaccagttcgttttaagtaagctaacttgttcattagtatctgtggcttaaaatggcaaaaaagaaaatatccttgagtttgtaatctagttacagaagtaaggcatacacacacacaaagataacagtacctagagagagagtgtgtgtgagtgtgcgtgtctctgtgtgtgcacgtgcacgctcatggccaaatgtgcgcactctacataaaggaggcaggagttcctataggctatttaatgtaagagaaactatttttctcctgttccagctgtatcagatactcgttccgcaacacagaaatgactcagaatctcagacaaaatgtattatttgttcaattttaattttgctactacattcataactcttaaattgttaggctgtttcatttacatcaaagttatctcacaaaagagaaggcaggaaacgttttgtgagtgcctattctatgtcaaacactgtgttggcaccatattttacaagtttttttcctcttctcacagtgatcttgtgagttagttacttatatttttattagaactcattattctgggtaccctccaatgagaattagagaggttaaataccttttcctagattcccacagcaggaaggtggcatagctgttttgtctgacaccagaacccatctcaccacactgctttacagtcttcctgaaggacattttgaggtgggggggccttcaaagctcagagactggtttgaatggtttaattttgcaatggatcatgtccatgccaggtgttacaattcttaacttcctccaaattcgtgtgtccattagacatttggctacatctggctggaggtcaggagaaaattctgaggtaaatagatggattttatctggcagtgtcgaaaatagtaggagcctaaaactttgttcaatgagtaagatgtagatttggagtcatcagcaggggaaacttgttagatgtcctttgtatctttttctatccatttgtattttttctttcccaaagagctgaaatcattttataccctgaatttaaaaggtaattgcttttttcctccttgcgaaatcataccttaattttttttttttttttttttaccatttatgatttattctcctatgtgtcatatgaaaggccaaggggctttatcttttactagtaggcaagcctgggcatttctgcatttgtgccagctaacactacaaaatagacttaattagagaaatttagacccagaattgcagcttcaacaacacaaaacaggaaagctagaagaggttgctgtgtcaacctacaagatagtgattcttggaagttggtatggaccagaaagcattcccaggacatttaggctatggctgagttctctaagactcagggtgggaattataatccctggtctaagctgatatgaaagtttctatgtgtgaaaatatggagttatatgctttgagattttctgccagttaaactaaaacaagatcatactgtaaatgtttgtaacttgcttccccccactgtatactgtaaacatctttgcatgtcaataaatatgcctctacaacata

SEQ ID NO: 1524 - DNA, 3530 bp, Homo sapiens
  source 1..3530: mol_type = genomic DNA
tttccgtggcgacgctatccgaagtgcggctgcgcaagggtgacggcgcgcgagcaagggggagggggtgttttggttctagccgctcgccgtccttgcaggctctgccgtcggaaagccgctcattctcgcttccccttccctttcccggctcaagtccttcctctctctttcctttctttccgcctatcttttttctgctgccgctccgggtccgggccattttccgggccgggcgcactaaggtgcgcggccccggggcccagtatatgacccgccgtcctgctatccttcgcttcccccgccccatgtggctgcggggccgcggcggcgctgcccactatggcccggaaagtagttagcaggaagcggaaagcgcccgcctcgccgggagctgggagcgacgctcagggcccgcagtttggctgggatcactcgcttcacaaaaggaaaagacttcctcctgtgaagagatccttagtatactacttgaagaaccgggaagtcaggctacagaatgaaaccagctactctcgagtgttgcatggttatgcagcacagcaacttcccagtctcctgaaggagagagagtttcaccttgggacccttaataaagtgtttgcatctcagtggttgaatcataggcaagtggtgtgtggcacaaaatgcaacacgctatttgtcgtagatgtccagacaagccagatcaccaagatccccattctgaaagaccgggagcctggaggtgtgacccagcagggctgtggtatccatgccatcgagctgaatccttctagaacactgctagccactggaggagacaaccccaacagtcttgccatctatcgactacctacgctggatcctgtgtgtgtaggagatgatggacacaaggactggatcttttccatcgcatggatcagcgacactatggcagtgtctggctcacgtgatggttctatgggactctgggaggtgacagatgatgttttgaccaaaagtgatgcgagacacaatgtgtcacgggtccctgtgtatgcacacatcactcacaaggccttaaaggacatccccaaagaagacacaaaccctgacaactgcaaggttcgggctctggccttcaacaacaagaacaaggaactgggagcagtgtctctggatggctactttcatctctggaaggctgaaaatacactatctaagctcctctccaccaaactgccatattgccgtgagaatgtgtgtctggcttatggtagtgaatggtcagtttatgcagtgggctcccaagctcatgtctccttcttggatccacggcagccatcatacaacgtcaagtctgtctgttccagggagcgaggcagtggaatccggtcagtgagtttctacgagcacatcatcactgtgggaacagggcagggctccctgctgttctatgacatccgagctcagagatttctggaagagaggctctcagcttgttatgggtccaagcccagactagcaggggagaatctgaaactaaccactggcaaaggctggctgaatcatgatgaaacctggaggaattacttttcagacattgacttcttccccaatgctgtttacacccactgctacgactcgtctggaacgaaactctttgtggcaggaggtcccctcccttcagggctccatggaaactatgctgggctctggagttaatgacaactccccaaatgcagagatttacactaacttccattctcagtttccttgtttcttttgattttttttttcctaattgtgtgaggctcttgtgttttagtgggaacaccaaagtttgcctatagtttaggcacttaataggaagaagctctgtacagaaatctgaaagttgttttgctttttgttttcccctttggtaatcaaaattttactatcttttattatttctggcttttcaaccaaacattgttgctaatccctatttttctttaagtgacacacattctcctgtctctggcttcttcaggctgaaatgacatagctcacccttacttcactcttgagaggtagggctcctttataattacatggttgctctcagactttctgtgaaagtttgggagctgtgtgtgtctgtgtgtgtgtgagagagagatcttgtctgcgtgtgtgtgtgtgatcttgtgtgcctgtaggtactgtgtgtcactgaaattacctggagtgaggattacttgtaattaaaatatttataaaagaaacaactttattcacagagtccagctttgggactagtctgtatcttgttttttaagtctaacaacactgataataggaagtaaaaacagaaaggaaaagaaattaccactgggaaaatctttttagttagattgtaggcttcctggggcctcccatgccaggactgcaaagtgatccagccctacctgtcttcccacctgtgtgtcccccgtgtgggaagttggtgtcacttccccttcccaccctcacatctgcttagccagtagccacacccctaaaacatcagactcaccatccaggtgcagctccagaggctacaaaaggcttcatgggacttgaatccccatcctagcttctctctccttcccctcaagacctgatctggttttaaggggcctggagctgggagtctcaagtctgctaagattcacatccatagcccccatggctttgaggagaatcctctctgccattcttccaatctccccagtgggttttgctattattttctaaattgggttaagtctaagaaggtgggggtgagcagggggtttatctgtgtgtagtgagtgcttcatgtgtggaatattcattttcttactgcagtgggacttggggttgaagccacccctcctactctgttggcttagccctgagatggtgacaggctggcctgcagtcagcatcattgtgcatgtgacagcatcaatgtgattagtaatttgtctgttcctcccttgaactgtctgtttagtctgaggtttttaaacttgcaggcagctgactgtgatgtccacttgttccctgatttttacacatcatgtcaaagataacagctgttcccacccaccagttcctctaagcacatactctgcttttctgtcaacatcccattttggggaaaggaaaagtcatatttattcctgcaccccagttttttaacttgttctcccagttgtccccctcttctctgggtgtaagaagggaaattggaaaaaaaattatatatatattctccttttaatggtggggggctactggagaggagagacagcaagtccaccctaacttgttacacagcacataccacaggttctggaattctcatcttcgaacctagagaaataggtgctataaacagggaattaagcaaaatgctggatgctatagatcttttaattgtcttaattttttttctattattaaactacaggctgtagatttcttagttctcacagaacttctatcattttaaactgacttgtatatttaaaaaaaaaatc

SEQ ID NO: 1525 - DNA, 3788 bp, Homo sapiens
  source 1..3788: mol_type = genomic DNA
atcccggctcctgcatccagtcgccattcgggaggccgctgcgctgcagggcctcgcggagccgcccgcgaccgcgagccgggccctccgcgcggtccatcgcccactggacgccgcccgcggccggaccggttcaacttctcatctttgttcttcttcatatactataggctgtttgctgtggtttagtcaaaaagccatgtagaatgcctgccttttgaagaccacttttaaggtgtctagtaagacagcagcagtattgaaagtttttaaagaatataaccgtgtgtgttggtaacagacagaagaatggaagcattccaggaacttcgtaaaccatcagcacgtttggagtgtgaccattgcagtttcagaggcacagactatgaaaatgtacaaatccatatgggtaccatccatccagaattttgtgatgaaatggatgctggtgggctaggcaaaatgatattttaccagaaaagtgcaaagttatttcactgccataaatgcttcttcaccagcaagatgtactctaatgtatactatcacatcacatccaaacatgcatccccagacaaatggaatgataaaccaaaaaatcagttgaacaaagaaacagatcctgtgaaaagccctcctcttcctgaacaccagaaaataccctgcaattcagcagaaccaaaatccatacctgccctttcaatggaaacacagaaacttggttcagttttgtctccagaatcgccaaaacctactcctcttactcccctggagcctcagaaacctggctctgttgtttctcctgagctacagacacctcttccttctcctgagccttcaaaacctgcctctgtttcttctcctgaacctccaaaatcagtccctgtttgtgagtctcagaaacttgcccctgttccttctccagaaccacagaaacctgcccctgtatctcctgagtcagtaaaggctactcttagtaatcccaaaccccagaagcagtctcatttcccggaaacattggggccaccttcagcctcatctccagagtcaccagttctagctgcttccccagaaccttggggaccatccccagctgcatctccagaatctcggaagtcagcccggactacctcccctgagccaaggaagccatccccttcagagtctcctgaaccttggaagccgttccctgctgtctccccagagcctaggagaccagcccccgctgtgtcaccaggctcttggaaaccagggccacctgggtcccctaggccttggaaatccaatccttcagcatcatcaggaccttggaagccagctaaacctgctccatctgtgtctcctggaccttggaaaccaattccttctgtatctcctggaccttggaaaccaactccatctgtgtcttctgcatcctggaaatcttcatcagtctcacccagctcctggaagtctccccctgcatctcctgagtcatggaagtctggcccaccagaactccgaaagacagctcccacgttgtctcctgaacattggaaggcagttcccccagtgtctccagagcttcgcaaacccggcccaccactatccccagagatccgtagtccagcaggatctccagagctcagaaaaccctcagggtcaccagatctttggaagctttctcctgatcagcggaaaacttctcctgcttcacttgatttccctgagtcccagaaaagttcccgtggtggttctcctgatctctggaagtcttccttttttattgagcctcagaaacctgtcttccctgagacccgaaaaccaggtccttctgggccatctgagtcccccaaagcagcctcagatatctggaagcctgttctctctatcgatactgagcctagaaaacctgccctgtttcccgagcctgccaaaacagcccctcctgcttctccagaagcacgcaaacgtgccctttttccagagccccggaagcatgcccttttccctgaactccccaaatctgctctattctcagaatcacagaaggctgttgagcttggtgatgaactacaaatagatgccatagatgatcaaaaatgtgatattttggttcaggaagaacttctagcttcacctaagaaactcttagaagatactttatttccttcctcaaagaagctcaagaaagacaaccaagagagctcagacgctgagcttagtagtagtgagtacataaaaacagatttggatgcgatggatattaagggccaggaatcaagcagtgatcaagagcaggttgatgtggaatccattgattttagcaaagagaacaaaatggacatgactagtccagagcagtctagaaatgtgctacagtttactgaagaaaaagaagcttttatctctgaagaggagattgcaaaatacatgaagcgtggaaaaggaaagtattattgcaaaatttgttgctgtcgtgctatgaaaaaaggtgctgttttgcatcatttggttaataagcataatgttcatagcccttacaaatgcacaatctgtggaaaggcttttcttttggaatctctccttaaaaatcatgtagcagcccatgggcaaagtttacttaaatgtccacgttgtaattttgaatcaaatttcccaagaggttttaagaaacatttaactcattgtcaaagccggcataatgaagaggcaaataaaaagctaatggaagctcttgaaccgccactggaggagcagcaaatttgataacacagtgtgaatatttgttctacaaaggtgtttgttggaaccattctttgtaagtatagcttatcagatagcatagttggatcagtagatgacatgtatggtgtaccgtgtttcactgtctcagttgtgttactaagaatgagcatttgatcatttttttctggtctctgtctatgtgactatcttgtaagtcaataaatttctgtatagtccagatggattaaacttctcatttcttttaaatatgtatgaataataatacaaggaagtaggcattccatttaataatcaagagcaagttgtactcaaagcattcagttaaagtgtatctgtgtgtggaactaatttcagacaatagaaaatattagttgaaatgtttaagaattaggcatgaaaaataaatttgagaaattttgtttccttacatgtatttttaaatcataagagttattttctatctgatgtaaaattagtttataaatcttaatcagcttctagatgtttattagcttttatgtcatgaaatgttggagtctcagggttgctgattttctgctaatgggaaaaattgactaagtctttaaaatagtttgcagccttctcccacaggagacaagtgaaagataagtgtgattttagatctttcttgtccatagttgttttcagtggagtcttccattctgtatcttaccctaagatctggttcttccctccccatccccaccccccacccaccgcctgccagctcacactaatagatgattcttaattgccaaatgtgttagagtttgtatatcctactcctgggccttacatgtcgcctgttggggcttaagaccaggttgataagtaggaactgaaagtcttccagattcacagtagaaaattttatagacatttctgttaaagaaatatatcgattttatgtttttcaattatgttactgtaaataccttgtacctgttcatggattattttattctaaaatattttgtcaaatgtgtatcaaccaaattaaaaagaaaggttttcatgtc

SEQ ID NO: 1526 - DNA, 4823 bp, Homo sapiens
  source 1..4823: mol_type = genomic DNA
gagaacggtggccggacggagagactgcgggtctgagggactggcgggcgggcgggccgagcggcgccgccgaggccgggctgggccgagcccaggagcgcccgggatgtagcgggccaccctgccgatgccacagcgcccggccgcgggcggagccggagccggagcctggggaggcggcgggggcccagagcgcagcccgcgccccccgcgcggagccaggcccgctgccgtccccgccgcccgggcccccggcatgcagccccggctgcggaggtgacactcacggaccttagccaccgccgccgccatcgccaccatggacgaacaggaggcattgaactcaatcatgaacgatctggtggccctccagatgaaccgacgtcaccggatgcctggatatgagaccatgaagaacaaagacacaggtcactcaaataggcagaaaaaacacaacagcagcagctcagcccttctgaacagccccacagtaacaacaagctcatgtgcaggggccagtgagaaaaagaaatttttgagtgacgtcagaatcaagttcgagcacaacggggagaggcgaattatagcgttcagccggcctgtgaaatatgaagatgtggagcacaaggtgacaacagtatttggacaacctcttgatctacattacatgaacaatgagctctccatcctgctgaaaaaccaagatgatcttgataaagcaattgacattttagatagaagctcaagcatgaaaagccttaggatattgctgttgtcccaggacagaaaccataacagttcctctccccactctggggtgtccagacaggtgcggatcaaggcttcccagtccgcaggggatataaatactatctaccagccccccgagcccagaagcaggcacctctctgtcagctcccagaaccctggccgaagctcacctccccctggctatgttcctgagcggcagcagcacattgcccggcaggggtcctacaccagcatcaacagtgagggggagttcatcccagagaccagcgagcagtgcatgctggatcccctgagcagtgcagaaaattccttgtctggaagctgccaatccttggacaggtcagcagacagcccatccttccggaaatcacgaatgtcccgtgcccagagcttccctgacaacagacaggaatactcagatcgggaaactcagctttatgacaaaggggtcaaaggtggaacctacccccggcgctaccacgtgtctgtgcaccacaaggactacagtgatggcagaagaacatttccccgaatacggcgtcatcaaggcaacttgttcaccctggtgccctccagccgctccctgagcacaaatggcgagaacatgggtctggctgtgcaatacctggacccccgtgggcgcctgcggagtgcggacagcgagaatgccctctctgtgcaggagaggaatgtgccaaccaagtctcccagtgcccccatcaactggcgccggggaaagctcctgggccagggtgccttcggcagggtctatttgtgctatgacgtggacacgggacgtgaacttgcttccaagcaggtccaatttgatccagacagtcctgagacaagcaaggaggtgagtgctctggagtgcgagatccagttgctaaagaacttgcagcatgagcgcatcgtgcagtactatggctgtctgcgggaccgcgctgagaagaccctgaccatcttcatggagtacatgccagggggctcggtgaaagaccagttgaaggcttacggtgctctgacagagagcgtgacccgaaagtacacgcggcagatcctggagggcatgtcctacctgcacagcaacatgattgttcaccgggacattaagggagccaacatcctccgagactctgctgggaatgtaaagctgggggactttggggccagcaaacgcctgcagacgatctgtatgtcggggacgggcatgcgctccgtcactggcacaccctactggatgagccctgaggtgatcagcggcgagggctatggaaggaaagcagacgtgtggagcctgggctgcactgtggtggagatgctgacagagaaaccaccgtgggcagagtatgaagctatggccgccatcttcaagattgccacccagcccaccaatcctcagctgccctcccacatctctgaacatggccgggacttcctgaggcgcatttttgtggaggctcgccagagaccttcagctgaggagctgctcacacaccactttgcacagctcatgtactgagctctcacggccacacagctgccggtcgccctttgctgcatggcagggggctgctgctgggctcagtgaagttgctgcttctcccaggcaaggctgtggaccatggagtggcagcccagccagcgtcggtctgtgccccttccgccactggggctcagagccggggtggggtggctgcagcctcaggactgggagcccccagcctgtcagatccaggagctccagtgtcctgagctcagcgtggaggggtaggggctgggaacagtgtgcaaggcagccgtgggccccaccctcggggatgtgtcctgacactgcaattggcaccgaagcccagagggtctgggggcacaagactgacgccagggtatgaagagtgttattttcattcaaagtgttattttgtttttccttccaatgtctggagaccaccagggcatctctgggctggatgagctcccacaagcctgagggaaaggccagcactcgctagcagtggcaggcagaggcccaggctgccgtcccctagagtcccaggttggctctgccagtcctgtcctttaccaaagatgaatgaagcaaatgtcatgctgccttattcagggaaggaggagcctgtcctgcctgtggccatgaccctgcctctcccaggcaggggcccgcgatgtggaactgctgccactgaggggggatccagttttgtcaatgcagttgtctctgttttacaagttggagtcactcttatgctgtacccagtttctaaactggagactgtgtgtgccctctgggctctgagtacccctgctttgggcttgggcctaggctgcattgaaaagagctgaaggttgtggcctttgcgctcctggcccagcctttgttccccactggagcagaaggggagatggacgacacggtcggggcatctggcctggccagtgccctgatcccagagagcccgaggaggtgtctcaggctgcctgagtcgtgacctgctaggccagagcccactccatctggtagaagggaaagcccatatgctaccaccagctgtgtccaaaaccgccagctctgttcttcctcagccagcctcgcccatccccttgaggtctcagcccctttcccttgtagctcctcccctggagggggaatggcagcaggggttggggaaacagcatctccaagcagcttagagttggccatatttacctcagcctgggcgctggtcctttcttccggcccctcccctccaaaatgtgcctattgctagagctcctccctctcaacacccagtttccttgggagttgtcattaaaggaaaaaaaaaaaaaaaaaagccagtgcccagggatgggcatctccagggagctggggattagtgccaggcagccctgccagccatgcctacatccccatgggcacagaacaagccaaagccttcgttgtatgttgacgatgcacttttatgaatgtagtttctatcgctgtttttagccttttcacatcatgtaatgtgaggccttgtacttgttaatttatatctcagatcatatttgatggtttttatatatatcaattctagactgttacaggtgacggacgcctcaagagagagaagagaaaatgaaagcagctggttttgcagaagtgtgtgtcgcatgcgccagttgggcctggaccctcctgtgtccatccctgttcccccaggggctctatcagcccctgtaccccacactgccctctgaagacaacacaggctcctgcttccacctcggcccttgcccagggtggggcctggccctcatcttgaccaaagctgctgtgtggcagctcggcctctctacgaccccatcttggtggctgcacactcttcctggcccgcacccccatccccagtccctgttccccaagaggatacagagcacggtgctggctgactcaactgtgcgtcccaggttcagggtcttacagagctccaccccctggggtcttacctcactgggaatgtgttttgaaaatgaatttgaagacaagccaacaaaccctgcactccaaaaaagcaaaacagaccctaatttttttgtgccaaaaactgtggacatgctggctcagcatcctcaggaccaagttgttgcttaatttattgttttttaataactaatccagataaaaagttgtggggcttcagggtgacctgggcccaaaggttctgaagggcagttcctggcagccccaggcttgctgtgggaaggggccgtgccgtcactttctcatcattccatggggtgtgtctgcctgggccaactctgcatggagaggccagggctggggacagtccgcactctgccaccctcctgccccttccacccaccccagctctatgtctgtgtctgaattgtggatcgtgcagccatggttattgtggaactgtggaacctgcagccatagttatttgactatatcttgaccgagggcttgcagtgcaaagccaggccagtgttgcgcattacttacaataaaagggatcatttatatc

SEQ ID NO: 1527 - DNA, 4503 bp, Homo sapiens
  source 1..4503: mol_type = genomic DNA
cgagggaagaggccggagggagatcgcggaggggagggggcgggaggggggtggggtatcctgagtcgtccgtggtccggagtctggaaggccctagagcggcgccagtcgacccgcctcgccacaacttgcccagaccagacacgtttcatcctgcgccctgcaagaaggagccggcctgcctctctccgctttgctgctcctcggcctccgcgggcccggcccgcgtcagcagcgaccctggggtctgggtcccctgtgtcgcccccgcccgcctgcagcgcccggcacccgcccaggagcgcgcagctggggttctagggacgtatacttgagcaagagagaccacagctcttgttcccgctgatcctgcagcccagtggatggagtccagaatctacagacctgccaggaaagaaaaaaaaattcctgatgtctggtccaagcaggaattccccggtggattggggaatgtctggcttttcctcagcttattgatctctgtggtaaccactggaggcccccagaagacccatagaaatgagaggcctgaggtctacaagtcgctgctagaaatattttagcctctccaaagcccagaatgcagccccgacccaagtttgtaagggttctgggtgcacgctgaccctgcgcgggcagacgcgccctttgctccaggtccggacctgggcgctgctatagcaacgtcctggacgcccagaccttaggccgccgccgccgcggaagcgaggaacccggccttctcccgctcctgagggctgtggcggcggcggcccgggaggcggcccaggctgggtaaagaccgcccggctcctcctatgcaagctgaggcagcggattggttttcaagcatgcccttccagaagcatgtctactacccgctcgccagcggcccagaggggcccgacgtcgctgtggccgccgccgccgcgggtgcggcctccatggcctgtgcgccccccagcgcggcttcggggcccctgcccttcttccagttcaggccgcggctggagagtgtggactggcggcggctgagcgccatcgacgtggacaaggtggcgggggctgtggacgtgctgacgctgcaggagaacatcatgaacatcaccttctgcaagctggaagacgagaagtgcccacactgccagtcgggggtggacccggtgctgctgaagctcatccgtctggcgcagttcaccatcgagtacttgctgcactcacaagagttcctcacctcgcagctgcacaccctggaggagcggctgcgcctgagccactgcgacggcgagcagagcaagaagctgctcaccaagcaggcgggggagatcaagacgctcaaggaagagtgcaaacgccggaagaagatgatctccacccagcagctgatgatcgaggccaaagccaactattaccagtgccatttttgtgacaaggcctttatgaaccaagcttttctacaaagtcacattcaacgccgccacactgaagaaaattctcattttgagtatcagaaaaatgcacagattgagaagctccggagtgagatcgtcgtattgaaggaagagctgcagctcaccaggtctgagctagaggctgcacaccatgccagtgcagtcagattctccaaggaatatgaaatgcagaaaacaaaagaggaagactttttgaagttatttgacaggtggaaagaagaagaaaaggagaaactagttgatgaaatggaaaaagtcaaggagatgtttatgaaggaatttaaagaattaacttcgaagaattcagcattagaatatcaactgtcagaaatccagaagtccaatatgcagatcaagtccaacataggcacattaaaagatgcacacgagtttaaagaagaccgttctccatatccccaggatttccataatgtcatgcagcttcttgatagtcaggaaagcaaatggacagctcgagttcaagctattcatcaagaacacaagaaagagaagggtcggctcctgtcacatatagagaaacttcgaacctcaatgatagatgatctaaatgcaagcaatgttttctataagaaaaggatagaagagctagggcagagactccaggagcagaatgagctgattataactcagagacagcagattaaagactttacctgtaatccattaaacagtatcagtgaacccaaagtgaatgccccagccctgcacactttggaaactaaatcaagtctgccaatggtgcatgaacaggcattctcgtcgcacatactggaaccaatagaagaactttcagaggaagaaaaaggaagggaaaatgaacagaaattaaataacaacaaaatgcatttaaggaaagctttgaagagtaactcctccctcactaagggactaagaacaatggtggagcagaacttgatggagaaactggaaaccttggggattaatgcagatatacgtggcatttcaagtgatcagttgcatagagtactaaaaagtgtggaatcagaaagacataagcaagaaagagaaatacctaactttcatcaaattcgagaattccttgaacatcaagtcagctgtaaaattgaggagaaagcactactctcttcagatcagtgcagtgtttctcaaatggataccctttcaactggagaagtacccaaaatgatacaacttccttccaaaaacagacaactgattagacaaaaagctgtttctactgataggacatctgttccaaaaattaagaaaaatgtcatggaagatccttttcccagaaagtcttcaactattacgacccctccttttagttcagaggaggagcaggaggacgacgacctcatccgggcatacgcatccccaggcccacttcctgtgccgccaccacaaaacaagggcagcttcgggaagaacacagtgaaaagtgacgcggacgggaccgagggaagcgaaatcgaggacactgatgattctcccaagcccgcaggagtcgccgttaaaacacctactgaaaaagttgaaaagatgtttccacatcgcaaaaatgtgaacaaaccagtcggtggaactaatgtccctgagatgtttatcaaaaaagaagaattacaagaactaaagtgtgcggatgtggaggatgaagactgggacatatcatccctagaggaagagatatctttgggaaaaaaatctgggaaagaacagaaggaacctccacctgcgaaaaatgaaccacattttgctcatgtgctaaatgcctggggcgcatttaatcctaaggggccaaagggagaaggacttcaagaaaatgaatcaagcacattaaaaagcagcttagtaactgtgactgattggagcgacacttcagatgtctaattccacatgtcagaagattattccagaagccagcagtatttcagtatcacagtgtttcagtaatttgcctccatgattctagtgcttctgccttaccgtgtttcccacagcaacacagagactgattcaaagaacaatggtctctttaatggcacccaatacagtattgaaaatcagatcatcaacagtatttcgaagcatgtaaaggtgtttaagacttccgctgctgcttaaaaataacatgtcattgaagtcataaaaagttttttcttcagaaaggtactctagtgttaagtgtatttttttcaactaattttttagtgaattttttttaaacttacagcatgttttggtttgaattactaaaactttaaaaaatatttttcttatgtatgctgtcgtatcgtaggcgtttatattataaaattctgttagtagtcttaaaattgaattggtggaaccactaatccttaaaagttagtctggttatttttcatatagaagtaagtttaatccgagtgtggtggtgttcacctttaatcccagctacttgggaggctgaggtgggaggataacttgagcacaggagttcaagaccagcgtgggcaatatagcaagactccacccctccacaccccaaaaaagtaagtttaggattagaatatagctaggtccaatgttaaatacattttcctggagtacatttgtcacattcagctttgagccactgtaagcatgttactattaaatggttggttattttatatagcatattctttatcttggatattttatgaataaagtatagttattttaagtgccaattaatttatcagactaaatagaaaatatttgagccattactgaattcacatatgtatgtttttttttactatttaaaatacccaacatgtattatgaaatacctcaaaagtaatttagttacattcttaaacaatgacattgtcgaaagaaagttcttataagctgttttttgcatttttataacttggttatactatattctgtttccaagtaaccttttaactaaaagatttgttgggttttagatctcttttcatttgtcaaccttttcagtaaagccctctgttacatc

SEQ ID NO: 1528 - DNA, 6458 bp, Homo sapiens
  source 1..6458: mol_type = genomic DNA
cggcgtctctctcccccgcgccagctcccgtacacggagccgcattccttggcccccccacccccctccctcggggcccccccgcccccctcgggaaaaaaatccaccccgaatcactcgaacccgagggaggcttcctttcacccttggggagacgagctttcaacggttacctcttcttcgtctccccccaagcccccgtcccctccccctgctcccacccccttctggcgccgggtgtaaggtccctttaaggcgacggcgccttcctcgggtcagactaccggcggcgacgaccacaggagcatggcggacaccgacctgttcatggaatgtgaggaggaggagttggagccatggcagaaaatcagtgatgtcattgaggactctgtagttgaagattataattcagtggataaaactaccacagctggcaatcctttggtccagcaaggtggacagccactcatcctgacccagaatccagccccaggtctgggcacaatggttactcaaccagtattgaggcctgttcaggtcatgcagaatgccaatcatgtgactagttcccctgtggcctcacaaccaatatttatcactacgcagggatttcctgtaaggaatgtccggcctgtacaaaatgcaatgaatcaggttgggattgtgctgaacgtacagcaaggccaaacggttagaccaattacactagttccagccccaggtacccagtttgttaagccgacagttggagttccacaagtgttctcccagatgacccctgtgaggccaggctccacaatgcctgtgaggcccaccaccaacaccttcaccaccgtcatcccggccactcttaccattcgaagcaccgtcccacagtcccagtcccagcagaccaagtccactcccagcacttctaccactcccactgccacacagccaacctcactggggcaactagctgttcagtctccaggccagtcaaaccagaccacgaatcccaagctagctccctccttcccctctccacctgcagtgagcattgccagctttgtcactgtgaagcgacctggtgttacaggcgaaaatagcaatgaagtggccaaattggtgaatacccttaacaccatcccttccctgggccagagtcctgggccagtggtggtgtccaacaacagctctgctcatggctctcaaagaaccagcggacctgagtcttcaatgaaagtgacctcttccatcccagtatttgacctccaggatggtggacggaaaatatgtccacgatgtaatgctcaatttcgtgttactgaagctttgagaggtcacatgtgttactgttgcccagaaatggttgaataccagaagaaaggaaagtccctggattcagaacccagtgtcccatcagcagcaaagcccccatcccctgagaaaacagctcctgttgcttccacaccctcttctacacctattcctgctctgtcaccgcctaccaaagtaccagaaccaaatgagaacgtgggcgatgccgtccagaccaaactcattatgcttgtagatgacttctactatggacgggatggtggcaaagtagcccagctcacaaatttccctaaggtcgccacatctttccgatgcccacattgtaccaaaaggctaaaaaacaatattcgattcatgaaccatatgaaacaccacgtagaactcgatcagcagaacggtgaggtagatggtcacactatctgccagcactgttaccgccagttttccactcccttccagcttcagtgccacttggaaaatgttcatagtccctatgaatctactaccaagtgcaagatctgtgaatgggcgtttgaaagtgagccactatttctccagcatatgaaggatactcataagcctggagagatgccttatgtttgccaggtgtgtcaatatcgctcctcactctactctgaggtagatgtccattttcggatgatccatgaggatacccggcatctgctctgcccttattgcctgaaggtcttcaaaaatggcaatgcattccaacagcattacatgaggcaccagaagagaaatgtttatcactgcaacaaatgccggctgcagtttctctttgccaaggacaaaattgaacacaagcttcaacaccataaaaccttccgtaaacccaagcagctggagggcttgaaaccaggcaccaaggtgacaatccgggcttcccgagggcagccacgaactgttcctgtatcctctaatgatacacctcccagcgccttgcaggaggcagcaccgctgacctcctcaatggaccctctgcctgtcttcctttatccccctgtccagcgcagcatccagaagagagctgttaggaaaatgagtgtcatgggccggcagacatgcctggagtgcagcttcgagatcccagacttccctaatcatttccctacttacgtacactgctctctgtgtcgctatagcacctgctgttctcgagcttatgccaaccacatgatcaacaatcatgttccacggaagagccccaagtatttggctttgtttaaaaattctgtgagtggaatcaagctggcctgcacttcatgtacctttgttacctctgtgggcgatgctatggccaagcatttggtattcaacccctctcacagatccagcagcatcctgccacggggactcacttggatagctcactcaaggcatggccagactcgtgaccgagtgcatgaccggaacgtgaagaatatgtaccctcctccttccttccccactaacaaagctgccactgtgaaatctgcgggggccaccccagctgagcctgaagagctactaactcccttagccccagcactcccatcaccagcctcaactgcaaccccaccaccaacccccactcacccgcaggctttagcccttccaccgctggctacagagggagccgaatgtctgaatgttgatgatcaggatgaagggagcccagtcacccaagaacctgagctagcatcaggtggtggtggtagtggtggagttggcaaaaaggagcagctgtctgtgaagaagcttcgagtagtactgtttgctctatgctgcaatacagaacaggcagctgaacacttccgaaatccccagcgacgtattcgccgttggcttcgacgtttccaggcctcccagggggagaatctagagggcaaatatctgagctttgaggcagaagagaaactggctgagtgggtgctaacccagcgcgaacaacagctacctgtaaatgaggagaccttgttccagaaggccaccaaaataggacgttctttggaaggggggtttaagatctcctatgagtgggctgtgcgtttcatgctgcggcaccacctgactccccatgcccggcgagctgtggcccacaccctacctaaggatgtagcagagaatgcaggactcttcattgattttgtacaacggcagattcacaaccaggacttacccttgtctatgattgtggctattgatgagatctctttgttcctggatacagaggtgctgagcagtgatgatcgaaaggagaatgccctgcagacagtgggcacaggggaaccttggtgtgatgtagtcctagccattctggcagatggcactgtccttcccaccctggttttctacagagggcagatggatcagcctgctaacatgccagactccatattgctagaggcaaaggagagtggctacagtgatgacgagatcatggagctgtggtcaactcgagtgtggcagaagcacacagcttgccagcgcagcaaaggcatgcttgtgatggactgtcatcgcactcacttgtcagaagaggtactggctatgcttagtgcctctagcactttgcctgcagtggtcccagcaggctgtagctccaaaattcagccattagatgtatgcatcaaaagaactgtcaagaacttcctgcataaaaaatggaaggaacaggctcgggaaatggcagatactgcatgtgattctgatgtcctgcttcagctggtgcttgtctggctgggtgaagtgctaggtgtcattggggactgtccagagctagttcagcgctccttcctggtggctagtgttctgcctggccccgatggcaacattaactcacctacaagaaatgctgacatgcaggaggagctaattgcctccctagaggagcaactgaagctgagtggggaacattctgagtcttccactccacgacccagatcatctcctgaagagacaattgagcctgaaagtcttcaccagctctttgagggtgaaagtgagaccgagtctttctatggctttgaagaagctgacctagatctgatggagatttgagtgttggggtcatgagggggtgtggagtgagggtgggaacatgtgagggagggtaaaggggcttagggaaaagggggcataccaggtggggtatttggtttctattttttaattttataccaccactcccccctgaagttgacttacacttccctgtggatttgtggattaattaggaaaaccaatagtaatcacgtctgagccaaggagctggcccattggtcattcacttctgctaaaaacaggtttttgtgactttttttttttttaaatttaaatcactgtgtttggtatttttctgacaaaattaagaaaaagaaaaaaaattatttgtgggcaaatgttaaatttttttgtttccccttttacctcaattgtatcatagtactgggtttttttgtttgttttattgtgtggccaatgtctttgggcatgatgctatctaatcattgttaatgtgagaacatttctgaagatgggaaagacaaattatgtagctcacaaactggtttattatatatatggataaaaaacttttttcattgtggtcttaacacttttatataaaaatgaaaatggaaaaaaagtcccactgaactctctcttccttctccttttctttccttccctctccagagatgttggtttctacagcaaccctagatataaaattgtggctttaaaaatgcatgaaaccacctttaattatccagaatgaatagatttgtcttttcctcaccaccttccctccaaaacatgacataaacaatattttttgcacttgtgatccttggcccctttccccattctcaacaccatccatccctctggacaaaggatcatacaggtgttattagcaagcaagagatactgaagcgatcaaacagttttagggtggaagccattcccagtttgagtcttcatcctgtaagcccccaggggcagtccctgctttactgaacttcatcctgttagatggagagcatgcctgtttaagggattactggtcctacagccaggagctaattgttcaagaagtgttgaactttaaaaagacaagaccacttgttgaaatccagcgtgctctgtggctttcccctatttctcttaatacttagggaagaatctgacaggaagaagcgcacaggggtgtgcacaaagaaaatgacatgaatctttatttttcactgccagcttcaaggaaagaaaattttttctacaatttgcatgagggatttttttaattgtatgtactcatggttgtaaaccaaaacgtactgtaccgtacagagaaaaggagcaaaaaaccaagtcttctgtttatcctgaggctttccacaatgttcccctcctgtgagccaaggaggcaaactgcacaagcttgtaaatggttcgtctttaaaatgtacataagtggaacatttaataaaatgaggggaaatggatttataaacttgttttttttctaggtgaccctgtttaataggctttcacagactggggaatgctcaagatgtgatgggcctggtggtacaggtgtgacatttgttaccacccatttctcccaccccaccctgcttttttgtttgtttgttttttcatcccccagcacactataatatagtgaactggaaaagtcccttccagaaacagcttggccagctttgtgaacctttgacatctgaaaacaaccaaggatccatctgggcttctcttccccagctttttgcctgatgccattttattgacagacaatggactttgaagtcagcctttgcctttgagaaagttcaagaactatggttggtcacgtctatctacaacctaatcctactctttggtagtctctgcagcagccacagccttagcagagctggggttcctgtcttctgcacacgattgactttcttgatgggtaattttttttaagattataccaacagtggatcagctgggttttggccaggaagttgtctttgtggactctgcctgcatggcttagtagtagaaggaaatttttttttggttttgttttttataattcagtttaatcaataaacatgtatttattgactgtt

SEQ ID NO: 1529 - DNA, 4684 bp, Homo sapiens
  source 1..4684: mol_type = genomic DNA
aatccatccgcatggctttttgctctagttcctcagatctttctgcgctagctgcactcccaagcccaggcttagatctaccctaatctagtcccagccccgacctcatggacactggctgcaaaacttaccgccttgcaacacctggatccttaaatagttcagggcctcaaaggctcccaagccgccctgcgcctgttgctatggcgactgggcaggcggccggaagcgcggccttgttgggggcccccgttgcccgcctcccagtagccgcgcctcaccctaggccaggaatggttttagggaagactgttgccggatgacaaggctgtcactattgttctgtactacctgacattatgggaccaggccagccagcttcaacctgtgttcatctagcacctaggacccaacttgatgggaggagcgaccccaaagtacttcagacccagaaccagctgcagtttaataggaatgttcctacacattcaagcaacttggcgatccgatattcttgcccacatgccattagaattgaaaaactgaagcactcatacaatgaatcataccattgtaaagatgcagattgtagagttggtcctgacctgggcagttctgtttcattttccgtcatatcccaagagagacttagctatgctgtccacctagccagaagagatgtgaaacgaagacaatttgaaaaacatataaaagaacatcatctcagaagtcagcctcaaagctctcagaagtgtggacatactaagtataaaatacccgaccacagggtggaaaggaaggaatcaaagagtcaagcagcctgtcagtgtagccaccagccatccaaagtagaaatctccagctctggtgccaaagtatacctttactcatctcatccaggccagtcagatcttactgtgccaaattcgccacccacccatgatccgggacttcagcctcatcccaggataggtgaccacaaaaacataagtgaacagaaaagcctgctagaagtccagcgactccagaaagaactgagcagttgtatccacaaaattgaagaggtaactaaaaaagatagactagaagaagctttggatccagatgaagaacgtcgaatccgtatcaggagacaggagcaagctgctcgctctgcccgaatgctctacgtcctccagcagcaggtaaaagaaatccaggaagaattggataaattgagtccacataaaattaaacacactaagaagtcatgggcaatgtctaagctggcggctgcccatcgaggagccattcgggccttacagatgtttgtcactcagtttactgaccgaggggagcatccacttcctgctcggtgtaaggaactgggcagccttattcgccagctttcactttgttctgtcaagctggatgcagacccttctgttcctgatgtggttatagatattctgcaacaaattgaggctttggaatctctcctggaaaagaaactgtcaccaaaaaaggtgaaaaaatgtttcagtgaaattcggagcagatttcctatcggtagccaaaaggccttggagagatggccaagtacatcaccaaagggtgagaggaggcccctcacagcaaaggacacattcccacaggaaacaagtcgaccttctgtagcaaagcagcttcttgccgataagtatcagcccgatacggagcttccggagacccagaggttgcagagtgagcttgatgtattagatgcggatatagttctggaagaaggaccatttattctagaccaaagtgcaagcttcaaagacgaggtgttagccgtggcaaaaacaaaagcagggaaaaagaagcctgtgactgagaatgtgccgtttaggaagaaagatactctggcgccagcaagacagcaaggactccgcaaagctgaaagaggtagacaaagccaacctcacagtaaaagcagagtgcagcagacaacagtttcatccagattaaaaatgaaccggcagcctgtgaaagaccgcaaggcaccatggatacccccaaaccccacatccccaccagcgtctcctaaatgtgctgcatggctaaaggtgaaaactagccccagagatgccacaaaagagcctctccagcaagaagatcctcaagaggaaagtcacctgacaggtgctgttgagcatgaagcagccaggctcgcttggcttgatgctgaaacttccaaaagattgaaggaactagaagagttaaaagccaaggaaattgacagcatgcaaaaacagaggcttgattggcttgatgctgaaacttctagaagaacaaaggaactgaatgagctcaaagctgaagaaatgtatagactccaacaattgagtgtttctgccacccacttagcagacaaggtagaggaggcagttctggatcgtttgaagcctctcttggtcaaggcccagagagtcaattctactacagaagcaaatattcatttgaaagatggctcgtcagtaaacacagcgaaagcccagcctgcacaggaggttgcagctgttgattttgaatccaacaacattcgtcagcttgatgattttttggaagattgtgccagtgagctctgggctgtgactcatgctaagatcttggggtctgaaaccttagccaccgttgaggacagcaaggatagcccagatctggagatcatgatgcgccgaatggaagagatggaaaaataccaggagtctgttcgtcaaagatataataaaatcgcatatgctgatcctcgactttggatgcaggaagaaaacaatgaccaaaaaatctcagcaataagtgaaaagcctctatctcctcatccaatcagaatcacgaagacagtggatcgcaaggatccagccgtgaacatcatgttagaaaggccctgtaatggcaattccctggatgaaagtgtgggaacagaggaaggatcagagaaaagagaggcccctcttctctccctagccgaagattctcaacagaaagaaggccgagctcccctctttgtcccaccgggtatgcagcacagcatcggtgactactgtagtcgttttgagcagtaccttcggatcatatctcatgaggctgtaggctccttcaacccgtggctgatagctgaaagcttttcagaagagctggtagatgaagctctgggtgctgtggctgctgaacttcaggatatgtgcgaagattatgcagaagctgtgttcacctcagaattcttagaggctgctacataaaggctctctgaggcgaggccatttgtgtcacactggagaagggatggcaccaccctttgttttggcccacaggaaattttcatcctcagctgtccatccaggcccagaaggtgctgcccactgaaaggaaggcagtgccggggaggtcatcctcactttgcattttcttttgtcatggcaatggttctggaaatgtatgatgcaatgtatcacacttatcagtgcccaggcaacacaacttgattatggcaatattttcagaatgtgtacttttcctattgaaataccatgttcattcctctggctcagtttggtgatgaaaatgttttgaaagataatcgatacgtatatttcacacaaggattcaggttgctgttgaacccttgctggcattgataccaacacaagtgcggctactagctggtcccatcacggggcccctgttttgcatctttggcgatttcctgtcaggacctctggccctactaggctgtagactcagggagagcacagtctggctgtgctgccaaacctctcctctgctgcagtttattccaaacaggagccccctggctgtcagtgcacaataatagacacacatttcttcaacgttccattcctaggtgattttcacatttttagttcctcagcatattttattgctgtgtgttgacacaatctggtataaaaaactttctctggattcagaggaagtttgaggaatcaggagaggaccaggccttctcctgtgcctgggtgaaggtacagacctcgctgtgtctccgatgaggtcagaagtgtctctatttcataccacaaaggaacccaagtgggagtagggaacagatggatggcgcgaagacctctgtgtctccccagagaaaggaagaaacttaagaaccatcatagcctggtcctccaacatcttacagatcatgttttccaagagaaaagcctgtgttttcagaaactctgaattcagaaaaagaaacggaatgtgcgtaagaatcaggccactgcctggaaagactttctctcaattcgtagcctgaggctcagtgaaggaaacatgcagaaagaatgcctgagacgcccccagggaataagggaactctttataacctgtccagtgccgtcatctgggatttttctctgaagtacaagaatttcaggtgatttaagctgcttgatcacacttatttgtgcaaaattgattttcatttaatgttaatgttttcctgcttaattttatataacttcagaatgtaaagagcttcaaggtaaattacagggtgtttaacctggggagttaaatgtgtacacttgaattaataggagcaccggttgttgctagtataaagtaatttgtgtggcagtttgtactgtgctgagtttttaaaataaacccaatattttaaagt

SEQ ID NO: 1530 - DNA, 8006 bp, Homo sapiens
  source 1..8006: mol_type = genomic DNA
ctgcggcggcgcgctccgagcctgcgtctagggcgcccccgggtcagagctgtcgccgtggccgccgctgcaagaaccatgtaccgcagcagcgctcgctcctccgtctcttcccaccggcctaaagacgacggcgggggcggcccgcgcagcggccgcagctctggctcctcctcaggcccggctcgccgcagctcaccgccgcctccgccctccggctcctcgtcgcggaccccggctcgccgaccccgctcgccctcagggcaccgcggccgccgggcctcgccgtccccgccacggggtcgtcgcgtctccccgtccccgcctcgggcccgtcgcggctccccgtcgccaccgcggggccgacgactcttcccgccgggcccggccggcttcagaggcagcagccggggggagtcccgcgccgactatgcccgggacggccgcggagaccatccaggcgacagcggcagccggagacgctctcctggtctgtgttctgactctttggaaaagagcttaaggatcactgttggcaatgaccacttctgtgttagcacaccagaacggcgacggcttagtgatcggctggggtcaccagtggataatctggaagacatggacagggatgacctgactgatgattctgtcttcactcgaagctcccagtgctctcggggtcttgagcgatatatttcccaggaggaagggcctctcagtcccttcttgggacaacttgatgaggactaccgaacaaaagaaactttcctgcatcgatctgattatagtccccatatcagttgtcatgatgagctgttgcggggaacagaacggaatcgagaaaaactcaaaggctactccatacgatctgaagaaaggagccgggaggccaaaagaccccgttatgatgacacagtgaagataaacagcatgggaggggatcacccaagttttacatcaggaactcgcaactatcgacagcgtagaagaagcccaagtcctaggtttctcgaccctgagtttcgagaactggatcttgccagacgaaagcgagaggaagaggaggagcgaagtaggagcttgagtcaggagctggttggagttgatggtggtggtactggctgttccatccctggattgtcaggtgtcctaacagcatcggagccaggatattctttgcatcggcctgaggaagtatctgtgatgcccaagaaatccattttgaagaagcggattgaggtggacataatggagccctccatgcagcttgagagtttttccagcagtaccagctccagccaggatcaccctctctactctgggcacccatcccttccactaagtggtgctattgctgcttttgcctcagagattgaaaacaaggggactatggtagagactgccttgaaggaacctcagggcaacctctaccaatggggtccccttcctgggattcccaaagacaacagtcctctcagagaaaaatttggaagttttctatgccacaaggataatttggatttgaaggctgagggacctgagcgacacacagacttcctgctgccccatgagagagctagccaggatggcagtggtttttcccgcattctgagcatgttggctgattctaccagtacacaggaaaaaaggcgacgtagctttcccgacattgaagatgaggagaaatttctctatggggatgaagaagaggatttaaaggcagaatccgtaccaaagccccttgggagctctgagagtgaagttatgaggcagaaggcaagctccctgccgtcttcagctccagctgtaaagctagaatcactagaagagaccaatccagaatatgcgaagatccatgacttgctcaagacaatagggctggatattggagtagcagagattagtcaattggctgcacgcacccaggaacgacttcatggcaagaagccatcattacgctcctcagctgaccgccgttcctcagttgaccgatacttttcagctgaccactgttcctcagttgaccaccgcttctcagctgaccgctgttcctcagttgaccactgcttctcagctgatcgacgttcctcagatccccacagactagagagcagggaggcacatcatagcaatacccactctccagaggtgtcccatccacacccaccttctcctgtggatccttacctgctcacaaaaaacagccctccattcctaaagtctgaccatccagtgggtcatatttcaggaccagaggtggttggtagtgggtttcagtcatctgttgcagtcaggtgcatgttgccatcagccccatctgccccaattagacttccacacactgctgctttatctcagtttcacatgccaagggcctctcagtttgctgcagctcggatacctccgaactaccagggacctgccattccccctgcctcttttgatgcctataggcactacatggcatatgcagcctccagatggcccatgtatcccacctctcaaccgtcaaaccaccctgtacctgaaccacacaggataatgccaataaccaaacaagctactcgtagccgtcccaatcttcgtgtgatccccactgtgactcctgataagcctaagcagaaagagtctctgcgaggctcaattcctgcggcccaagtgcctgtccaggtgtccattccatcactcataagatataatccagagaagatctctgatgagaagaaccgtgcttcccagaagcaaaaggttattgaagagagggaaaaactaaagaatgaccgggaagcccgccagaagaagatgtactatcttaggaccgagttagagcggcttcataaacaacaaggagaaatgctgcgcaagaaacgaagggagaaggatggccacaaagatcctctcttggtggaggtgagtcggcttcaggataacattatgaaggacattgcagagctacggcaagaggcagaagaggcagaaaagaagcaatctgaactggacaaagtggctcagatcttgggaattaacatcttcgataaatcccagaagtctttaagtgacagtagagagcctacagagaagcctgggaaagcagaaaaatctaagagcccagaaaaagtgtcatcgttctcaaactcctcctccaacaaggaatcaaaagtaaacaatgagaagtttcgtactaagagccccaagcctgccgaaagcccccagtcagccactaagcagttggatcagcccactgctgcttatgagtattatgatgctggcaatcactggtgcaaagactgcaacaccatctgtgggaccatgtttgatttcttcactcatatgcacaataagaagcacacacagacactggatccctacaacagaccttgggcttcaaagacccagagtgaggccaagcaagatgccataaagcgcactgacaagataactgttcctgcaaaaggctctgagtttctggttcccatcagtggattttattgccagctctgtgaggaatttttgggggatccaatttctggggagcaacatgtgaagggtcaccaacacaatgagaaatacaagaaatatgtggatgaaaacccattatatgaggagcggcggaatctggaccgccaagctggcttggctgtggtcctagagacagaacggcgacggcagagtgagctaaagcgcaaacttagtgagaaaccaaaggaggagaagaaagaaaaaaaggcaaaggctgtgaaagaagtaaaggaggatgacaaggtctctgagaaattagaagaccaactctctgagggtaggaactcccctgaaaaagctgaaaataaaaggaacactggcatcaaactccagttaaaagaagaggtaaagaaggaatcaccaacatcatcttcttttgggaaattcagctggaagaagccagaaaaagaagaggagaaaagttcattggtgaccccaagtatctctaaagaagagattctagaaagtagtaaggacaaagaggatggcaaaactgaagctgggaaggcaaagcctatcaaaatcaagctctctgggaaaactgttgttgcacataccagcccttggatgcctgttgtgacaacttccacacagactaagatccgacccaacctgcctattccatccacagtactccgcaagtcatgttcagccacaatgagcaagccagctcctcttaacacctttctgtctattaagtcctctggaaccactgctaaacctctgccagtggttaaagagtcttcagctgatctcctcttacctccagacatcatctccaaagcatttggaggggaagaggtgattctaaaagggtctccagaggaaaaagtggtgttggctgaaaagagtgagccatctcatttacctgaacaaatactaccacctcctccaccacccccacctccaccacctccaccaccccccgttatacctcatccagctgccccgtctgctgctcaagcaaatgctatcttggctccagtaaaatcaaacccagttgtatctcagactctcagccctggcttcgtgggtcctaacattttgaacccagtgttgcctgtagccatcatggcctcagcacagccagctgccattccttctgatgagacagctcctggggtgagtgagagtgaccgagaccagaccctgttctctgtgttagtacgtcctccaccacccctctcaagtgtgttcagtgaacaagccaaaaaattagagaagcgaaattcatgcttagccacagccaatgctaaggacctgtatgacatattctatagtagtggtggaaagggggcccctgagactaagggggcccctgagactaagctaagtggtggtccattggccaatggggaaaatagcaacctctctagaaccaaaagttcagacacctcttctacttctcctttgaacagcagtgcatcccaagaggagttgcatcaagatgagggtttggtcgctgctcctatagttagcaactctgaaaagcccattgcaaaaactctggtggccctagggaaatggtcagttgtagaacatgtaggcccaaaaagcacaggcagcacctatggcttcctacagcctctgacaaggttgtgccaaagcaggccttatgaaacaattaccccaaagacagacactttggccatatggacctctagttccttccagagtgacactagtagggatatatctccagagaagagtgagcttgacctgggagagccaggaccacctggtgtagaaccacctcctcaactgttagatatacagtgcaaagaatctcagaagttggtagaaatccacctcagagaatctgttaaccaggataaggaaagccaagagctccgtaaatctgaggattgtagagaaagtgagatagagacaaacactgaactaaaagaaagggtaaaggagctgtctgaggggatagttgatgagggagtaagtaccagcattggaccccacagcatagatgattctaatttgaaccatggaaacagatacatgtgggagggagaagtaaaacagcccaacttgctaatgattgacaaagaggctgaacagtccaataaattgatgacaggaagtgaaactccaagtaaagtagtgatcaaattgagtccacaggcttgctctttcacaaaggcaaaattagactcatttttatcagaagctaggtctttactcaacccacaagatacacctgtgaaaatttctgccccagagttgctgcttcattccccagccagatcagctatgtgtttaacaggtagtccacaagagcaaggagtttcagttgttagtgaggaggggctagagaattcagctccagaatcagcttctagaacttctaggtacagaagtctcaaactcaagagagaaagatcaaaagactttcaagttaaaaagatctatgagttggctgtttgggatgaaaacaagaagaggccagagacctgggagagcccagagaaaccaaaaacagaagcactggagctacaagatgtccatccagagttaacagtgacaatagaaagcaaggccctagaagactttgaagctacagacttaaaggtagaggagcttactgccctggggaatctgggggatatgcctgttgatttctgcactactcgggtaagcccagcacatagatccccaactgtcttgtgtcagaaagtgtgtgaagaaaattctgtatcacctatagggtgtaattcctccgatcccgctgacttcgaaccaatcccatctttttctgggtttccgttagattctcccaaaaccttggtgcttgactttgagacagagggtgaacgaaactcacctaatcccaggagtgttaggatcccttctcctaacattttgaaaactggacttacagaaaatgttgaccgtggcttggggggcctagagggaacacaccaggcccttgacctgttagcaggaggaatgatgcctgaggaagtaaaagaatcttcccaattagacaaacaagagtcactcggattggaattaaaaacaattaattctgcaggccttgggccatctccttgccttccagaccttgttgactttgtcacacggacctctggagttcaaaaagataaactgtgttctccactctctgagccaggtgacccttctaaatgtagttccctggagttggggccattacagctagaaatatcgaatgcatccaccacagaggtggcaattctgcaagtagatgatgacagtggcgaccctctgaatttggttaaagctccagtgtcaaggtcccctccaagggagcaggtaattgaagacaatatggtccctcagggaatgcctgaacaggaaactacagttggtgccatccaggaccacacagaatccagtgttcacaactaagaataaatacctagagctacttgtgagtgaatcattggcttctagaaatcagatgcccagatgatccaagactagtttgttatctcatctggaacctacaccaagagatgcagtcagcatcttaaagtaaatgttcatggaagctaaaaaatttacctcctttccttttccctttccccttaaaacaccagacaaatcgataacaacttatatatatatatatatatctgtaaaaatgtattttgttaatttttttggccaatttattttctcccactttgtcattaaaatcacatgtctaactggctcaccacatagtgtgctttgattgtattttggctttgactctgccatttctgaaatgtgggggaggatggaggcagctgacctctccagttgctgtgttgtattcctacccaatttcctgggcagttgatgcatctctgggaaaaacaccagaaagcttgctgaaatggaaaacttggaagaattgttcatctcttaggcttccatttggatgggcctgccttaacattgtttgaaatgcagcgtgagtagctcttttgtttactgtttacaccccttattggcatgtcaactcctgtacttcccttactctgttgcctttcttgagatgcattgtcctgctaacccacaaacctgtttggaaataaacatggaagaatatctggcaggcttacttttagaagacgacaaatcggtaaggcttattcatggttcattgccaggagcagatatgcttttgagatcacttttatttttgaaatggcctttgttcattgtattgtgatccaataacactttgtattaaattgtttagcagccatttgtgttgtgaaggggtagaagatctctgaaacttgtcttgagattgaactcattccctgttccacaaacccatatgtatcctttcctctacctcctcctttcccaattaatttcaaccatagtacgatgtttggggttgtatattttgttaaaaagattaaagaatttatgagttggcttggacaagtttaactttatttttaatgtgttaattacttggaataaatgcattaatctca

SEQ ID NO: 1531 - DNA, 2755 bp, Homo sapiens
  source 1..2755: mol_type = genomic DNA
acaatcacttccgccgccgcagtcgccgcccgccccgctgctgtctggcgggggaggagctcgggaccgggagcagcggctctggcggtcgtggcggtcggagatccgagagctctgcttctctgaaaagcgtgtggctttctggacttggtctacacctgacagtcactggaatgctactccaggccttagaagaaagtgaaactaattttaaaggccccttattctttctgttacctgcctgctgaagtgaaaataaatctccctgctcctttattctaaactgattttactttcccatctcaaaaacgtgtgcagggagcaggagccctcctacccgagccccagctgtattggaaaccctcctaagtcagagtgatgggtcaggaatctagcaagcctgtatggcccaatccaacaggagggtatcagtccaatacaggtaggaggtatggaagaaggcatgcttatgtcagtttcaggccacccacgagccagcgggaaaggattgccagccagagaaagacgaactccgaagtcccaatgcacagatcagcccccagtcaaaccaccaagaggagccgatcgccattttccactactcgtcgtagttgggacgacagcgagagttcgggaaccaacctgaatattgataatgaggactattccaggtatccgccaagagagtacagagcttcgggtagcagaagaggaatggcctatggacatattgactcttatggggcagatgatagtgaggaggagggggctgggcctgttgagcgaccgccagtgagagggaaaactggcaagtttaaagatgataagctgtatgacccagagaaaggggcaaggtctttggctgggccacctccacatttctctagttttagccgtgatgtgagagaggagcgagacaagttagacccagtccctgcagcaagatgctcagctagcagagctgacttcctgccacaaagtagtgtggcctcacagtcgtcttctgaaggcaagctggctacaaaaggtgacagctcggagagggagagaagggagcaaaatttacctgcacgtcccagcagggctcctgtgagtatttgtggtggtggggaaaacacctcaaagagtgcagaggaacctgtggtcaggcccaaaatcagaaacctggcaagtccaaactgcgtgaaaccaaaaattttttttgatactgatgatgatgacgatatgccacacagtacttccaggtggagggataccgccaatgacaatgagggccactcggatggcctggcaagaagagggagaggcgagagttcaagtggctatcccgagccaaagtaccctgaagacaaacgggaagcgaggagtgaccaagtgaaaccagaaaaggtgccgagacgacgacgcaccatggccgaccctgacttctggacgcacagtgatgattactacaaatactgcgacgaagactctgacagtgacaaagagtggattgctgctctgcgtcggaaatatcgaagccgagagcaaaccctgtcctccagtggcgaaagctgggagactctgccggggaaagaagagcgggaacctccacaggctaaggtgagtgccagcactggcaccagccctggccccggtgctagtgccagtgccggggctggcgccggggccagtgctggcagcaatggcagcaattaccttgaagaagttcgagaaccatctcttcaggaagagcaggcatccctggaagaaggagaaattccttggctccagtaccatgagaatgacagtagcagtgagggggataatgattctggtcacgagttgatgcaacctggggtattcatgctggatggaaacaacaaccttgaagatgactccagtgtgagcgaagacctagaagtggattggagcctctttgatggatttgcagatgggttaggagtggctgaagccatttcctatgtggaccctcagttcctcacctacatggcacttgaagaacgcctggcccaggcaatggaaactgcccttgcgcacttggagtctctcgcagtggatgtagaggtggccaatccaccagcaagcaaggagagcattgacgctcttcccgagatcctggtcactgaagatcatggcgcagttggtcaggagatgtgctgccccatctgctgtagcgaatatgtgaagggggaggtggcaactgagctgccgtgccaccactatttccacaagccgtgtgtgtccatctggcttcagaagtcaggcacctgccccgtgtgccgctgcatgttccctcccccactctaaagaccaaggccgtttactcctggtctgattattttccccatctgaaatccacaatactgcaggagccctcttgaaattaacaatggaaataaaaccaatcagtcagttagcctaaacctattgattcctcgtgattatttccaatgtgaaaacagttgtgtatgattgcattaaaaatcatatcatcttttagaggttagaaaagggaaaactaaactttctaaatgctacttgagattgcagtaagaagatacgttttctaacctgaaagttaaatcgcatttgttttcttcagtagaatgggaatgtgttgctgttacttgtaatgtcaagtttatctgttaaatatgtccaaaaggcaaaatcatttttgttgcatgttatgggtcgatgttcctgtaattgcagtgccgtaaaagcttattaaagttgttcttttggtttt

SEQ ID NO: 1532 - DNA, 3438 bp, Homo sapiens
  source 1..3438: mol_type = genomic DNA
actcggtgcagaccgaaccatcgcggccgccgccagccgggcccttcgcggccgcgcgtcctgggcccgttccgccagccccgtctgctctctacccgcggccccgcggcggcgaccgtgaacactcggcggcccctacagcccgctctcggcccttcgtccctcgcgggccccgactctccctccttgcagtcccccggagcctggctcccggctcgggccgcaccgccagggactggggtgagcggcccagaaatctccaaattggacatccagagcagcattcttgttctgtctacgtcttgaattagaaactatcaagctctgtaagtcctgaaaaggaaataaaaggtgcgtccctacccaagaggagaggtggccagtaaatgtcagctgaggcaccgaaggctgcgatgcaccagcccggtgccctgtgaggacggccacatcaatagtggtaacactcacaatttcctgctgcagagagcattttaagaaaggacagcattcctgtgacctctgcctaccatccataaaatactcattcccctctcagctctgcctgcagttgaacacaaagacctggaggagactcccacctccttcagggagaagaaaggaggcagcgaagcagattaaaggaacttgtggcttgtggcctttttgtgcaagggccgcctggaaggggagaaaagtgtatgaaagccaccgtggcggttaatgagctgtgagatgaggcgctgctgcggccgctgctgctgacactcgctcccaggctgcacccgccgcccttggcgcttcatgtacatgtgtctattcaggccttgcggaggcgcccagaagagcatccaacacggctgccggggaaagaccgcccaccatgcccacggagaccctacagacaggtagcatggtgaagccggtcagccccgcgggcaccttcacctctgctgtgcccctgcgcatcctgaacaaggggccagactacttccgcaggcaggccgagcccaaccccaagaggctcagcgccgtggagaggctggaggccgacaaggccaagtacgtcaagagccaggaggtgatcaacgccaagcaggagcccgtgaagcccgccgtgctggccaagcccccggtgtgcccggctgccaagcgcgcactgggcagccccacgctcaaagtgttcggcaaccacgccaagaccgagagcggcgtgcagagggagaacctgaagctggagatcctgaagaacatcatcaatagctccgagggctctagctcgggctcggggcacaagcacagctcccgcaactggccgccccaccggtcggaagccactgacctgcaccgtcactccttcgcggagtccctgaaggtctaccccacgcagggccgcaggagcccgcaggagggcggctcccacgtgggcaggagactgctggagcagtcagccgagtccttcctccacgtgtcccacagctcttcggacatccgcaaggtgaccagcgtgaagcccctcaaggccatcccctgcagtagctctgcccctcccctgcctcccaagcccaaaatcgcagccatcgcctccatgaagtcccccgaggccgaccctgtggaaccagcttgtggagtcagccgaagaccctccctccagcggtctaagtcagacttgagtgacagatatttccgagtggacgcggacgtggagaggttcttcaactactgtggactggacccggaagagctggaaaacctgggaatggaaaactttgcaagggctaattctgacataatatccctcaacttccgcagcgcaagcatgatcagctcagactgtgaacagtctcaggacagtaacagtgaccttagaaatgatgacagtgccaatgaccgcgtgccgtatggcatttctgccatcgaaagaaatgctagaatcatcaagtggttatatagcatcaaacaagctagagagtcacagaaggtctcccatgtgtaagacagtgcgtggaaaggagggagcgtgggtctctgtgcttacgcagttgtgaaggttgtgaggtctccttgaagtgttgtgagcttctccactctttgtgttgcttgttgtgcaatgttttcaagttgcatgcttgtcaacatggggactgacctggcttccacgtcaccatcgctacagagcctggctgaacacgcgtcatctgccaaaagtttcaggccagaatctaattagggctttgctcgtaagcaaaactgtttacatgaaaatggtatacaacttcttcgatatttatgtggttcttgtgtttttatatcccgcgctattgtgtcttaattaaaagttttatcaactggcttttaagttgagagcagaatctttttgaaataaaaagccactttgcctacatgtgagactattccagtgggacagtaaatgggatctgctaccaaacagataatgactgaccgaacatagaaccaggctgggttttctgtggaataaagtggtgagcctgacgttaatcgtttacatgttgaaattctcttgccacttagtgaagcagtcattggggtaacaatgctacgttttgtgtccgattcagtgtgtaaacgttggtggttctatgtaatactgaccccaaggaaagacgatcagatacaaagaaagatggttaaatctaggaggttgggtgtttgggggttttgttgatgttgttctgattgggataattcagaaattcctaatattatctttcgacagaatgaccaccctaaaacaaatactgaatgcctttaaaaaaaaaaaaagttgtggttttttgttttttttttttttttttttggtcgagaactactaatttcatgctatttctttctctctccctttgttgttatttgatttgggggaagggagtgaggcttgtgcagatttgagctatctgaagacatgaacagaagtcaaataccagccatatcagtagagccttccattcaaaagtgaacacacttggtagctgaaccatatctgagcagcgtgattctgttgtcttgcatatgttattctctcaggctgtggatctttgttacagctctaggaaactgtagaaatacaatgctatgtagcttttccaccccatggtctctagtgctgcctatcaacttgtccccttttttcccaataacctgtcttccaggtggtacagttagctgtcactcagctgacaccatgatgtggcagcagagagggaaacctacaagtggtttgcctcattgcctttgccacatctgaagttctcagcagcactaccttagacttcatgagctaataggaaactttttatggtgtaaatgctgtaagactttgtacatacttcagttgttatgaaatctttaaagaaaaaaagaaaaagttacgctaataaattgctgtggtgcaggcactaa

SEQ ID NO: 1533 - DNA, 11435 bp, Homo sapiens
  source 1..11435: mol_type = genomic DNA
gccgcgcgcgggggccgtcattcggtggcgggtcccggccgcggggctggcgggctgaggggagaaaagatggcggcggcggcggcagctggtgcggcctccgggctgccgggtccagtggcacaaggattaaaggaagcgttagtggatacgctcaccgggatcctatccccagtacaggaggtgcgggcggctgctgaagaacagattaaggtgctggaggtgacggaggaatttggtgttcacttggcagaactgactgtagatccccagggggcactggcaatccgtcagctggcatcagtcatcttgaaacaatatgtggagactcactggtgtgcccaatcagagaaatttaggcctcctgaaactacagaaagggcaaaaattgttatccgggagctattgcctaatgggttgagagaatcgataagcaaagtgcgctccagtgtggcctatgcagtgtcagccattgcccactgggactggcctgaagcttggccccaactcttcaacctgctcatggagatgttggtgagcggagacttaaatgccgtccatggagccatgcgtgtgctgacagaattcactcgtgaagtaacagacacacagatgccacttgttgctcctgtcattctcccagagatgtataagatcttcaccatggctgaggtgtatggtattcgaacccgttcccgagccgtggagatttttaccacttgtgcccatatgatctgtaacatggaggagctggaaaagggtgcagccaaagtcctgatctttcccgtggtacagcagttcacagaggcctttgttcaggccctccagataccagatggccccacatctgacagtgggtttaagatggaggtcctaaaggcagtgacagccctagtgaaaaacttcccaaagcacatggtgtcctccatgcagcagattctgcctattgtttggaacaccctaaccgagagtgcagctttttatgtgaggacagaagtaaattacacagaagaagtagaagatcctgtggattctgatggtgaagtcctgggctttgaaaatctcgtctttagcatttttgaatttgtccatgctctactagaaaatagcaaattcaaaagcactgttaagaaagccttgcctgaattgatttattatattatcctgtacatgcaaatcactgaggagcagattaaagtatggacagccaacccccaacaatttgtagaagatgaagatgatgatacattctcctatactgttagaatagcagctcaagacttgttgctggctgtggccacagatttccagaatgaaagtgcagcagccctggctgctgcagccactcgacatttacaagaagctgagcaaaccaaaaacagtggcactgagcactggtggaagatccatgaggcatgcatgcttgccctaggctcagtgaaggccatcatcactgacagtgtgaaaaatggcaggattcattttgacatgcatgggttcctgaccaatgtcatccttgcagacctcaacctctcagtgtctcctttcctcttgggccgggcactttgggctgccagtcggttcactgttgctatgtcccctgaactgatccagcagttcctacaggcaacagttagtggtcttcacgagacacagcccccatcagttcgaatttctgcagtgagagccatctggggttattgtgaccaactgaaagtctcagagagtacccacgtgctccagcccttcctccccagcatccttgatggcttaattcacctagcagcccagttcagctcagaggtcctcaacctggtgatggagaccctgtgcatcgtttgtacagtagaccccgaattcacagcaagcatggaaagcaaaatctgccccttcaccatcgccattttcctaaagtacagtaatgatcccgtcgtcgcctcactggctcaggacatcttcaaggagctgtcccagattgaagcctgtcagggcccaatgcaaatgaggctgattcccactctggtcagcataatgcaggccccagcagacaagattcctgcagggctttgtgcgacagccattgatatcctgacaacagtagtacgaaatacaaagcctcccctttcccagcttctcatctgccaagctttccctgctgtggcacagtgtacccttcacacagatgacaatgccaccatgcagaatggcggagagtgcttgcgggcctatgtgtcagtgaccctggaacaagtagcccagtggcatgatgagcagggccacaatggactgtggtatgtgatgcaagtggtgagccagctcctggacccccgcacctcagagttcactgcggcctttgtgggccgccttgtttccaccctcatctccaaggcagggcgggaactcggggagaatctagaccagattcttcgtgccatcctcagtaagatgcagcaggcagagacgctcagtgtcatgcagtccctgatcatggtgttcgctcatctggtgcacactcagctagaacctctcttggagttcctgtgtagcctcccaggacctactggcaaacctgctctagagtttgtgatggctgagtggacaagccgacagcacctgttctatggacagtatgaaggcaaagtcagctctgtggcactctgtaagctgctccagcatggcatcaatgcagatgacaaacggctacaggatatccgtgtgaagggagaggagatctacagcatggatgagggcatccgcacccgctctaagtcagccaaaaacccagaacgctggacaaacattcctttgctggtcaagatcctaaagctgatcatcaacgagctctccaacgtcatggaggctaatgccgctcgccaggccactcctgcagagtggagtcaagatgactccaatgatatgtgggaggaccaggaggaggaagaggaggaggaggaggatggtttagctggccaacttttatctgacattcttgctacaagtaaatatgaggaggattactacgaggatgatgaggaagatgaccctgatgccctgaaggatcctctctatcagattgatctgcaggcatatctcacagatttcctctgccagtttgctcagcagccctgctacataatgttttcaggccaccttaatgacaatgagaggcgagttctacagaccatcggcatctaaaaaggggagcctttctacatttgctccttctgggccagccgcaaaccattttgcagccctcactggccttgagatgcactttcttctcaacctaaagtggcatcttgacccttggcccttggcctcggcagtgacactgatgacaattcagaccaggctcaccggtgccgtcacttaggaatgctggaacaaaggacatttctcaaagttcccctgaagacatgccatctctagaaccttttttctccccgactctacccccacctctgttcctagagccctctgctggcgagtccagaaacattattgcccagaaggattatgtgtttatggattattttgccccgcctcaggagcgcaggaagtcactaccatttatattctaaaacagacctatctatgttcataggacttctgatgtgttcagataggaatcctcatgagagatcattatgctttgtgccctggaccactgctgctctgggttctcaggaggaacaggcaagagcagcttcattctaagcctttccagtgacctcagccttgcttctcttctacaacactaaggctcctctgtcagaggaggtcgtcttgtttttgcttcattgcatgacataacccttcccctcaagctgttcctatatatacatgcacacacaaaataagccagacagatggcaatttgatcttccttttttagaaaaaaaaaaaaaaatggggaaaagggattttttttaaatccacctgacccaactatatttaatatgcctctcccacacattaccacagagtctgatattcaaaggttatcccctttccctcaggaagcctctaaagtgcttaagttgtagccctcaaatttgcaacatgtatttttctaggacagtaaagtaatctttacaaatgaatttagttgcatggtataaggtgtctcagcacctgtttgccttctattccctttagaaggtaagtaaaagtaatgggggaaaggattaggtggagcctgtctaaacattctagtgtgtcttggcaaacatagcctgaaatgattcttaaagaactggcattgtttaatcaaatatttttaagggagattccttaattgggaagtttagtctgtttggggttcaaagagtaaatgaggattagaaaatcatggagagaggctgggcgcggtggctaacgcctgtaatcctagcactttgggaggctgagatgggcggatcacttgagatcaggagtttgaggctagcctggccaacacagtgaaacctgcatttctactaaaaatacaaaaattagctgggcatggtggtgcatgcctgtaatcccagttaacttgagatgctgaggcaggagaatcgcttgaacttgggaagcagaggttgcagtgaaccgatatcacaccgttgcattccaaggcaagactcaatcacacacacacacacacacacacacaaatcatggggagaaagatgaaacctgtgttcccctttttttggtagtgcccacatctggtgccccatttttaataaccacaggatatttctttagattgatattctcacaaagaagaaatagaatataggctgggcgtggtgtgtcacacctgtaatcccagcacttacggaggccgaagccagcggatcaccagaggtcaggagttcgagaccagcctgaccaacatgatgaaaccctgtctctactaaaaatacaaaaattagccaggcatggtggcatgcacttgtaatcccagctactcgggaggctgagacaggagaatcgcttgaacctgggaggcagaggttgcagtaagccaagatcgcaccattgcactacagcctgggcaacaagaggagcgaaactctgtctcaaaaaaaaaaaagagaaagaatataaagtgaatctgaatctccactcaaggggatggccccaaggatattgtagctggtaatttcttcatgccactaggtgtccccagtgttcaacctccatgactgagattggaagaagtagagttaaaagtttttactacctttgagaagcctgcgggcatgttcacagtcgtcccatgccagccaggttctgaggctaactgcttgtgcccctgctgcttcacatggcattgtgggagttgctgatactggggaaatgatggcagatctgaccaagtggtgctgagaaaaccaccctcggccttgcagactccatagtttatctcaaggcagtgccagtcggatttggtgctaaaggcataaggccaagtcagcctctgatattggcacaaaagaatggtctcatgccagtagcattgaactgctgagcttgggaaggcttaaggctcccacacacagactgagaatgatgggggtccctctgcgtctgctaattagacaaacattctatatctagtgccaaaagtggtcctaaatcctttggcaagggtcctttctgctctcatgctgatttgggggaggactgggcatcctgcctcaggagaacttgagtcctgaggaaagggccctagtaacacttaagggctacccctggctaacagatactcggctgtgggtgagagcagaaggtcttggacccctcgatgtgcaggtacttaattgtgtttccagtgcattttcatatacattatcccatttaacctttataacaggttcacagagtggatattcccattctgttgatgagaaaaagagtggagagactgtgtccagtgtcagcaggaagaaaaaagatctgttggaggccagtacatgttgacagaaactctagaccatattttgtctcctgtctttggccaaagagaactagcttcagtctgaaaagggcagggctaagtggttacaaggaactaaaaagttcaaggtaagacaaatgaggtaaaaataaaaaagagcacttagctgctctgagacattttagtctcctgactggtaaacagcagctggggcaccaaggggctcccaggagtttgtcgagcttttattggagtgaactgaaaggaaaatggaaggaatgctataagactgaaaagaagttaaagccctaggaaggaagctgataacacaagttacagacgtatatgtgacattgatttgggagaatgaacctacaacaaatgacccaaaagcacctaaataagagtgacgagagtttaacagacattcattatggacttcagagaaaatgatgctaaactggtcttagaatcttctttaattttgttaactaggtaaataatctggacattttagtcaaagcattagacagacagagaagttggtaactgaccactaactaacaaactataaattcacccattgtgggttgacctggtaagttcccccagggctgtgtccttggcccctcctttgatattagtgacagatgactttttttatgccttacccattccacaaaagaatttgaagccatttacacaagagatagtactagtaaattaggagtgctgatcaaatttttagataataagaaacccttaggaaggatgacaatttagaatccaaatttaggatccaaacaaataccattacaaactataaaaatgagcagaatctaaatgtaacatttcaataaatgcagattgataataacatctgtgcagagttgaggactatagagtactgtgctgtcactaacagtattgtgtgctactaagagtttaatggctgggtgtggtggctcacacctgtaatcccaacactttgggaggcctaggtgggtaaatcagctgagatcaggagttcgagaccagcctggccaatgtggtgaaaccccgcctctactaaaaataaaaaaattagctgggcatggtggcacgtgcctgtaatcccagctactcgggaggctgaggcgggagaatcacttgaacctgggagacagaggttgcagtgagtcgagatcacaccattgcactccagcctgggcaacagagcaagattctgtctcaaaaaataaagtttattatgccaggagggccaggtgtggtgccacacccatgtaatcccagcactttaggaggctgaggagggcagatcacttaagcccaagagtttgagaccagtctgggcaatgtggcaataccttgtctcttaaaatttaaaataaaaaaaaagtttattatgccaggaactgttaatgtgtccaaaaaaactccagtgtggttctaggatgagataataaaaacaggttgtctagggtagtgtggaaggtcctttcagtcttcctgtgcctatcagtgatcctcattgccatgttcccttctggtgctcaaccggaggctccctgacagatgagtcctctgccagaggaaggctaagatgtagaggacaaatcgtgtcaaggaaaagaagcttgaaggagctaagaatgcttagcttagagaagacaagaggaaacaggacatggctttgggaagttcaaggatggtccagtgaaatacatactatacttttgcaccccagctaagctgacccatgatcagtaagtaggaaataaaaggccaatttctggctactcttgcccccaaccccatttcagtgaactatgaacctctattagatatgcaaggccggtgctaaatgctggagggctttggccctttccctcaaggagctagtctagtagggggtcagaaatacagatgggcctgaacataatgatggtttgacttccagtttttcaactttaggattgtgcaaaagctatacacattcggtagaaacagtacttcaagtatccatacaatcagtacagtattcaataaattacatgagacattcaacactttattataaaataggctttgtgttagatgagtttgcccaactgtaagctaatgtaagtgatctgagtaggtttaaggtagcctaggtgtattaaatgcatttttcacttaacggtattttcaacttttgttgggtttattgggatgtagccccattataagctgaaaagcatctgtagtataataaatgtggggagtgctgtgagagaaataagtgtactgggtttagttcccactgcccaaaaaaggaactggctaatggtaacctgggggaggaagtcgggtaagttgcatggagaaggcaacccttgaacacttgcaaggagctaacaatacctgcttctggagtatttaaacgccagtgggtatgctaaatacttttacctcagaccacctactaaccttacaaagtagtccactttgctcacccagttttacagattgatgaaactgaagcagacagatattgttaacctatcaaaggtcaccctgcaagtgtgtgattatagtccaagcagcttgtacttgttgcctatttgttttgcctttcctgtgcatttgccaggcagatgagagtggggtaagacattgcagagaaaaagtaagaaaaggccgtcatgaaacaatttcattttcagaccttataagcacgttacaagtactgatatttatgcttaagttcacgggagtcctggccagaaataaagctggaaggacaagtggggggcagattgtgaaggatccttcaagacctgcttcctctagagaatgggagactacccaagataactaaacagggaagtgatcaggttttgtgtcttagaaaagtgttgcagtgttgatgcaaatgtgactagaagggtgacttggaacctggattgaaggggtgggagatgggagaaaggaatgcagtctggcagcagctacagcagtccaggtgggaaaacccagagcctgaactaaggttgtaactagaggggatagggtggaagagctggattagagatgttgacaagataaagtcagtaggacttaaagactgacaagtaaggattttccaaaagtgagagctgtggaatgaattgtcttaaaatgttgcagtgagttcctcctcatcaatccaagtgctcgatcagaggctagacctttagttagcagtcacgggaaaattccccattctcacggggatttagactaggtcttaaccatactttaccaagattccagtagcaaagcacccaaaagtaatcgcaataaaattccaatttttgtaggccgggcatagtggctcacacctgtaatcccagcactttgggaggccgaggcaggcggaccacgacatcaagagttcaagagcagcctggccagcatggtgaaaccccgtctctactaaaaatacaaaaaaattagctgggcatggtggcgcatgcctataatcctagctactcaggcagctgaagcaggagaattgcttgaacccgggaggcagaggttgcagtgagccaagatcatgccactacactccagcctgggcgacagagcgacactctgcctcaaaaaaaaaaaaaaacaaaaaaaaaaacaagttttgtgaatttaagtttccctaatggatggtacaggtcaacatttgccatctaatgacacttacattccagttttttccttttttgagtaactgggaaaagggtggcattactgctggcttcctaaaattgaaaagtatactagggtttttaaacctgtgtagaatacatgatatggtagcaaatgtgctgtaggaagaaaagcaatgaggaactactggcctgactaggaggcctagaagtccctcccaggcttgagttgttctgacttggcatgattacatagctgcggcaagtgacgtttccttcaagccttggttccctcatctgtaaaatagggaactaatacctacctcacaggattgtagttagaattaaggatgacttcattaaagcacctctagtggtggaagatgtcccatcctatcccccacccatagctgggagctatgtttggctcattcttcctgactcactggattacactgtgactcagttcaatttcacacatgctgctgctaaattagggtcttggtgagcctttgggaggacagctctgaggaatgaattgtagcactgcagccctgcctgaggaacatgatagaaacaggtggtaggcccagctcttgccttccacctactaagcagtttttctgtggttagctgtgtgacataaactatcggtgtattaatttgctttcactagattcccccccccccaacaacttagtccaagaacatacctgaattctttgcatttccttgccttagttgcttttgtagggtggacagcaggactgcatgagaatagctgtgcttctggaccctatggtgaaagctctagtgaactgcaattaggcccagggtcccggaggaagaaggggagagaaaaaggggggtagttttccaaaagataagtaggggacaaaaaagtccacggggcctatgagcggtgagactcctgccctgattgtggcaaagcacctggagatgatagaacttcctagggaaaaggctgcatggagtccccagggatgctgggccctggtcaccaaggctccctgggaaggtctcttgtacctggggcacacagaccaacacttctgaatttgcaagcttaagagcatgtatgagcagaacctgtgcagaccaaggcttagagggctcacctcaatgttttgcactgtgtgagaccccaggaccttttcgtgattctggagaggggaacaaaccataataacaacaaaccaggtagcaggatagagactcattctcatctattttggttaaaagaaaataaatgtatttcttccacacctgattttgtgattgcaaattcataactaatatccctcgtcagctccgctgactcatccctgccacagggaggttcacagcaagagcacagaaactagggccagtgcccggttgtgtgaccttgagtaagttctttttcccttgaacagggagagagacacaatggatcagagtgtctctgccagttctaacttggggattctagtgggttgaaccgaacggtagtccgtttccaaaagaggaagccaagaccagagggggagtggttccttcaagtttgcagaaccagtaagtggcagagcaggactcatatctagttagtggttcagagcatgggctccggagctagactgcctggatttgaaccctggctttgccacttgcctgttgggtgactttggacaagctgcttaaattatgtctccatttcctaatccacagaacaagtgtaatactagttatctgtttcatggagtgattgtgaggattaaataaagttaatataacacaaagca

SEQ ID NO: 1534 - DNA, 401 bp, Homo sapiens
  source 1..401: mol_type = genomic DNA
cttccgccagcttccctcctcttcctttctccgccatcgtggtgtgttcttgactccgctgctcgccatgtcttctcacaagactttcaggattaagcgattcctggccaagaaacaaaagcaaaatcgtcccattccccagtggattcggatgaaaactggaaataaaatcaggtacaactccaaaaggagacattggagaagaaccaagctgggtctataaggaattgcacatgagatggcacacatatttatgctgtctgaaggtcacgatcatgttaccatatcaagctgaaaatgtcaccactatctggagatttcgacgtgttttcctctctgaatctgttatgaacacgttggttggctggattcagtaataaatatgtaaggcctttcttttt

SEQ ID NO: 1535 - DNA, 5350 bp, Homo sapiens
  source 1..5350: mol_type = genomic DNA
ttctcgggagaggaatcggttaggagaagggggattcctcactcagctgtgcgctctgatttcgtgcgcttcctcgtccttcatgttggatggccagtttttcgtttgtgcgtcatcctctacctgagaaatggtcgcttgcccctagtctagacacgcattaaagggcagtatttaaagtcagttggcaagcagtggaataagatttttgtaaagaaaccttgtgcagcatggattctctaccagatgaattttttgtgaggcatcctgctgtggaggatcagaggaaggaagaaactgagaataagctagaaaaatcatctggtcaactgaacaaacaggaaaatgacatacctactgatcttgtccctgttaacctactattagaagtgaagaagttattaaatgcaattaatactctaccaaaaggtgtggttcctcacattaagaagttcttacaagaagatttttccttccaaactatgcagagagaagttgcagctaacagccagaatggtgaggaaattgttcctgctttgactttacgtttcttgattacacagctagaagcagcacttaggaacattcaagctggcaattataccgcacaccagattaatattggttattatttgacattactgtttttatatggagtagcactcactgaaagaggaaagaaagaggattatacagaagctgagaataaatttctggtgatgaagatgatgatccaagaaaatgaaatttgtgaaaactttatgtctttagtttattttggacgtggtttactgcgatgtgctcaaaagagatataatggaggactgctagaatttcataaaagcttacaagaaattggagacaaaaatgaccattggtttgacatagatcctacagaagatgaagatttacctacaacttttaaagatcttcttaataattttatcaagacaactgaaagcaatataatgaagcagacgatttgtagttacctagattgtgaacgatcttgtgaagctgacattttgaagaacaccagttataagggattttttcagttaatgtgcagtaaaagttgctgtgtttatttccataaaatttgctggaaaaagttcaagaatttaaagtatccaggtgaaaatgatcagagttttagtgggaaaaaatgtttgaaggaaggatgtacaggtgacatggtaaggatgctgcaatgtgatgtacctggaattgttaaaattttgtttgaagttgtgagaaaggatgaatatatcaccattgaaaatttaggagcaagttatagaaagttgatatctctgaaaataactgatactgatataagaccgaagatcagtttaaaatttaatacaaaagatgaaatgcctatcttcaagcttgattataattatttctatcatctgcttcatataattattatttctggtactgacattgttcgacaaatatttgatgaggctatgccacctcctcttttgaaaaaagagcttcttatacacaagaatgtgctggaatcctactacaaccatctttggaccaatcatcctttgggtggatcatggcatctgctttatcctcctaacaaggagttaccgcaatccaaacagtttgacttatgcctcctgttagctcttataaaacatttaaatgtgttccctgcacccaaaaaaggatggaatatggaaccgccatcttctgacatctctaaatctgcagacatcctgagactgtgcaaatacagggatatcctccttagtgagattttgatgaatggtctcactgagtcacagttcaattcaatttggaaaaaagtttcagatattcttctgcgccttgggatgatgcaagaggatattgacaaagtgaaggagaatcccattgagaatatctcccttgattaccatcagctatctgtctacctaggcataccagtaccagaaatcatacagaggatgttatcctgctatcaacaaggaattgctctacagtcaataacaggcagtcagcgtattgaaatagaagagttacagaatgaggaagaagaactaagtccacctctcatggagtacaatataaatgtgaaatcacaccctgagatacagtttgcagaaattaataaagatgggacctcaatacccagtgaatcttcaacagaatctcttaaagatctccaggaagttaagagtaaacaaaggaaaaagaagaagactaagaataaaaagaataaagactcaaaagaagaccaagtcccatatgtggtagaaaaggaagagcagttgaggaaagaacaagcaaatccacactcagtcagtagacttataaaagatgatgcaagtgatgttcaagaggattctgcaatggaagacaagttctatagcctggatgaattgcatattctggacatgatagagcagggctcagctggcaaagtaactacagactatggagaaactgaaaaggaaaggcttgctcgtcaaaggcagctttataaattgcactatcagtgtgaagatttcaaaagacagttgagaacagtgacttttcggtggcaagaaaaccaaatgcagattaaaaagaaagacaaaattatcgcatctcttaatcaacaagttgcttttggaatcaataaggtttccaaattacagcgtcaaatccatgctaaagataatgaaatcaagaaccttaaagagcaactttctatgaaaagatctcagtgggaaatggaaaaacataatctggaaagcacaatgaaaacatacgtaagcaaactgaacgcagaaactagcagagctttaacagccgaggtgtatttcttacagtgtcgtagggattttggtttgcttcatctagagcagactgaaaaggaatgtctcaatcagcttgccagggtgactcacatggcagcaagcaacctagaatcacttcaattaaaggctgcggtagacagttggaatgccattgtggcagatgttagaaacaagattgcattcctcaggacacagtacaatgaacaaataaacaaagtcaagcaaggatttgccttgagtaccttgcctccagtccagcttcctcctccaccacccagtcctgagatactgatgcagcagttcttaggaagacctcttgtgaaagaatctttctttagacccatacttactgttcctcaaatgcctgcagtttgcccgggagtcgtctctgcaactggccaacctagagcccccctgatgactggcatagcctgggctctgccagcgcctgtgggagacgctgtgcctcccagtgcaggtctgcggagtgatccctccatcatgaattgggagagaattacagacaggctgaaaactgcctttccacagcaaaccagaaaggaacttacagatttcttacggaaattgaaggatgcttatggaaaatccttgtctgaactgacatttgatgaaattgtttgcaagatttcccagtttattgaccccaaaaagtctcagagtcaaggaaaatcagtgtcaaatgttaattgtgtttcacctagtcattctccatcacagcctgatgctgcccagcccccaaaaccagcctggaggccactcacttcacagggtcctgccacatgggaaggagccagtaatccagatgaggaagaggaagaagaagagccttgtgtgatctgtcatgagaatctgtctccagaaaatctttcagttttgccttgcgctcacaaattccatgctcagtgcattagaccatggttgatgcaacaggggacatgtccaacgtgcagactccacgttttgctaccagaagaattccctggtcaccccagccggcagttgcccaagatctgatacaaggtacccatgaagagattatgaactacttgaaggtggagactgtacggtggtgtgttggagctggcttgtaatgtcttatgagtgacaatcgttagtttgaggaattttgtgagacagttgtcaaattgttgctagcttgaaatctgcggcaattggagtatttacaccatagaaatgctataagtgaagacctacctttcccttaagagctagttgttaaacctttaccagcataccactggaccttgtctaaaatttctttgtgttcccagtgtcttgcccagtagatacaagataaatattgccagaatcagatatcaggaagtagtaagaaaaggagttaatatgcaaactaaatcactcgctcaattgaataattgagatcttctgttcatttgttccttggaccttaatcatttgcattttggagaaaattttttctgctttaaaagtctgtaatttcagtttttgtgtcggggagagggaaaaactatttgtctgtagttgctttttgtgacaaagtgaatacccactgggctaagtttcatatctaaagcttgtcactaagaattttcatttttaggggtcaaaaacctattttgaaaatagtgttgtgtgaatgctgtaagtgttgtacatgtctctggtttcagaattaaaagaattcagagttaccttgtgagataaatgttctttgcttcatattcacagtttcacctccatttaaatttatggggaagaataaatgtttcctgactcagaaacaattttgcctccatatttcagtgcaaatatattttgaagttacttttaaatatttatttaaaacctctgtttctgtaactgtatgttaaacgtattcttctgtaatgagaatagactggaacatgtgagggaaaaatatttaaaaaaagatggcagtcatctagacatgtaaaatgccaagaatgtcttagaattgcacaatttagaatttatagagcctttaatcaccttgtctagcaccttgtattagtccattttcatgctgctgataaagacatacctgagattgggcaatttacaaaagaaagaggtttaacggacttacagttccacatgactaaggaggcctcacaatcatggtggaaggcaaagaggagcaagtcacatcttacatggatggcagcagacaaggagagagagcttgtgcagggaaactcccatttttaaaaccatcagatctcatgaggcttactatcacgagaacagcatgggaaagacctgcccccgtgattaaattatttcccaccaggcccctcccacaacatggaataatgggagatacaagatatttgggtggagacacagagccaaaccatatcacaccttaaggtcatggtcatatagctagttatcttgtaaaaccaatgtttcttagttcatacttacaactgcaatttcactttcatttagaaaagaataaatgtttcttaattgaacaacta

SEQ ID NO: 1536 - DNA, 1710 bp, Homo sapiens
  source 1..1710: mol_type = genomic DNA
ttcttttctttcaacactttaaccatgtcactccatggggacgctgtcttgagcctttggtaagcctcattctccaggaccacacggcaggcgcgacagccctaggtccaccccaccccgtaagcgctccctccgggaggagacagaaacccaggacagctccggggcaaggccgaggaaggagggacgacggggcagggaggcccgaagagtccccgccttttgggatagtcgccacccttggaccccctcacccttggggacgttgaggagtgttaaaatctccaagacgcgagtcaccggtacgaagccacagccatttcgctgcttgctcggtgcaagtgcagaaggtcctagtagccgagcgtggagtcgagctcgtgggcggcgtcgggcaccttcggccgcgccctcagctgcacccgccggtgggcggggcccgagcccgtctctaaagccacgaggccgcccgctccgagcctggtgcttccgaccgctgcgcgcggctcctgggctgtcacagtctcccgttgccgccgtcatgtcccggcagctgtcgcgggcccggccagccacggtgctgggcgccatggagatggggcgccgcatggacgcgcccaccagcgccgcagtcacgcgcgccttcctggagcgcggccacaccgagatagacacggccttcgtgtacagcgagggccagtccgagaccatccttggcggcctggggctccggctgggcggcagcgactgcagagtgaaaattgataccaaggccattccactgtttgggaactccctgaagcctgacagtctccggttccagctggagacgtcactgaagcggctgcagtgtccccgagtggacctcttctacctgcatatgccagaccacagcaccccggtggaagagacactgcgtgcctgccaccagctgcaccaggagggcaagttcgtggagcttggcctctccaactatgcagcctgggaagtggccgagatctgtaccctctgcaagagcaacggctggatcctgcccactgtgtaccagggcatgtacaatgccatcacccggcaggtggaaacggagctcttcccctgcctcaggcactttggactgaggttctatgccttcaaccctctggctgggggcctgctgaccggcaagtacaagtatgaggacaagaatgggaaacagcccgtgggccgcttctttgggaatacctgggcagagatgtacaggaatcgctactggaaggagcaccactttgagggcattgccctggtggagaaggccctgcaggccgcgtatggcgccagcgcccccagcatgacctcggccaccctccggtggatgtaccaccactcacagctgcagggtgcccacggggacgcggtcatcctgggcatgtccagcctggagcagctggagcagaacttggcagcggcagaggaagggcccctggagccggctgtcgtggacgcctttaatcaagcctggcatttggttactcacgaatgtcccaactacttccgctaggcccatcgtttctcaggctgcccaaggctcttctgtaacatcttttgttactcacattttctttaatttagaactgcctcagtaaattcttagggatggaagtatttggacaaaaacctaatagaagagtcaccaccaaatgaagaataaaactcccagggtgctgtgtgtta

SEQ ID NO: 1537 - DNA, 1686 bp, Homo sapiens
  source 1..1686: mol_type = genomic DNA
ggtacctgtaccccacgtagtcgccggttaccgatcggactaagttccagtggtgatttacaagtcaagttaaaatgtccccagaagtggccttgaaccgaatatctccaatgctctcccctttcatatctagcgtggtccggaatggaaaagtgggactggatgctacaaactgtttgaggataactgacttaaaatctggctgcacatcattgactcctgggcccaactgtgaccgatttaaactgcacataccatatgctggagagacattaaagtgggatatcattttcaatgcccaatacccagaactgcctcccgattttatctttggagaagatgctgaattcctgccagacccctcagctttgcagaatcttgcctcctggaatccttcaaatcctgaatgtctcttacttgtggtgaaggaacttgtgcaacaatatcaccaattccaatgtagccgcctccgggagagctcccgcctcatgtttgaataccagacattactggaggagccacagtatggagagaacatggaaatttatgctgggaaaaaaaacaactggactggtgaattttcagctcgtttccttttgaagctgcccgtagatttcagcaatatccccacataccttctcaaggatgtaaatgaagaccctggagaagatgtggccctcctctctgttagttttgaggacactgaagccacccaggtgtaccccaagctgtacttgtcacctcgaattgagcatgcacttggaggctcctcagctcttcatatcccagcttttccaggaggaggatgtctcattgattacgttcctcaagtatgccacctgctcaccaacaaggtgcagtacgtgattcaagggtatcacaaaagaagagagtatattgctgcttttctcagtcactttggcacaggtgtcgtggaatatgatgcagaaggctttacaaaactcactctgctgctgatgtggaaagatttttgttttcttgtacacattgacctgcctctgtttttccctcgagaccagccaactctcacatttcagtccgtttatcactttaccaacagtggacagctttactcccaggcccaaaaaaattatccgtacagccccagatgggatggaaatgaaatggccaaaagagcaaaaagagagagcaacagagatggggaggaatccagctctgcctgacatccaggcatcctctccaaattgcatagggcttatttcaaaacctttgtccctcagttccaggaggcagcatttgccaatggaaagctctaggaaacaccagtcttgagaggtggccagccagactgcctgtccacatgcgtgtcagcacatacagccgcttcctggaagccgcctggaatgtcttcacggcagcgttttgctcacacagcagcttttgcacgccccaggcagccccgactgctgaaatccaacttgagctggctggtggtccctggatcctagagcccttcacttcgggttactccctctttcttgcctctatttcttagttggaagaaataaactcacaaattatggtgcagtaattttccggggaaagtaaagcctcaggaatgcccacgcctttcttccaaagcctttgtctctgagacctcttaagttctaagattaaatgcccctcgctgttcttcctctgaaa

SEQ ID NO: 1538 - DNA, 4730 bp, Homo sapiens
  source 1..4730: mol_type = genomic DNA
gagaacggtggccggacggagagactgcgggtctgagggactggcgggcgggcgggccgagcggcgccgccgaggccgggctgggccgagcccaggagcgcccgggatgtagcgggccaccctgccgatgccacagcgcccggccgcgggcggagccggagccggagcctggggaggcggcgggggcccagagcgcagcccgcgccccccgcgcggagccaggcccgctgccgtccccgccgcccgggcccccggcatgcagccccggctgcggaggtgacactcacggaccttagccaccgccgccgccatcgccaccatggacgaacaggaggcattgaactcaatcatgaacgatctggtggccctccagatgaaccgacgtcaccggatgcctggatatgagaccatgaagaacaaagacacaggtcactcaaataggcagagtgacgtcagaatcaagttcgagcacaacggggagaggcgaattatagcgttcagccggcctgtgaaatatgaagatgtggagcacaaggtgacaacagtatttggacaacctcttgatctacattacatgaacaatgagctctccatcctgctgaaaaaccaagatgatcttgataaagcaattgacattttagatagaagctcaagcatgaaaagccttaggatattgctgttgtcccaggacagaaaccataacagttcctctccccactctggggtgtccagacaggtgcggatcaaggcttcccagtccgcaggggatataaatactatctaccagccccccgagcccagaagcaggcacctctctgtcagctcccagaaccctggccgaagctcacctccccctggctatgttcctgagcggcagcagcacattgcccggcaggggtcctacaccagcatcaacagtgagggggagttcatcccagagaccagcgagcagtgcatgctggatcccctgagcagtgcagaaaattccttgtctggaagctgccaatccttggacaggtcagcagacagcccatccttccggaaatcacgaatgtcccgtgcccagagcttccctgacaacagacaggaatactcagatcgggaaactcagctttatgacaaaggggtcaaaggtggaacctacccccggcgctaccacgtgtctgtgcaccacaaggactacagtgatggcagaagaacatttccccgaatacggcgtcatcaaggcaacttgttcaccctggtgccctccagccgctccctgagcacaaatggcgagaacatgggtctggctgtgcaatacctggacccccgtgggcgcctgcggagtgcggacagcgagaatgccctctctgtgcaggagaggaatgtgccaaccaagtctcccagtgcccccatcaactggcgccggggaaagctcctgggccagggtgccttcggcagggtctatttgtgctatgacgtggacacgggacgtgaacttgcttccaagcaggtccaatttgatccagacagtcctgagacaagcaaggaggtgagtgctctggagtgcgagatccagttgctaaagaacttgcagcatgagcgcatcgtgcagtactatggctgtctgcgggaccgcgctgagaagaccctgaccatcttcatggagtacatgccagggggctcggtgaaagaccagttgaaggcttacggtgctctgacagagagcgtgacccgaaagtacacgcggcagatcctggagggcatgtcctacctgcacagcaacatgattgttcaccgggacattaagggagccaacatcctccgagactctgctgggaatgtaaagctgggggactttggggccagcaaacgcctgcagacgatctgtatgtcggggacgggcatgcgctccgtcactggcacaccctactggatgagccctgaggtgatcagcggcgagggctatggaaggaaagcagacgtgtggagcctgggctgcactgtggtggagatgctgacagagaaaccaccgtgggcagagtatgaagctatggccgccatcttcaagattgccacccagcccaccaatcctcagctgccctcccacatctctgaacatggccgggacttcctgaggcgcatttttgtggaggctcgccagagaccttcagctgaggagctgctcacacaccactttgcacagctcatgtactgagctctcacggccacacagctgccggtcgccctttgctgcatggcagggggctgctgctgggctcagtgaagttgctgcttctcccaggcaaggctgtggaccatggagtggcagcccagccagcgtcggtctgtgccccttccgccactggggctcagagccggggtggggtggctgcagcctcaggactgggagcccccagcctgtcagatccaggagctccagtgtcctgagctcagcgtggaggggtaggggctgggaacagtgtgcaaggcagccgtgggccccaccctcggggatgtgtcctgacactgcaattggcaccgaagcccagagggtctgggggcacaagactgacgccagggtatgaagagtgttattttcattcaaagtgttattttgtttttccttccaatgtctggagaccaccagggcatctctgggctggatgagctcccacaagcctgagggaaaggccagcactcgctagcagtggcaggcagaggcccaggctgccgtcccctagagtcccaggttggctctgccagtcctgtcctttaccaaagatgaatgaagcaaatgtcatgctgccttattcagggaaggaggagcctgtcctgcctgtggccatgaccctgcctctcccaggcaggggcccgcgatgtggaactgctgccactgaggggggatccagttttgtcaatgcagttgtctctgttttacaagttggagtcactcttatgctgtacccagtttctaaactggagactgtgtgtgccctctgggctctgagtacccctgctttgggcttgggcctaggctgcattgaaaagagctgaaggttgtggcctttgcgctcctggcccagcctttgttccccactggagcagaaggggagatggacgacacggtcggggcatctggcctggccagtgccctgatcccagagagcccgaggaggtgtctcaggctgcctgagtcgtgacctgctaggccagagcccactccatctggtagaagggaaagcccatatgctaccaccagctgtgtccaaaaccgccagctctgttcttcctcagccagcctcgcccatccccttgaggtctcagcccctttcccttgtagctcctcccctggagggggaatggcagcaggggttggggaaacagcatctccaagcagcttagagttggccatatttacctcagcctgggcgctggtcctttcttccggcccctcccctccaaaatgtgcctattgctagagctcctccctctcaacacccagtttccttgggagttgtcattaaaggaaaaaaaaaaaaaaaaaagccagtgcccagggatgggcatctccagggagctggggattagtgccaggcagccctgccagccatgcctacatccccatgggcacagaacaagccaaagccttcgttgtatgttgacgatgcacttttatgaatgtagtttctatcgctgtttttagccttttcacatcatgtaatgtgaggccttgtacttgttaatttatatctcagatcatatttgatggtttttatatatatcaattctagactgttacaggtgacggacgcctcaagagagagaagagaaaatgaaagcagctggttttgcagaagtgtgtgtcgcatgcgccagttgggcctggaccctcctgtgtccatccctgttcccccaggggctctatcagcccctgtaccccacactgccctctgaagacaacacaggctcctgcttccacctcggcccttgcccagggtggggcctggccctcatcttgaccaaagctgctgtgtggcagctcggcctctctacgaccccatcttggtggctgcacactcttcctggcccgcacccccatccccagtccctgttccccaagaggatacagagcacggtgctggctgactcaactgtgcgtcccaggttcagggtcttacagagctccaccccctggggtcttacctcactgggaatgtgttttgaaaatgaatttgaagacaagccaacaaaccctgcactccaaaaaagcaaaacagaccctaatttttttgtgccaaaaactgtggacatgctggctcagcatcctcaggaccaagttgttgcttaatttattgttttttaataactaatccagataaaaagttgtggggcttcagggtgacctgggcccaaaggttctgaagggcagttcctggcagccccaggcttgctgtgggaaggggccgtgccgtcactttctcatcattccatggggtgtgtctgcctgggccaactctgcatggagaggccagggctggggacagtccgcactctgccaccctcctgccccttccacccaccccagctctatgtctgtgtctgaattgtggatcgtgcagccatggttattgtggaactgtggaacctgcagccatagttatttgactatatcttgaccgagggcttgcagtgcaaagccaggccagtgttgcgcattacttacaataaaagggatcatttatatc

SEQ ID NO: 1539 - DNA, 3009 bp, Homo sapiens
  source 1..3009: mol_type = genomic DNA
actgctccttctctcacgccaactgagtctcttgatctgtacatgcaatcccaggcagctcgcgaacacaaacccggggccagccgcctactgctgctgctgctgctgccgctgccgccgccgccgccgccgctgcctccgccggctctgcgaacccgggacttttcatgcaccacactctccgcctgcttccctccgtgtcctgaaaagtgcgaccgttctcccaaggaatttccacggcaagtcttaggagggaatgattccccagtaatattccctgccctgacccaaagtgctggttggcctccctcccagggaagactgcttcttgcgtaacgccggccacagaaagagactccgatggacttacaccgggcagccttcaagatggagaactcatcctaccttcccaaccctctggcatccccagcactgatggtcctggcatccacggctgaggccagccgtgatgcttccatcccttgtcagcagccacgaccctttggtgtacctgtctcagttgacaaggacgtgcatattcctttcaccaacggttcctatacctttgcctctatgtaccatcggcaaggtggggtgccaggcacttttgccaatcgtgatttccccccttctctactacacctccaccctcaatttgctcccccaaatctagattgcaccccaatcagtatgctgaatcatagtggtgtgggggctttccggccctttgcctccaccgaggaccgggagagctatcagtcagcctttacgccggccaagcgacttaagaactgccatgacacagagtctccccacttgcgcttctcagatgcagatggcaaggaatatgactttgggacacagctgccatctagctcccccggttcactaaaggttgatgacactgggaagaagatttttgctgtctctggcctcatttctgatcgggaagcctcatctagcccagaggatcggaatgacagatgtaagaagaaagcagcggcattgttcgacagccaggccccaatttgccccatctgccaggtcctgctgaggcccagtgagctgcaggagcatatggagcaggaactggagcagctagcccaactgccctcgagcaagaattcccttctgaaggatgccatggctccaggcaccccaaagtccctcctgttgtctgcttccatcaagagggaaggagagtctccaacggcatcaccccactcatctgccaccgatgacctccaccattcagacagataccagacctttctgcgagtacgagccaaccggcagacccgactgaatgctcggattgggaaaatgaaacggaggaagcaagatgaagggcagagggaaggctcctgcatggctgaggatgatgctgtggacatcgagcatgagaacaacaaccgctttgaggagtatgagtggtgtggacagaagcggatacgggccaccactctcctggaaggtggcttccgaggctctggcttcatcatgtgcagcggcaaagagaacccggacagtgatgctgacttggatgtggatggggatgacactctggagtatgggaagccacaatacacagaggctgatgtcatcccctgcacaggcgaggagcctggtgaagccaaggagagagaggcacttcggggcgcagtcctaaatggcggccctcccagcacgcgcatcacacctgagttctctaaatgggccagtgatgagatgccatccaccagcaatggtgaaagcagcaagcaggaggccatgcagaagacctgcaagaacagcgacatcgagaaaatcaccgaagattcagctgtgaccacgtttgaggctctgaaggctcgggtcagagaacttgaacggcagctatctcgtggggaccgttacaaatgcctcatctgcatggactcgtactcgatgcccctaacgtccatccagtgttggcacgtgcactgcgaggagtgctggctgcggaccctgggtgccaagaagctctgccctcagtgcaacacgatcacagcgcccggagacctgcggaggatctacttgtgagctatctgccccaggcaggcctcgcctccagcagccccacctgcccccagcctctgtgacagtgaccgtctccctttgtacatacttgcacacaggttccccatgtacatacatgcacatactcaaacatgcgtacacacacacacatttacacacgcaggactctggagccagagtagaggctgtggcccaggcactacctgctggctcccacctatggtttgggggccatacctgttccagctctgttcccagggtggggcagggaggtgggggttgggggagtagtggggcacggctcctaagatccagcccccatactgacagacggacagacagacatgcaaacaccagactgaagcacatgtaatatagaccgtgtatgtttacaatgttgtgtataaatgggacaactcctcgccctctacctgtcccctccccctttggttgtatgattttcttcttttttaagaacccctggaagcagcgcctccttcagggttggctgggagctcggcccatccacctcttggggtacctgcctctctctctcctgtggtgtcccttccctctcccatgtgctcggtgttcagtggtgtatatttcttctcccagacatggggcacacgccccaagggacatgatcctctccttagtcttagctcatggggctctttataaggagttggggggtagaggcaggaaatgggaaccgagctgaagcagaggctgagttagggggctagaggacagtgctcctggccacccagcctctgctgagaaccattcctgggattagagctgcctttcccagggaaaaagtgtcgtctccccgaccctcccgtgggccctgtggtgtgatgctgtgtctgtatattctatacaaaggtacttgtcctttccctttgtaaactacatttgacatggattaaaccagtataaacagtt

SEQ ID NO: 1540 - DNA, 768 bp, Homo sapiens
  source 1..768: mol_type = genomic DNA
aagtagttgctgggacagcgaaatggaggggtgtgtgtctaacctaatggtctgcaacctggcctacagcgggaagctggaagagttgaaggagagtattctggccgataaatccctggctactagaactgaccaggacagcagaactgcattgcactgggcatgctcagctggacatacagaaattgttgaatttttgttgcaacttggagtgccagtgaatgataaagacgatgcaggttggtctcctcttcatattgcggcttctgctggccgggatgagattgtaaaagcccttctgggaaaaggtgctcaagtgaatgctgtcaatcaaaatggctgtactcccttacattatgcagcttcgaaaaacaggcatgagatcgctgtcatgttactggaaggcggggctaatccagatgctaaggaccattatgaggctacagcaatgcaccgggcagcagccaaggacacttagcctgtgatgaggagagagtggaagaagcaaaactgctggtgtcccaaggagcaagtatttacattgagaataaagaagaaaagacacccctgcaagtggccaaaggtggcctgggtttaatactcaagagaatggtggaaggttaaacagcttggatttattcttactttgtatgttgtgttgttgtccccagtgtcctacaaactaatgtatttgtgcacaagacatcatctatgaatgatgaagttttctcaccttcaaagtcttataaacatgttgactcttgttcc

SEQ ID NO: 1541 - DNA, 2743 bp, Homo sapiens
  source 1..2743: mol_type = genomic DNA
gaggagagaagaggaggtggagaaggcttgggctcgcgccgctgaagtcggcttacccgctggccgcctcctgacaagcgggagggatccgcggtggacccagggaagcggaggagcctggcggccaccccctcttcctcacttccctgtactctcatcgctctcggcctccgacacgaaaaggaagcaaatgagctgatggaagatctgtttgaaactagacagggtcttgccatgttctggaactcataggctcaagtaatcttcctgcctcaacctcccaaagtgctggaattacagttccaagatgagatgggattctccaacatggaagatgatggcccagaagaggaggagcgtgtggctgagcctcaagctaactttaacacccctcaagctctacggtttgaggaactactggccaacctactaaatgaacaacatcagatagcgaaggaactatttgaacagctgaagatgaagaaaccttcagccaaacagcagaaggaggtagagaaggttaaaccccagtgtaaggaagttcatcagaccctgattctggacccagcacaaaggaagagactccagcagcagatgcagcagcatgttcagctcttgacacaaatccaccttcttgccacctgcaaccccaatctcaatccggaggccagtagcaccaggatatgtcttaaagagctgggaacctttgctcaaagctccatcgcccttcaccatcagtacaaccccaagtttcagaccctgttccaaccctgtaacttgatgggagctatgcagctgattgaagacttcagcacacatgtcagcattgactgcagccctcataaaactgtcaagaagactgccaatgaatttccctgtttgccaaagcaagtggcttggatcctggccacaagcaaggttttcatgtatccagagttacttccagtgtgttccctgaaggcaaagaatccccaggataagatcctcttcaccaaggctgaggacaatttgttagctttaggactgaagcattttgaagggactgagtttcttaaccctctaatcagcaagtaccttctaacctgcaagactgcccgccaactgacagtgagaatcaagaacctcaacatgaacagagctcctgacaacatcattaaattttataagaagaccaaacagctgccagtcctaggaaaatgctgtgaagagatccagccacatcagtggaagccacctatagagagagaagaacaccggctcccattctggttaaaggccagtctgccatccatccaggaagaactgcggcacatggctgatggtgctagagaggtaggaaatatgactggaaccactgagatcaactcagatcaaggcctagaaaaagacaactcagagttggggagtgaaactcggtacccactgctattgcctaagggtgtagtcctgaaactgaagccagttgccgaccgtttccccaagaaggcttggagacagaagcgttcatcagtcctgaaacccctccttatccaacccagcccctctctccagcccagcttcaaccctgggaaaacaccagcccaatcaactcattcagaagcccctccgagcaaaatggtgctccggattcctcacccaatacagccagccactgttttacagacagttccaggtgtccctccactgggggtcagtggaggtgagagttttgagtctcctgcagcactgcctgctatgccccctgaggccaggacaagcttccctctgtctgagtcccagactttgctctcttctgcccctgtgcccaaggtaatgatgccctcccctgcctcttccatgtttcgaaagccatatgtgagacggagaccctcaaaaagaaggggagccagggcctttcgctgtatcaaacctgcccctgttatccaccctgcatctgttatcttcactgttcctgctaccactgtgaagattgtgagccttggcggtggctgtaacatgatccagcctgtcaatgcggctgtggcccagagtccccagactattcccatcgccaccctcttggttaaccctacttccttcccctgtccattgaaccagccccttgtggcctcctctgtctcacccttaattgtttctggcaattctgtgaatcttcctataccatccacccctgaagataaggcccacatgaatgtggacattgcttgtgctgtggctgatggggaaaatgcctttcagggcctagaacccaaattagagccccaggaactatctcctctctctgctactgttttccccaaagtggaacatagcccagggcctccaccagtcgataaacagtgccaagaaggattgtcagagaacagtgcctatcgctggaccgttgtgaaaacagaggagggaaggcaagctctggagccgctccctcagggcatccaggagtctctaaacaactcttcccctggggatttagaggaagttgtcaagatggaacctgaagatgctacagaggaaatcagtggatttctttgagctaggagaataagagtctggagactgggagccttcacttcggcctccgattggtggcgcatagggtgtaaccaataggaaacccctaaagggtacttaaaccccagattttgcaactggggctcttgagcagcttgctttagcctgctcccactctgtggaatatacttttgcttcaataaatctgtgcttttattgcttcattgtttca

SEQ ID NO: 1542 - DNA, 2130 bp, Homo sapiens
  source 1..2130: mol_type = genomic DNA
cactagcagagaagctgctgtccttccaccaccagcaccggaccacctgctccaagaccagcctcctggggggaccaggcacccggccttcactggcacccagggagccgtcctcagcagcgtcaacatgtcaaggcccagcagcagagccatttacttgcaccggaaggagtactcccagaacctcacctcagagcccaccctcctgcagcacagggtggagcacttgatgacatgcaagcaggggagtcagagagtccaggggcccgaggatgccttgcagaagctgttcgagatggatgcacagggccgggtgtggagccaagacttgatcctgcaggtcagggacggctggctgcagctgctggacattgagaccaaggaggagctggactcttaccgcctagacagcatccaggccatgaatgtggcgctcaacacatgttcctacaactccatcctgtccatcaccgtgcaggagccgggcctgccaggcactagcactctgctcttccagtgccaggaagtgggggcagagcgactgaagaccagcctgcagaaggctctggaggaagagctggagcaaagacctcgacttggaggccttcagccaggccaggacagatggagggggcctgctatggaaaggccgctccctatggagcaggcacgctatctggagccggggatccctccagaacagccccaccagaggaccctagagcacagcctcccaccatccccaaggcccctgccacgccacaccagtgcccgagaaccaagtgcctttactctgcctcctccaaggcggtcctcttcccccgaggacccagagagggacgaggaagtgctgaaccatgtcctaagggacattgagctgttcatgggaaagctggagaaggcccaggcaaagaccagcaggaagaagaaatttgggaaaaaaaacaaggaccagggaggtctcacccaggcacagtacattgactgcttccagaagatcaagcacagcttcaacctcctgggaaggctggccacctggctgaaggagacaagtgcccctgagctcgtacacatcctcttcaagtccctgaacttcatcctggccaggtgccctgaggctggcctagcagcccaagtgatctcacccctcctcacccctaaagctatcaacctgctacagtcctgtctaagcccacctgagagtaacctttggatggggttgggcccagcctggaccactagccgggccgactggacaggcgatgagcccctgccctaccaacccacattctcagatgactggcaacttccagagccctccagccaagcacccttaggataccaggaccctgtttcccttcggccctccagccccaaacctgcccagccagccctgaaaatgcaagtcttgtacgagtttgaagctaggaacccacgggaactgactgtggtccagggagagaagctggaggttctggaccacagcaagcggtggtggctggtgaagaatgaggcgggacggagcggctacattccaagcaacatcctggagcccctacagccggggacccctgggacccagggccagtcaccctctcgggttccaatgcttcgacttagctcgaggcctgaagaggtcacagactggctgcaggcagagaacttctccactgccacggtgaggacacttgggtccctgacggggagccagctacttcgcataagacctggggagctacagatgctatgtccacaggaggccccacgaatcctgtcccggctggaggctgtcagaaggatgctggggataagcccttaggcaccagcttagacacctccaagaaccaggccccgctgatgcaagatggcagatctgatacccattagagccccgagaattcctcttctggatcccagtttgcagcaaaccccacaccccagctcacacagcaaaaacaatggacaggcccagaggctgaagcaaacagtgtcccttctggctgtgttggagcctccccagtaaccacctatttattttacctctttcccaaacctggagcatttatgcctaggcttgtcaagaatctgttcagtccctctccttctcaataaaagcatcttcaagcttgt

SEQ ID NO: 1543 - DNA, 1177 bp, Homo sapiens
  source 1..1177: mol_type = genomic DNA
cagaaactcctccaagcaacctaactcttaacccaacttctgacaccatgacctgctgccagaccagcttctgtggatatcccagcttctccatcagtgggacctgtggctccagctgctgccagccaagctgctgtgagaccagctgctgccagccacgcagctgccagactagcttctgcggatttcccagcttctcaaccagtgggacctgcagctccagttgctgccagccaagctgctgtgagaccagctgctgccagccaagctgctgtgagaccagctgctgccagccaagctgctgccagatcagctcctgcggaactggctgtggcattggtggtggcatcagctatggccaggagggcagcagtggagctgtgagcacccgtatcaggtggtgccgcccagacagtcgtgtggagggcacctacctacccccctgctgtgtggtgagctgcacgcccccatcctgctgccaactgcaccatgcccaggcctcctgctgccgcccgtcctactgtggacagtcctgctgccgcccagtctgctgctgtgagcccacttgctgaaagccagtttgcttattttcaattgcctaggtcacagtgtctctgaactgttcatcccttgaccacctctggaccactaacaagttctcagactttgcattgcttgtgatggagactactaagtatatgagctcacaattctatctgattccattctacaatgaataccttgacccttcactggggacacagaaatgctacaaagccacctgctgatcatcaatttgcttgggatatactatttctgatatttctgcaggattaaaaattactgacatgttgtggaatttatccatgagaactatccacaagtctaatgtttccatgctttataatctattttatcttgtttacctaaaattttttgcaacatcaaagacaccaaattatagccaagtgacattcctcaagtcaccagagagaatggaagctcatcacccaacattcagcttctaagaagtaggctggactttccacattttaacatctgatccatcccttggtttttggatcataatgatcttgcctgctggatatttcagttatatctgtgatacaatgtcttctgtcatttcttaataaatattatatactaggcaaagaaa

SEQ ID NO: 1544 - DNA, 1659 bp, Homo sapiens
  source 1..1659: mol_type = genomic DNA
gggtaaggcgggagccaatcgcaccgggttttattgggacacgccggcaagacgcctcttcagttgtctgctactcagaggaaggggcggttggtgcggcctccattgttcgtgttttaaggcgccatgaggggtgacagaggccgtggtcgtggtgggcgctttggttccagaggaggcccaggaggagggttcaggccctttgtaccacatatcccatttgacttctatttgtgtgaaatggcctttccccgggtcaagccagcacctgatgaaacttccttcagtgaggccttgctgaagaggaatcaggacctggctcccaattctgctgaacaggcatctatcctttctctggtgacaaaaataaacaatgtgattgataatctgattgtggctccagggacatttgaagtgcaaattgaagaagttcgacaggtgggatcctataaaaaggggacaatgactacaggacacaatgtggctgacctggtggtgatactcaagattctgccaacgttggaagctgttgctgccctggggaacaaagtcgtggaaagcctaagagcacaggatccttctgaagttttaaccatgctgaccaacgaaactggctttgaaatcagttcttctgatgctacagtgaagattctcattacaacagtgccacccaatcttcgaaaactggatccagaactccatttggatatcaaagtattgcagagtgccttagcagccatccgacatgcccgctggttcgaggaaaatgcttctcagtccacagttaaagttctcatcagactactgaaggacttgaggattcgttttcctggctttgagcccctcacaccctggatccttgacctactaggccattatgctgtgatgaacaaccccaccagacagcctttggccctaaacgttgcatacaggcgctgcttgcagattctggctgcaggactgttcctgccaggttcagtgggtatcactgacccctgtgagagtggcaactttagagtacacacagtcatgaccctagaacagcaggacatggtctgctatacagctcagactctcgtccgaatcctctcacatggtggctttaggaagatccttggccaggagggtgatgccagctatcttgcttctgaaatatctacctgggatggagtgatagtaacaccttcagaaaaggcttatgagaagccaccagagaagaaggaaggagaggaagaagaggagaatacagaagaaccacctcaaggagaggaagaagaaagcatggaaactcaggagtgacattcccttcactccttttcctacccaagggggaagactggagcctaagctgcctgctactgggctttacatggtgacagacatttccgtgggatagggaagatagcaggaagaaaagtaaactccatagaagtgtcattccactgggttttgatattggcttagctgccagtctcccatttgtgacctatgccatccatctataatggaggataccaacatttcttcctaatattctataatctccaactcctgaaaacccctctctcaactaatactttgctgttgaaatgttgtgaaatgttaagtgtctggaaatttttttttctaagaaaaactattaaagtacttcctagtagg

SEQ ID NO: 1545 - DNA, 6203 bp, Homo sapiens
  source 1..6203: mol_type = genomic DNA
ggaaaagctcctcggagatgagcgtgaccccctggctcgtggtggccgcctgttctcactaacgccatggcggggaccggagtgagaaaccggtgtctgtcactgactgcaaagtgagcgagaagcaggctgcgggccgtcccagcacgacgtggagccccgcggagacctcgagatgccccgcggggaagctcctggccccgggagacggggggctaaggacgaggccctgggcgaagaatcgggggagcggtggagccccgagttccatctgcagaggaaattggcggacagcagccacagtgaacagcaagatcgaaacagagtttctgaagaacttatcatggttgtccaagaaatgaaaaaatacttcccctcggagagacgcaataaaccaagcactctagatgccctcaactatgctctccgctgtgtccacagcgttcaagcaaacagtgagtttttccagattctcagtcagaatggagcacctcaggcagatgtgagcatgtacagtcttgaggagctggccactatcgcttcagaacacacttccaaaaacacagatacctttgtggcagtattttcatttctgtctggaaggttagtgcacatttctgaacaggctgctttgatcctgaatcgtaagaaagatgtcctggcgtcttctcactttgttgacctgcttgcacctcaagacatgagggtattctacgcgcacactgccagagctcagcttcctttctggaacaactggacccaaagagctgcacggtatgaatgtgctccggtgaaaccttttttctgcaggatccgtggaggtgaagacagaaagcaagagaagtgtcactccccattccggatcatcccctatctgattcatgtacatcaccctgcccagccagaattggaatcggaaccttgctgtctcactgtggttgaaaagattcactctggttatgaagctcctcggatcccagtgaataaaagaatcttcaccaccacacacaccccagggtgtgtttttcttgaagtagatgaaaaagcagtgcctttgctgggttacctacctcaggacctgattggaacatcgatcctaagctacctgcaccctgaagatcgttctctgatggttgccatacaccaaaaagttttgaagtatgcagggcatcctccctttgaacattctcccattcgattttgtactcaaaacggagactacatcatactggattccagttggtccagctttgtgaatccctggagccggaagatttctttcatcattggtcggcataaagttcgaacgagcccactaaatgaggatgtttttgctaccaaaattaaaaagatgaacgataatgacaaagacataacagaattacaagaacaaatttacaaacttctcttacagccagttcacgtgagcgtgtccagcggctacgggagcctggggagcagcgggtcgcaggagcagcttgtcagcatcgcctcctccagtgaggccagtgggcaccgtgtggaggagacgaaggcggagcagatgaccttgcagcaggtctatgccagtgtgaacaaaattaaaaatctgggtcagcagctctacattgagtcaatgaccaaatcatcattcaagccagtgacggggacacgcacagaaccgaatggtggtggtgaatgtaagacctttacttccttccaccaaacactgaaaaacaatagtgtgtacactgagccctgtgaggatttgaggaacgatgagcacagcccatcctatcaacagatcaactgtatcgacagtgtcatcagatacctgaagagctacaacattccagctttgaaaagaaagtgtatctcctgtacaaatacaacttcttcctcctcagaagaagacaaacagaaccacaaggcagatgatgtccaagccttacaagctggtttgcaaatcccagccatacctaaatcagaaatgccaacaaatggacggtccatagacacaggaggaggagctccacagatcctgtccacggcgatgctgagcttggggtcgggcataagccaatgcggttacagcagcaccattgtccatgtcccacccccagagacagccagggatgctaccctcttctgtgagccctggaccctgaacatgcagccagcccctttgacctcggaagaatttaaacacgtggggctcacagcggctgttctgtcagcgcacacccagaaggaagagcagaattatgttgataaattccgagaaaagatcctgtcatcaccctacagctcctatcttcagcaagaaagcaggagcaaagctaaatattcatattttcaaggagattctacttccaagcagacgcggtcggccggctgcaggaaagggaagcacaagcggaagaagctgccggagccgccagacagcagcagctcgaacaccggctctggtccccgcaggggagcgcatcagaacgcacagccctgctgcccctccgcggcctcctctccgcacacctcgagcccgaccttcccacctgccgccatggtgcccagccaggccccttacctcgtcccagcttttcccctcccagccgcgacctcacccggaagagaatacgcagcccccggaactgcaccggaaggcctgcatgggctgcccttgtccgagggcttgcagccttacccagctttcccttttccttacttggatacttttatgaccgttttcctgcctgacccccctgtctgtcctctgttgtcgccatcgtttttgccatgtccattcctgggggcgacagcctcttctgcgatatcaccctcaatgtcgtcagcaatgagtccaactctggacccacccccttcagtcaccagccaaaggagagaggaggaaaagtgggaggcacaaagcgaggggcacccgttcattacttcgagaagcagctcacccttgcagttaaacttacttcaggaagagatgcccagaccctctgaatctccagatcagatgagaaggaacacgtgcccacaaactgagtattgtgttacaggcaacaatggcagtgagagcagtcctgctactaccggtgcactgtccacggggtcacctcccagggagaatccatcccatcctactgccagcgctctgtccacaggatcgcctcccatgaagaatccatcccatcctactgccagcgctctgtccacaggatcgcctcccatgaagaatccatcccatcctactgccagcacactgtccatgggattgcctcccagcaggactccatcccatcctactgccactgttctgtccacggggtcacctcccagcgaatccccatccagaactggttcagcagcatcaggaagcagcgacagcagtatataccttactagtagtgtttattcttctaaaatctcccaaaatgggcagcaatctcaggacgtacagaaaaaagaaacatttcctaatgtcgccgaagagcccatctggagaatgatacggcagacacctgagcgcattctcatgacataccaggtacctgagagggttaaagaagttgtactaaaagaagacctggaaaagctagaaagtatgaggcagcagcagccccagttttctcatgggcaaaaggaggagctggctaaggtgtataattggattcaaagccagactgtcactcaagaaatcgacattcaagcctgtgtcacttgtgaaaatgaagattcagctgatggtgcggccacatcctgtggtcaggttctggtagaagacagctgttgagtgactgtgaggatgaaccttcataccctttccaagacgtgttacacagacagacctttttaagtcctggacttttaaatgaccatgaagttatcattgaatgttaagattttttcttcttgattttttaatacacgtaatctttttgaagcagacattgtatacagaatcttacttctctttgttcctgatatattaaaatggccagttaggctctttttgtagttgaattgtcttctaaagagattggatggcctctaaagaggtatgtgtatctttatttcagatgtcacccagagtaaattataattagaagtatagctagaatgagccccaaaccttagcctcatttattttgttctgttacataagtcattttccccttagagtgcttgaagaaatgccacctacaggttgtgtacttttcataatggtttccatgaatgtagtacgttcatacaggcttcattcaacctggcgttcccctccataattaagatgaaacattccggttttctcacaacacattagcacatactgtccattagcatatctgggataaccaggttttgggggttgagttttggccttcatccttgtagatccctttcctattgatttcccaccttccagtgaaattctgaaagtcttatcttaaaaatcgatccgcttaccatgggcctattcttgtaagtttcagttagcatttgcatgtgtaatattaaaatgaaagagcttcttacccagtgctgttgcccttttgagtatttttgtttttaaaataatgattgtaaaatgttttacaagtaatgtaaaagctagtatcattcttacatacttctgtgtttaaattttcattcttaccaaaacagttaactctttctttccaatcaatttatacaaaagaggtcgctccagccctaccacaggtctgactggcactgccttttgtttgcccttgaacagggcagtgttgtggggactgcaaaagagaaaacgtccaggcgagcccagttgtcctcgcccacagggtcctgcaggctccatcagtcaccgctttctatggcgtttgtagttgtgtcttttaagaagtgagtgtgattgtttacttgataaatcagctcactctctggtgctttttagagaagtccctgattccttcttaaacttggaatgatagatgaaattcacacccctgcagatcagaaaaaacaaatagaagaaaatgagggttacagtaacctgttgtctttatataacttgcaacaaactaatttatttttttttcctttttttgtttttggttttttatggttttttaaggaaaatacttttctcctttgaagttttacagctttttgtaaatgcgtcctgataatgattaggaaaatcgaccttttcatccatgatgaccatcctcatagctcagatctcctttcaaagtagtggctttctggatggtaattccatcttaaggtgtcagaactattttcaaatgctgcctttgacagttcttggaattttctgatattaagcagttccatgcaaatattcgtgttttataaatagctctcatagtctgctccatcttgatagttaagtgatttctgaagcgtttgtgtgtgtgttgatcaggttgtgtgatatttttgcttgatagagaatcaaatttgaaacaattaaccagccagtagattgtctgtcagtgaccttctgtagtaataaagtttttgccactgtaaataaaaacagtatccgtagctatcaggatcattgcgcactcatatatgctaagccttctgttctctaatagaagcctttcttttccattgtttctggatatttgtattatccaaatgtgcttatttctttgccttagcacacgttttatggagtacttgttatactaggtttgatttgaaactggtgcttgtcgcagaactgtcagagcatgaggagcgctcctcctgtgggtggacgcattcacgcactcccaggttgcacctgctgctggcggtgagcagggggttcagcagcttgaccgatgccccccgagggggctctccccagcttaaactttgttgtttaaatttgttaactttttatattaatgactattgaaagtggtaataaaaatttatattataggcttcaatgttttcatgaatgttacccaaaaagctgtgttttctttggtcagaggtcaaaatttatgaaaaacaaaatgctgtatgaatggaaatcattttgcaattgagtgacacttcattgtaattcacagtgtaaatttaatccaaactgaaattttgtttcaactgaatttgtaattaactctgaatttgtttttaatcattagtaatatttcagttgggtatctttttaagtaaaaacaacaaataaactctgtacatgtaaaacgtga

SEQ ID NO: 1546 - DNA, 3048 bp, Homo sapiens
  source 1..3048: mol_type = genomic DNA
gtaactctacggcctagcaaccgttgccaaggagctcgactctgggagcggtctagagcccgggcgcctcctggggggtggggaaacggtttcgtgaggagaatttgaggtaacctcgccaactcgcggtcggaagctcctctgaaccccgaaataggagagagctcccgtcctctctcggtcctgatgcagcacctcgcaagtggaaggggtcgtcgcggttaagcccccggataggggaatcgggccccttctgggattcgagcggatccaggccgctccctggagggatgaactgtcgaggggcccagggcagcccccgctagaggcccggtcgggtgtggggtcccctgtcccctgtcccgagcccggggagggggacactatttctggtactcccaggaggctgcgggtcgatgctcgtgccagcctgggacccaggcagcacggtttctctcccaaattgtgccagagaacacgcacgtcctggttttcattgttccccgcctcctgcgactcgtttgtggttaaaattataagacctaattatgagtgatcaaattaaattcattatggacagtctcaataaggagccctttaggaagaactataatttaatcacgtttgattccttggagccaatgcaactattacaagttctcagtgatgttctggctgagattgacccaaagcaacttgtggatatcagagaggagatgccagagcagacagccaaacgaatgttgagccttcttggtattcttaagtacaaaccttcaggaaatgccacagatatgagtacttttcgtcagggtttggtgattggaagtaaacctgtaatttacccagtgctccactggcttcttcagaggactaatgaactgaagaaaagagcatatttagctcgttttttaataaaacttgaggtaccaagtgagtttcttcaggatgaaactgtggctgacaccaataaacagtatgaagagttaatggaagcctttaaaactttgcataaagaatatgagcagctcaagatatctggattttctacagcagaaataagaaaggatatcagtgcaatggaagaagaaaaggatcagctcattaagagagttgaacatttgaagaaaagggttgagacagctcagaatcatcaatggatgcttaaaatagcaaggcaacttcgagttgaaaaagagagagaagaatatcttgcacaacagaaacaggaacaaaagaatcagctatttcatgcagtgcaaagattgcaaagagtacaaaaccagctgaaaagcatgcgccaagctgcagcagatgcaaagcctgaaagtttaatgaagaggctagaggaggagataaaatttaatttatatatggtaactgaaaaatttcctaaagaattagaaaataagaaaaaggaattacattttttacaaaaagtagtttcagagccagctatgggccattctgatcttcttgaacttgaatctaaaataaatgaaataaacacagaaattaaccagttgattgaaaagaaaatgatgagaaatgagcccattgaaggcaaactctcactgtataggcaacaggcatctatcatttcccgtaaaaaagaagccaaagctgaggaacttcaggaggccaaggagaagttagccagcctagagagagaagcatcagtaaagagaaatcagacccgtgaatttgatggtactgaagttttaaagggagatgagagacaggatctcactctgtcacccaggctggagtgcggtggtgtgatcatggcttactgcagcctgaaactcctaggctcaagtgatcctcctacctcagcctcctgagaagctcggactacaggcacgagccaccatgcccagctaattttctttttttgttttgttttgtagagatgtggtctcactatgtttcccaggctggtcttaaactcccggcctcaagcagtcctcccacttcggcctcctgaagtgttaggattacaggcgtgagcctgcgcctggctgtaattactatacccagtttttacagataaaggatctgagacatgcagaggttttaagctgacttgcctgacaccccattgctagtaagtagtagaaccaggagttggatttagcagtctggctgtagagtcatcaatagtttgcacatgacagaaagctggaagaaatagtcaacctgaaacacatgatggaattataattcagaatcatcttggtagataggggcactgtgcttaaacaaaatgccattaatgggattataataaatataatgtggtagaattcaagttttgtttgccaattcaacacatcatctgttactaacgcagctttaaaaaatgcataaacgattatactacattaatttttttaaaaagtatcctgtttatggtctgattatgcctggagtattattttatatttttgacttcatgttttaagagacaatcatgccagagtcccacatgagggtgactaaaatggacaaaaagtctggaaactttcatatcaataattgattatgtattaactgaaacaaaagactagagaaagacacagtgggaattgattatgtattaactgaggaataaaagactgaagaaagacataataaatagttaaaggattatggaaaagatggtgttcagaaaaaaattaacatgcaggcctgagactgctatccctagaaaggtctgcttgcaaagttggcccttggctggcatctgggggaacttggttcttggatggattcctgccattcactgataagaatggctcaccttgcctaaagtatatgaagagtgtgctttatgtcgagctcctgcttgcttgcctctttctttgtctttctttcttttccttcctcccttccttccttccttccttccttccttccttccttccttccttccttccttccttcctctctctctctctttctttctttcttctttctggaattttggtacaggctaggcagaatgtgcctagatgatcagctcctagtaaaaaccttgagaactaa

SEQ ID NO: 1547 - DNA, 1657 bp, Homo sapiens
  source 1..1657: mol_type = genomic DNA
gacggaaaccagaatcgttttgggtctggtcgccaagatggcgtcctccgcctccgcccggactccggcagggaagcgagtgataaatcaggaagaattgcggcggttaatgaaggagaagcagcgtctgagcaccagtcggaaacggatagaatctccattcgcgaagtacaaccgtttggggcagctgagttgtgccctgtgtaacactccggttaagagcgagctcctgtggcagactcacgtcctgggaaagcagcaccgagagaaagtggccgagctgaaaggcgcgaaggaagccagccagggttcgtccgccagttcagcgcctcattccgtcaagaggaaagcgccggacgcagacgaccaagatgtcaagagagcgaaggccaccttggtgcctcaggtacagccctccacatctgcgtggaccaccaactttgacaaaataggaaaggagttcattagagcgactcccagtaagccttcaggactcagtttactccccgattatgaagatgaggaggaggaggaagaggaggaggaaggagatggagaaagaaaaaggggggacgccagcaagccgctctccgacgcacagggcaaggagcactcagtttcctcttcacgggaggtaacaagtagtgtgctgccaaacgatttctttagtactaatcctcccaaggcccccataattcctcattcagggtcaattgagaaagcagaaatacatgaaaaagtggtggaaaggagagaaaacaccgcggaagcgttaccggaaggtttttttgacgaccctgaggtagatgcaagagtacgaaaggttgatgctccaaaagatcagatggacaaagagtgggacgaattccaaaaagccatgaggcaggtcaacactatttccgaagccatagttgccgaagaggatgaggagggacggttggaccgccagattggggagatcgatgagcagatagagtgttaccgacgggtggaaaagctacggaatcgccaggatgaaataaaaaataaacttaaagaaatcctgaccataaaagaactgcagaaaaaggaagaagagaatgctgacagcgatgatgagggggaactacaggatttgttgtctcaggattggagggtgaaaggggcattgttatagggttttaaagacccaaggtttctaacagcctctgctgttgtataaaaagtgctgtctctcagtagtatagcggttacttcatgcctcaagatttgggtacctggattgctaaactggattgttgagataaaatgagccagtgagctacagcactttggaaaatttgtgtaacatgtttttgaggtaaagttgtttttgaaatttctgaagtgttatataccaaaatgccaacatttccacgacagacttaactgtataatttcgttgtaaaatctgtaagttgtaaatattgtacatagttaaatctgtattctgttttgaatttttttaattaatagaaagaccaaccggcaaactttcagatgaatgcttactgtggtatttggaatgtatgtatcttctgaaccctacatcaagttgaaaaggtttgttttcttgtttctttggtttttgtatggttttttagaacacttcataaacacataagtcattgtaggttaa

SEQ ID NO: 1548 - DNA, 1971 bp, Homo sapiens
  source 1..1971: mol_type = genomic DNA
tccttccaccaccagcaccggaccacctgctccaagaccagcctcctggggggaccaggcacccggccttcactggcacccagggagccgtcctcagcagcgtcaacatgtcaaggcccagcagcagagccatttacttgcaccggaaggagtactcccagaacctcacctcagagcccaccctcctgcagcacagggtggagcacttgatgacatgcaagcaggggagtcagagagtccaggggcccgaggatgccttgcagaagctgttcgagatggatgcacagggccgggtgtggagccaagacttgatcctgcaggtcagggacggctggctgcagctgctggacattgagaccaaggaggagctggactcttaccgcctagacagcatccaggccatgaatgtggcgctcaacacatgttcctacaactccatcctgtccatcaccgtgcaggagccgggcctgccaggcactagcactctgctcttccagtgccaggaagtgggggcagagcgactgaagaccagcctgcagaaggctctggaggaagagctggagcaaagacctcgacttggaggccttcagccaggccaggacagatggagggggcctgctatggaaaggccgctccctatggagcaggcacgctatctggagccggggatccctccagaacagccccaccagaggaccctagagcacagcctcccaccatccccaaggcccctgccacgccacaccagtgcccgagaaccaagtgcctttactctgcctcctccaaggcggtcctcttcccccgaggacccagagagggacgaggaagtgctgaaccatgtcctaagggacattgagctgttcatgggaaagctggagaaggcccaggcaaagaccagcaggaagaagaaatttgggaaaaaaaacaaggaccagggaggtctcacccaggcacagtacattgactgcttccagaagatcaagcacagcttcaacctcctgggaaggctggccacctggctgaaggagacaagtgcccctgagctcgtacacatcctcttcaagtccctgaacttcatcctggccaggtgccctgaggctggcctagcagcccaagtgatctcacccctcctcacccctaaagctatcaacctgctacagtcctgtctaagcccacctgagagtaacctttggatggggttgggcccagcctggaccactagccgggccgactggacaggcgatgagcccctgccctaccaacccacattctcagatgactggcaacttccagagccctccagccaagcacccttaggataccaggaccctgtttcccttcggcggggaagtcataggttagggagcacctcacactttcctcaggagaagacacacaaccatgaccctcagcctggggaccccaactccaggccctccagccccaaacctgcccagccagccctgaaaatgcaagtcttgtacgagtttgaagctaggaacccacgggaactgactgtggtccagggagagaagctggaggttctggaccacagcaagcggtggtggctggtgaagaatgaggcgggacggagcggctacattccaagcaacatcctggagcccctacagccggggacccctgggacccagggccagtcaccctctcgggttccaatgcttcgacttagctcgaggcctgaagaggtcacagactggctgcaggcagagaacttctccactgccacggtgaggacacttgggtccctgacggggagccagctacttcgcataagacctggggagctacagatgctatgtccacaggaggccccacgaatcctgtcccggctggaggctgtcagaaggatgctggggataagcccttaggcaccagcttagacacctccaagaaccaggccccgctgatgcaagatggcagatctgatacccattagagccccgagaattc

SEQ ID NO: 1549 - DNA, 5164 bp, Homo sapiens
  source 1..5164: mol_type = genomic DNA
gcatcatggaatgatataaaaatgcagctttccaatcacactaagggtctctctatttcttctcttgaccaccaatcaggaacctttgctggaagcttgtttctgattggtgaaagtaagccataacagtggaatgccaaggagtaaatacaaaagtgtagcaacaactgagtttgctgtctcactaccctcagcctaggccaacctggactccttcaccccaaatgaggtgaccgctacattttatatgaagacactgatttaccattcaactgtgatccatcttataacatggcaatccaatacagacaggaagataaaactcaacaacagctaaaataaagtgtattcccaggtaaaatagacaagtgctttaatttgaaatggattcgtccgatgagtgtcagttacaagggcagagaaggtaccagtgcagaagagctctgactgtgggcagtgtcaccaggtcccactaagtggcaacacttgtgctgggtgacttgacccatcttgatgtataaacccatagccagacaggacgtgcaaacaggtctcatggtgaatgcgatgctgtggaaaatgacatggagaatggctgtctctcagctagggaggagggtcttggtgtcctagtaaagaatgttcacgtcctggagttggtggttggtgttctatctaggcgatgagagaaggatgcttttcctaatgagcacctggtgggaatagagtctctctttgcacttcgctggaggaagaaatttctaccacttattttttcttcttgcttatagaatacacattgcagaaaaaggatgaagttgaccagtgaaaagttgcccaagaaccccttttatgcctctgtatctcagtatgctgctaaaaaccaaaaatttttccagtggaaaaaggaaaagactgaatcagattacacccatgctaatttggtggataaggcattgcagctcttgaaggaaagaatactgaaaggagacactctggcatatttcctacgaggtcaactatattttgaagagggatggtatgaagaagcattagaacagtttgaagaaatcaaggagaaagaccatcaagcaacttaccagctaggagtgatgtactatgatgggctggggaccactctagacgctgagaaaggggtggactatatgaagaaaattcttgattctccatgtcccaaagcaagacacttaaaatttgcagctgcttacaacctcggaagagcttattatgaaggaaaaggtgttaaacgatcaaatgaggaagctgaaagactgtggcttatcgcagcagacaatggaaatcccaaagctagtgtgaaggctcaaagtatgctcgggctgtattactcaaccaaggagcccaaggagttagaaaaggcattttactggcattccgaagcatgtggcaatgggaatctggagtcccagggtgcacttgggctcatgtacttgtatggacaaggcatccggcaggatacggaagctgccctgcagtgcttaagagaagcagcagaacgcggaaacgtctatgctcaagggaatctcgtggagtattactataagatgaaattttttacaaagtgtgttgcattttccaaaaggatcgctgactatgatgaggttcacgacatccccatgatcgcccaggtcacagactgtctcccggagttcatcggcagaggcatggcaatggcatccttctaccacgcaaggtgtcttcagcttggcttgggcatcaccagggatgaaacaaccgctaaacactattattctaaagcttgtcgtctgaatcccgcattggcagatgaacttcactccttacttattcgtcaaagaatttagaccacaatgtatttcaacaaagatcatcaatgctaacacctcacaatgtgtgtatttttacagtagctatgtttggttattttgcacatcacaaattacactatcctgggtattttacaggtgacatgttacttcgttcttgaattcgtacgctgttaagttttgcaacttgaaacctagacacaaggtcaaattgctggaagagtcctcagaggtccacctcttaccctacagactggccgagaccatatcaagtattaaaaccattctatacagcaagtatcgtttatcctttcttaaacaccgagtctccaaaaatacttagtttagctttagtttagtaagttcagaagtagaaacaaacttatttaaaaccatcatttgaaagtttaattctttaaatttgtctcttagttttgtgaattttgaataataatgtttaaattttgtttcagtcatttaaaatttaaattttcagtcatttaaaattttaaaaatttaaaatttcacaaaactaagggtaaaagacatttaaagaattaaacttaaataagtgtgtgcagcatttctacttctgaagttattaaagctaaaactgcactaagccttttgagacatcctttattcttaaaaagctcataaataattggcttattacatataaacttcaaaaaagtgggttataagacattgctttagaatcttgcccctccaaatcttccctcaaagatcttaatgagtaaaacaactgctacatacatatgcagaatgtgtaataaaacaaaaagcaattgctatatgaaaatattcgtaagaaaagtaaagcaaattgtttctttgtgcttcagctcattttccatatttttaaaaccctgtggtaaaagcctcaatgaaatcatttacaagaactacaattaaatattgttaaaattagcaaaaggctttccgtatatagatgacatctatgaaggcaaaaggtgacagtaaaaacagtaagatccatatgcataagattgtacaaggctattcatttgtgaaacaaatatacatatcgaagacaggtctcagagataccttaactattcctttttttataaacatattaaaggatgtggctttattttataaatcacaaccatcccaacagtggatttaaacaagatttctttttagtaatgggaaaatgcaattaatatggaggtgatagtcactaagaactgttgaatggcagaaaagtatttgctctcgttttatgttctggcttgtctgtattgcctgaacttcattttgtctttgtgtaagggaagaaatttcaacagactcgggtttgagatatcctcaaatggtcatgtatttctgtctcaaatctcttaataccacccatgtaacattccttcaaccacttgaagatccaaattcccaactagtattctcttctccacacttaatccagttcctaaagattattattattattattattattatttttttttttttgagacggagtctcctgacctaatcttagcccggcgcagtggctcacgtctgtaatcccagcactttgggaggctgaggcgggcagatcatgaggtcaggagtttgagaccaggctggccaacgtggtgaaaccccgtctctactaaaaatacaaaaattagccgggcgtgatggcggacgcctgtagtcccagctactcgggaggctgagacagaagaactgcttgaaaccaggaggcagaggttgcagtgagctgagatcgcgcaaattgcactccagcctcggtgacaagagcgagactccatctcaaaaaaaaataaaaagaatcttaaaataggaacataataaaagatcggccctaagtaaagagcactttttaaactgccattaaagatgggtttcagaaatcataaactttgacgtgtgccatacatggtaacatgctatgcttatatgtcttctataaatccaatgcagaatttaaaatttcagtttactctagttaccataaagctaatgctctggcacaagcgagtccctgcaaactaccactgctgaggacagtagtaaaccccttgacctgagactgcggtgagtctgtaactcgagtgcattgagacttccagatcattactcttacacacacacacacacacacacatacacacacacacactccttctctaagattccttgtagctgatatctcatggaaaaatgacattttatcataaataaatatagagacaaaataatagtgatctttctcattcgcaatgtaaacttaacagctacagtttaaatgatagcatagaattatgcctaaaatagacatttcccataattgtattgtgataagttcttcaggcttgacaacttcacattgcctctcttccttgaatgtattttatctggtcttttctatatagtcttttgaaggataatttttatcaatagccaactttgggtatttttttaagtgtcaaatatcatcatggtttgaaaaaaggataaaaaagctataactaaaaaaatcttaaggataacatttggtttactaatttttaatcatttatctttcagaacttgtttcttatcaagaagttagcaggtatgatatgtatatcatacgtatataaactggcataggttacatcctagggcatgaggggagtatctttcagggattcaaatggaatttttacctgttacttgtttaattgttttgttttcaatattcttggggattagacaggggaaggtattttattactgcataatagatggtgaaacccaggaaaattaagtacttgtgcatggccccactatcaataacacaaagtctgtactctggatctcccctaatgtccctgtggtctaaacggcttgataatacaaccgagcccctgaagtagctgccctcctctttccgctcccccatctcggccctgcccatactccaagggtcagctcccatctctcctccctaatgcctcacttcaagcactaatttggctctttctgctcactaaaaatcatatattttacagatttattttgtttctggagaaggcagcaaacttttacttccctgcagaagtagttaagtacatagtgttttctctaaaaaggcatttgataaatatttgaacagcctgtagagtttcaacctctttgagatataagtatcttaaatatcatagagcactgtgattcatttttatattttattgctttgaatgctcaaactatgggaaatctttggtaaaaataaagacaataaaatcttcacaataacttta

SEQ ID NO: 1550 - DNA, 2055 bp, Homo sapiens
  source 1..2055: mol_type = genomic DNA
ggttacctggcggcgggcgggcgcggccgggagcggagggccgcggtcgcgaagaggatgaagagagagttcccgaacaagtcggaagcagctcacaacaccggacgccgcgcggcagggctgtggacctggggtggtttcgtgtcccagtcttaggaaactacgcgcgaggcaccgtgctgaggcgtagaggtcaccctcgggaggtttcggtgaaacctggtgggaaattccgggcaggcgcccggagtcgcgcccaagtaggcagctccgtgccgccagacttgtgttcgggggagttgagacgaactgcacgggtgggattgcatggctctgccctcccagcgttgacaactcgccccgaccgcccaggaagcgcgagcttactggctccagaagtgatgatgctgggtggaagtcgcagcatgtgaagagttgccggttgttatgggattaaaaaagatgaaagggttatcttatgatgaggcttttgctatggctaatgatcccttggaaggcttccatgaagtaaaccttgcttcacctacttctccggaccttcttggtgtgtatgaatcaggaactcaagagcagactacctcaccaagtgtcatctaccggccacacccttcagctttatcctctgtacctatccaggcaaatgcattagatgtttctgaacttcctacacaacccgtgtattcatcccccagacgtttaaattgtgcggaaatatctagtatcagctttcatgttacagacccagccccttgctctacctctggagtcacagctggattaactaaattaactacaagaaaggacaactataatgcagagagagagtttttacagggtgctactataacagaggcttgcgatggcagtgatgatatttttgggttgagtactgatagtctgtctcgtttacgaagcccatctgttttggaagttagagaaaagggctatgaacgattaaaagaagaactcgcaaaagctcagagggaactgaagttaaaagatgaagaatgtgagaggctttcaaaagtgcgagatcaacttggacaggaattggaagaactcacagctagtctatttgaggaagctcataaaatggtgagagaagcaaatatcaagcaggcaacagcagaaaaacagctaaaagaagcacaaggaaaaattgatgtacttcaagctgaagtagctgcattgaagacacttgtattgtccagttctccaacatcacctacgcaggagcctttgccaggtggaaagacaccttttaaaaaggggcatacaagaaataaaagcacaagcagtgctatgagtggcagtcatcaggacctcagtgtgatacagccaattgtaaaagactgcaaagaggctgacttatccttgtataatgaattccgattgtggaaggatgagcccacaatggacaggacgtgtcctttcttagacaaaatctaccaggaagatatctttccatgtttaacattctcaaaaagtgagttggcttcagctgttctggaggctgtggaaaacaatactctaagcattgaaccagtgggattacaacctatccggtttgtgaaagcttctgcagttgaatgcggaggaccaaaatcacttctgtatgtaacttttttacatacattcgatacattcagcagggactcgtgaaacagcaggatgttgatcagatgttttgggaggttatgcagttgagaaaagagatgtcattggcaaagctgggttatttcaaagaggaactctgatgctctgcgtgggaccatgcctgaactccccgaataactgaaaaatggctgaatatttttatggttacttgatatttatttccaaggagtgagcctaagacttttttccccttttgcaaattgctctaagaagtaccatgatttcttttaaactgatctatgctgtgtttgcttattctttagttgaacacactatgaagaattccaggtgtactagtgaatgtaatttatagttgccaaaaaaaaaaaaaacctgaaataaataaatgttagattg

SEQ ID NO: 1551 - DNA, 6617 bp, Homo sapiens
  source 1..6617: mol_type = genomic DNA
actgaccccgctgtaccacggccctcttgcggacagccccggggacgtcgttgggacatcgctgggaccccgggctctgcagccacaaccatgtttggccggaagcgcagtgtctcctttgggggcttcggatggatcgacaagaccatgctggcaagtctgaaggtcaagaagcaggagctggccaacagctcggatgcgaccctcccagaccggccgctctcccctcctctcacggcacctcccaccatgaagtcgtcggagttctttgagatgctggagaaaatgcaggacgactatatcccataccccagcatcgacgaggttgtggagaagggaggcccgtaccctcaggtcatcctgccacagtttgggggctattggatcgaggacccggagaacgtgggcaccccaacatcgctggggagcagcatctgtgaggaggaggaagaggacaacctcagccccaacacatttggctacaagctcgagtgcaagggtgaagccagggcctaccggaggcacttcctggggaaggatcatctaaacttttactgtaccggcagcagcctggggaacttgatcctgtccgtcaagtgcgaggaagcagaggggatcgagtacctccgggtcatccttaggtccaaactgaagacggtacatgagcggatccccttggctggactgagcaagcttcccagtgtccctcagattgcaaaggctttctgtgatgatgcagtgggactgagattcaatcctgtcctgtaccccaaggcctcccaaatgattgtgtcctatgatgagcatgaagtcaacaacacattcaaattcggagtcatttatcaaaaagccaggcagaccctggaggaggagctatttgggaacaatgaggagagcccagcttttaaggagttcttggacctgctgggggacacgatcacactgcaggatttcaaaggtttccgaggaggcctggacgtgacccacggacagacaggggtggaatcagtgtacacaacattccgggacagggagatcatgtttcacgtttccacaaagctgccatttaccgacggagacgcccagcagctccagagaaagagacacattggaaatgacatcgtggccatcatcttccaagaggaaaacacgccgtttgtcccagacatgatagcctccaatttcttacatgcctacatcgtcgtgcaggtcgagaccccaggcacagagaccccatcctacaaggtctctgtcactgcgcgggaagatgtgcccacctttggtccacctctgcccagtccccccgttttccagaagggcccggaattcagggagtttctgctcaccaagctcaccaatgccgagaacgcctgctgcaagtcggacaagtttgcaaagctggaggaccggaccagggctgccctcctggacaaccttcacgatgagctccacgcccacacacaggccatgctgggactgggcccagaggaggacaagtttgagaatggaggccacggggggttcctggagtcttttaagagggccatccgcgtacgcagccactccatggagaccatggtgggcggccagaagaagtcgcacagtgggggcatccctggcagcctcagcgggggcatctcccacaacagcatggaggtcaccaagaccaccttctcgcctccagtggtggcggcaacggtgaagaaccagtcacggagtcccatcaagcgacgctcggggctcttcccccgcctgcacacgggctcagaaggccagggcgacagccgggcacgatgtgacagcacatccagcacacccaagaccccagatggtggacactcctctcaggagataaagtctgagacctcatccaatcccagctctccggaaatctgccccaacaaggagaagcccttcatgaagttgaaggaaaacggccgtgccatctcccgctcctcctccagcaccagcagcgtcagcagcactgcaggggagggcgaggccatggaggagggcgacagtgggggcagccagccgtccacgacctcacccttcaagcaggaggtgtttgtctacagcccgtccccgagcagcgagagccccagcctgggggcagctgccaccccgatcatcatgagccggagtcccacagatgccaaaagcagaaactccccgagatcgaacctgaaattccgctttgacaagctcagccatgccagctctggtgcgggtcactaatgtgaaagtggagtccttcgcctgtccaagggaatcccctcttctgtcctggaaaaggctcctgtaccagcagtttgggagtgccgtccacgaccctgacagtcccagccctgctgccccatggccacgtgcccacagatgtgctgttggtccaggtgtcccagtctggccacagccctgcctccgccctcacctacatgccctcccagcccctcccatctctggacgaggcctccttcctcaggttcctcctgctcctgacctcccagtgtgatgtccgggtcctttatcatcctattcatcctggagaggaaaagtgtcgggcaaagggggatctggggggagctcagcagtgactggggagctggtctgcctcagagacagagtagggggtgggagcagagcctcggtgagggtcttggccacagggcagtgccttcctgaacgtggcaggctttactaccaggaacgcactcggtggtggaggccccatgttcccaggagccaagattcgtagcatccttgaggccatcctgataaaattcggcgctattgcccccgtagctctggagctctaaaccgtctatctgcttctgtgctgaacgcctttcccatctgctgacgtaggcccagggctgccctgcccctgctgccagtgtaccgtgagcggggctccagccagttcaagctcagagccagagctggacgggccagaactgcgctgcacacttcctggactgaggcggggactttgggtcccacccggtttctcctgattatggctgctgtggggtgaggggagggaggggcagccccgaggcagtctcttccctttgagaagatattttcccacaaaggggtgggaagccaggagtgagaaggaattcagggagagcaaaggagccagtgctgagatgctgctgtgttggttgaggaaaacctcgggcctgagggccaggccggagcccaggtctctgctgacaatgggggttcaaggaagacgtcgttatctcccctccccacttactcgaggagagaggtgagggggggatgacttgcgggttctgatcaggcccctgggtggggaaggggcacagtgtccctcagcagcttacgcccctggagtcttggggggcccagcctggccctggggccttttccagctactgtgcccttgggcagctgcgtctggggctcaaccccccaatcctgttcccctctccagctgcgggtctgtaggcagctgtcacatctgaagggtttctgcaacctggaccccatctgggtgtgggtcagaccctgtgacccacatgccacccccaccctccacagagcccccttgctgggacagccagctcacctccaaggacatcccctcctggcttctcccccttccgagtctgcagcgccgtgggcttctctgccgatgggcccgggttggggttaaggtgggcatcctccaggtacaacgagcctgaagagcccctttcagtgcagacggggctgcagagtgacactggctgggcacctgccccacgaccaatgacaaggatttccagctgaatgctttattcccatagggatctggacctgtgcccaagatataaatactacactttttttttttttttttaactgacattgtgaaattctccctatagcttttgccattcaagcaacattgtgatctttcttccccgccacgtgtgtgggaatgattgagtcctgtttgcaagctggagaggagctctccctttgctagtactttctctaaagtactagtctagtaaaatttattcttgttagaaggtcaacaaaatatctgtttagcttttatgaagagtcaccgtagcagcccccacggctggaaagaggcctgtacgttctggacgcgttttgttggctgggcttctggaggcactggcaaggtcaaactgcatttctttaagaacagttgcaggatctggctcgcctctgtgggaagccggcattacaggtgcttggtggatgggccgtgtcacattgccatctggggtcctttggggtttccaggttgtcaccatgctgtcccatttgggaatcccatacctgcctgtccccactgcgctggctgacccttgctgcctgctgcctcttgggagggctttgtccctgcctctgagctggtgggcaggatggctgggtggcccccagagaagcacagacctgagatggggtctccatgcccggtttgctgttggaatgatctgaacaggaccccaaatgcctcttccctctggtcatgcctcactatctctaggagctccatcctgtggcttccagagtgtgcacttccagcccacccgggcagtgctgagagggaggaggagaacaaggatggcccagcctcccctccctcccctagaccacggggcgggcagctcgggttcctggagggctgtttcccccacgctgtccctacatctgctctgatctaaaatgtctttccttttatgctgcgcccagtcttggggctcaaagatttgcccaaacctcattggccctcgtgactaggctcatctagatggtgctcacgctggtgtttgaggcatttccactgtgatctccacgaggggatgttttccgggacacatctctggctctgggaactgcctgactcactgaagaaactacttttcaggcactgtagggtcacccatatgcctccagctcagttgacgcttaaaaacaggtgcagaaaagctcgcgatggaaggtcttaatgagagtgtctgtctatgccaatcatgtaaaatgacgtttcttgaaaaagattcagtggttcagctttgtcagcatcatctcaacacaagcctgctggctctttttagcatctcatccaaccatgtcatcgtccagatgagaaatcttagcccaggtgaggggagtaacttgcttgaggtcacacagctggctgttggcaaagctgggattagaaccctcaacccagggtcccttcctctgcagcgcctacatggttggttgaataagtggctgcgtttcctggggccctgggttttggggaagccagttagctgctgctttggcactggcatggaggtgagcagtcaaggatgctggtgaggctgcagtttctgctctttttcatcaggggggatagtctctaggatttttcagtgaggacccttgggctttggatgcagcttgaaccaagaaaacgaggagggaaagggattcagtgaactattcctcagtgggatcggttcttcagctcctgatgggggctgtgtaatgggggcagaggccagggaaaaagatgctgttcacccaccctcagcttcccttttcctaaattaagaggaaaagtggtcaaagaaaaactcttcatttctccctgattcttaaacgaaggtggttaatagaaactcaggctcccgtgacaaggcaggacaagagcctgtttcgctttcctccctgaccctgccaggtgccaactcaaacactacctttctcattggtttctaagtcagtagagacagatctgttttaagcagttgggggttcgagtagatctcatgggtacaggaggccagcagggaccaggccagtcagccatgctcaggacccctcggctcctcccccagcctctagctaccctgtatcgaggcaaggggaggccagtaaagtttgccaagcctgatcctgcagcctggtggggctggctggggtattcttttaccaaactctgttttaccgccagccccttgtacaccccaatcccatgtctccctcccttcagctggaccgtgtgcccctttgggaggaagaagacaagccccactagggccaagggcagcagagccctgccgagtgagaggctgtggggcagcggctctgtcctgtgccttaccagccctggggaggggggcatttggctggaagactggaatttaattgccatcgtctttgattttgtgacatttctgcttggaagtgtgaactacccccccccccccgcttcctgctccttagcatgcgtgcagctctctcctgttttgggtgttccccttggacactccagctcggggactgctggcgtgtgaatgtgcagattcccctgtgtggtcgaacctaagaactgtggcttggaagtgatgctccatgtgacgacgactttgctttctttcctcttagtgaggaggtgattcgtagatcccaactgcctatgtaatgtaaataatgtacatttaatttattgctatggtagcacattgtatttgttaatgtacaaaacaaattctaaaaggttgacaaatgtatattttgttgcttaaatgtgtctttgcagaaattgacaataaataacatattttgtgtcc

SEQ ID NO: 1552 - DNA, 2313 bp, Homo sapiens
  source 1..2313: mol_type = genomic DNA
attcatccccagcgcagagcagcgctggcagccggcgccgcgatggaggaagagctgaagtgtcccgtgtgcggctctctgtttcgggagcctatcatcctgccctgttcccacaatgtctgcctgccttgcgctcgcaccatcgcggtgcagaccccggacggtgagcagcacctgccccagccgctcctgctttcccggggatcggggctgcaggcgggcgccgccgccgctgcctctctggagcacgacgctgcggctggcccggcctgcggcggtgcaggcgggagtgcagctggcggcctcggcggcggtgcgggaggtggcggagaccacgcggacaagctcagcttgtacagcgagacagacagcggctacgggtcctacaccccgagcctcaagtcccccaacggggttcgcgtgctgcccatggtgcccgcaccacccggctcctcggctgcggcggctcggggtgccgcctgctcctcgctgtcctcgtcttcgagctccatcacgtgcccgcagtgccaccgcagcgcatccctggaccaccgcggcctgcgcggcttccagcgcaaccggctgctcgaggccatcgtgcagcggtaccagcagggccgcggggccgtgccggggacgtctgcagccgcggcggtggccatctgccagctgtgcgaccgcaccccgccagagccagcagccacgctctgcgagcagtgcgacgtcctctactgctctgcctgccagctcaagtgccatccatcccggggacccttcgccaagcatcgcctggtgcagccgccgccgccgccgccgccgcccgccgaggcagcctccgggcccactggcaccgcccagggcgcccccagcggaggcggcggctgcaagagcccgggaggcgcgggggcgggggcgactgggggcagcacggcccgcaagttccccacgtgtcccgagcatgaaatggagaactacagcatgtactgcgtgagctgtcgaaccccggtgtgttatctgtgcctggaggagggccggcacgccaagcacgaggtgaagccgctgggggccatgtggaagcagcacaaggcacaactatctcaggccttaaatggagtttcagataaggcaaaggaagcaaaggagtttctggttcagctaaagaacatattgcagcagatccaggaaaacggactggactacgaagcctgcctcgttgctcagtgtgatgcccttgtggatgctttaactcgtcagaaagccaagctgctcaccaaggtgactaaagagagggaacacaagttgaagatggtttgggaccagatcaatcactgcacattgaagctgcgtcagtccaccggactgatggagtactgcctggaggtgatcaaggagaacgacccctccgggttcttacagatctcagatgctctgatcaagcgcgtccaggtgtctcaggagcagtgggtcaaaggcgccctggagccgaaagtgtctgcggagtttgatctgactttggacagcgagccgctgctgcaggccatccaccagctggacttcattcagatgaaatgtagggtgccacccgtccccctactgcagctggagaaatgctgcacccgtaacaacagcgtcacgctggcctggaggatgccacccttcacccacagccccgtggacggctacatcctggagctggacgacggtgccgggggacagttccgggaagtgtacgtcggtaaggagactttgtgtaccatcgacggtcttcacttcaacagcacctacaacgcccgagtcaaagctttcaactcttctggtgtcgggccttacagtaaaactgtcgtcctgcagacatccgatgtggcctggttcacatttgaccccaactctgggcatcgggacatcattttatccaatgacaaccagacagccacctgcagcagctatgacgaccgggtggtgctgggcacagctgcgttctccaagggcgtgcactactgggagctgcacgtggaccggtacgacaaccacccagaccccgccttcggggtggccagggccagcgtggtcaaggacatgatgctgggcaaggatgacaaggcctgggccatgtatgtggacaacaaccgcagctggttcatgcactgcaactcccacaccaacaggacggaaggtggcgtgtgcaagggggccaccgtgggcgtgctgctggacctgaataagcacactctcaccttcttcatcaacgggcagcagcagggccccacagccttcagccacgaggttcagccctcggttacttccctcttttaa

SEQ ID NO: 1553 - DNA, 3936 bp, Homo sapiens
  source 1..3936: mol_type = genomic DNA
atggaggaagagctgaagtgtcccgtgtgcggctctctgtttcgggagcctatcatcctgccctgttcccacaatgtctgcctgccttgcgctcgcaccatcgcggtgcagaccccggacggtgagcagcacctgccccagccgctcctgctttcccggggatcggggctgcaggcgggcgccgccgccgctgcctctctggagcacgacgctgcggctggcccggcctgcggcggtgcaggcgggagtgcagctggcggcctcggcggcggtgcgggaggtggcggagaccacgcggacaagctcagcttgtacagcgagacagacagcggctacgggtcctacaccccgagcctcaagtcccccaacggggttcgcgtgctgcccatggtgcccgcaccacccggctcctcggctgcggcggctcggggtgccgcctgctcctcgctgtcctcgtcttcgagctccatcacgtgcccgcagtgccaccgcagcgcatccctggaccaccgcggcctgcgcggcttccagcgcaaccggctgctcgaggccatcgtgcagcggtaccagcagggccgcggggccgtgccggggacgtctgcagccgcggcggtggccatctgccagctgtgcgaccgcaccccgccagagccagcagccacgctctgcgagcagtgcgacgtcctctactgctctgcctgccagctcaagtgccatccatcccggggacccttcgccaagcatcgcctggtgcagccgccgccgccgccgccgccgcccgccgaggcagcctccgggcccactggcaccgcccagggcgcccccagcggaggcggcggctgcaagagcccgggaggcgcgggggcgggggcgactgggggcagcacggcccgcaagttccccacgtgtcccgagcatgaaatggagaactacagcatgtactgcgtgagctgtcgaaccccggtgtgttatctgtgcctggaggagggccggcacgccaagcacgaggtgaagccgctgggggccatgtggaagcagcacaaggcacaactatctcaggccttaaatggagtttcagataaggcaaaggaagcaaaggagtttctggttcagctaaagaacatattgcagcagatccaggaaaacggactggactacgaagcctgcctcgttgctcagtgtgatgcccttgtggatgctttaactcgtcagaaagccaagctgctcaccaaggtgactaaagagagggaacacaagttgaagatggtttgggaccagatcaatcactgcacattgaagctgcgtcagtccaccggactgatggagtactgcctggaggtgatcaaggagaacgacccctccgggttcttacagatctcagatgctctgatcaagcgcgtccaggtgtctcaggagcagtgggtcaaaggcgccctggagccgaaagtgtctgcggagtttgatctgactttggacagcgagccgctgctgcaggccatccaccagctggacttcattcagatgaaatgtagggtgccacccgtccccctactgcagctggagaaatgctgcacccgtaacaacagcgtcacgctggcctggaggatgccacccttcacccacagccccgtggacggctacatcctggagctggacgacggtgccgggggacagttccgggaagtgtacgtcggtaaggagactttgtgtaccatcgacggtcttcacttcaacagcacctacaacgcccgagtcaaagctttcaactcttctggtgtcgggccttacagtaaaactgtcgtcctgcagacatccgatgtggcctggttcacatttgaccccaactctgggcatcgggacatcattttatccaatgacaaccagacagccacctgcagcagctatgacgaccgggtggtgctgggcacagctgcgttctccaagggcgtgcactactgggagctgcacgtggaccggtacgacaaccacccagaccccgccttcggggtggccagggccagcgtggtcaaggacatgatgctgggcaaggatgacaaggcctgggccatgtatgtggacaacaaccgcagctggttcatgcactgcaactcccacaccaacaggacggaaggtggcgtgtgcaagggggccaccgtgggcgtgctgctggacctgaataagcacactctcaccttcttcatcaacgggcagcagcagggccccacagccttcagccacgtggacggggtcttcatgccagccctcagcctcaaccgcaacgtgcaggtcaccctgcacacaggattggaagtgccgactaacctggggcggccaaagctgtcaggcaattagccccgctccagctcggcactgtgcctgtgacagtgacattcacaggcaaaacgcccaccattctcactaagctcaaataacccacaaaagcaggatatgcaaatcatgggtgcaacctggcagcgtggagtgtcatagaaacacattttcttggggacgcagggaatgggtccacgggccatgctcacagctgccactgtcagtggcaaaggaaggtacgtgtgtcacccttattccacccagacattacgaacactccccaagaaggacctttctcaagggagtcagcattcgggcttcatgtctatgtttcctgccatctgttttcaaagcttgtctttttttggagggagaggaaggtagactttgagactggcctcctgagagcggcagtcaggagctgcgctgtaatcccacgccccgggtgttggccctccgtggggaccttgcctcctcagagtcccgagattgcagattctcatcatgctgagaaagttatcttttagcttcttggtcctagagtctttagtagcacctgccacttgcagacccaatgcaggattgatagaaagggacattaatcattcatgcttgacttttgcctctctcactgaagtgttagaaccttttaaaatggcttcctttattaatcagccaattgtgttctctctctctcttcctccatccttcatttcttctccctccctccttctctttctctcttcttctctctctccttccttccctcctttgctctctctttcttcctttcctccttctctcttactttcctccatccctgcctctttcttccctctttcgctctctttccctccctccttctctctctctctcacacacacacaggcatgacagtctcctaaaattaattcactcagttcttagttcttaaatccacgtgaaaacacaagaattttaacaactatgtcataggtcttcgcctggtgatggctcctttctgaaactggcagcccaagaagttaactgaaaatgcatccagattgctcttctgagctgaaccactctcagactcataagcatttaaaatgggagaccctgggaaagcctgttctagtcagtccaccctattgtcattatgaaagcatcatgaacacaagtggcccctgtggcaggccgggacggctctgccctgatgcagtgggcgggatctctggggaaggcaggaaatagaagggcagtatcaggtaccttgtctcccagcttcccactgtgagactgggtgtgccgagtctgacctgccagggcaggactctggaaacaccaggcttctcccttgagatccacattgattcatccacacctctcagagacagctcatggcaggggttttgagcctgccaggctcttgttcccagggaacccttcctctcctccctcctctcatcttcccagtcacctgccacctccagctccacctggtagtaacatttctctctccttttaaaaagaatatattttgtcaagcattttatttctgaggctgagaagtgacttgtcaatttgctggactggatttttataaaattcgcccattcaccagca

SEQ ID NO: 1554 - DNA, 4399 bp, Homo sapiens
  source 1..4399: mol_type = genomic DNA
ctgctagaaatgcaaataacagaaggtggagggggtagggaacatgccttccagattattcctgtgggtactgatctgctagctaaattgagatgtactttatcaggctaaatggcttttctctccccgatcttttattgtttgtgatggagttgtcaaatatttgcatgcaatataaatacaatttttaggcagcgttgtgatatggatggtgcctgtatttaccagctcagcactgccagtgaaagatgtagaagataaacctgaacaacaaaccagaacaagagagactgacaaatcacccaccagtactgagcctcgacagcaaccaagtgccttatttgctagaggaaacaggaaagcggtcaaaagtccccaaagatcatcgagtaaaataaaagaaaacaagcatccatttgctctttatggctggggagaaaaacagaccgatacaggaagccagaagactcacaacgtctgtgcgtccgctcctgtgcacgagattcatgaatcagcattacgagccaagaacagaagacaggtggaaaaaaggaaactggttgctcaaaggcagcgagctcactctgtggatgtggagaagaacagaaagatgaaggcttcctcctcagagaacccgtggatgacagaatacatgaggtgctattcggcaagagcttaaagaaacacttgcgtggacagcctcttttaaaaagtgtaaatgactgaaaggaaaaacaaaacaaaaaccatcaaaagaaacggacacaggtttaagaaaccaactgattatgcaaggttttttttagggaatttgtaaaagattgttttattttgatgaatattggtcacctacctcggcagtagggcagacagttgaagccatagacatttggttatttatgaagataattccctaaatctttgatattcttataaggtttttgttttaaagcatcttaatcttttaagatactgacaccaaatgcctttaaatggcaacagatgcttacagttcagtattcttttcataagcttaggtagagcctattatcatcttgttctaaataactttccagattccatagctataagatcattccatcctacagcataagactcgttttccttatatgccgttttgtttgtgaaagaatatcaagtcaaaaatgagtgtcagcactactactgattccatgtataatgaaagtagaactttgctagttcctgaaaatttttaacttatttgtatttcagttcagcagcatctttatgtagattgtgatatttaagaattatctgggctgggcgagggtctctttttctctttcagtgatcatctaggcagttattatttaatagtttaatagctcaagtacattccaatagacgaagtgcacacaacacaatatgtgtgtacagtagtagtaaagtttcttttgagtagtcaaagactcactttttttattgcctttttttttttttttaaagaatacatactgtggattcagtcccttgtcacacttgaccttttggcatacacccactgtggacttttgcctcttctgtaatggctggcaatgacatttcaaacttacaatctggaattgcacttggtacattggcattgcttgttccactgggatggggaccagtgtgaagatgcctgttagatagactgcccacccctactttctctttttctttatagcacttaacaataacaaagtcttgatgatgtacagtattcaaactttaggttgaaatacgttactctttgattcctagccagtagatcttatctacactttaatgggagagaatggtggtgtgtgggtaggcacaaatttatgtaaatagtgctccttctctttagtatgtttgctttgggggtagaaaaatggttttaacaaacactggtttccatcaaatgaatgatgtcttctccatcctgtggagacaagaatctgctagaaggatatgtgctaagttccttataagagataatggtgctctgcctatgccagcttggcacccgaagatgtgtgagtggacgtgaggctgagtattaccttagtatttttctctgggtctttggaaaaccatagtcaatttttagaacatattgctttcattccccataaactcttcacacatgataactgtttaagctttgaaaacacatactgaagtattgtgagcttaaaaaaactttttaaatatttgcatagttttgaggtgaatttgtttccttacagatctctcctaatcattgagatgtatatttcaaaagaggaaattttacatgttgtccaaaacagccttgctagtaactggtgaattttggtattaactattattaaagtctttaaacgacacaggtacctaaagatcaccttaatgtggcaatttgtgatggtgtagctagctgattgtgaaaactgttcctttaaagtcgcttcttgcatgttcggtgttagtcatccagctcaggcttgtgttgcagctgacaatctaggaaagacggccttagagagtggtgcaggccccacactgacggactgccttagaaacccgacttcctctagactttgaaccgccagacttttctcttgtttagaaaacaaacttatatttaatgtacttactacttaaaactccagacagagatataatgtagaaggcaaatattggccaattttttcctctttttaagtggaagacaaatgaacgggatttttaaagtgcttttaaagtgcatgaatggttaataaatcagtatgaattgtaagccttcatcttacatccaagtccttagttggttagggtttcttttctttcttttttaaagagtgtcaattaccttttgaacctgtgaaaatttgatagttgttaacagtctgatggtcctaattctttcttttcattctagaaatgaatgtggttgtaatcatgttcctaattcttgggacaacctgcaagacagtgagacagtttaaaaattacctttcatgttgaaaaagtctgaaacagagaacccaatgatatttaaaataaatgctacataaaactctttttaaaattttgattttaacttaattaaaacaatgtcataaatatgctttttgattttgttactgcttttaatattaaagtaatagaatattgaagcaatattgtctagcactctgctggacattaagtccgcgggaggagaagtgaacaggaatcgattctttgtcttttaactgcccttagttaggagatgttaaaatacttggcacctctggttatatgtatgttatgtgtgttctcccccctaaaatttctaagcacatttattcacttttaaaatgaatctttaaaagattatagttagtagttatagttaatattctatttacttggaaaaatgtgaataaatggatcttcaaaagattcattttaaaaatgaataaatgtataataggctataggtgatcttacttgcgtattaggtaggaggcacatatttataccatttcatatgtaatatctttgtcattgtgtttcatcgaagatcaattgctagcaacttgaagggtatttatacttgggtcacttgaactcagctgactaaattgtaagaacgagagcaagcaagatggctgttattggaagccataacttccagaagataattctgcacaattcgtaagttaaaaaaaatctgtagggtcttccactatcctttttcaggttgataatgctgttctgggcacacactttgtaaatggaatgttatggtacagtcgcctctcagtatccatggggcattggttccaggcctcccttaggatgccaaactccatggatactcaaaccccttctataaaatggtgtagtatttgcatatatcctagacacatcctcctgtatgctttaaatcatctctagattacttaaaatacctaatacaatgtaaatgctctgtaaatagttgttatactatattgtttagggaataatgacaaggaaaaaaaagcctgtacatgttcagcacaagtgaaaccatcctttttgcccccaaatattttcaatttgtatttggttgaatccatggatgcagaactcacggatacagagggccgactgtactttctttaaagtgttcaaaagtattactagcaaagaggaggaggagcaaagcatatatcagaagtaaaacaatttttcttgttgactgctttggtaaaaaacagtttgatggatagttttacatttcactggactagataaaaaatggtgctaatatttatgtagcttgatgctatagttgctttggtatcaaacttaatacctaacccatataagatccttattatataattttgtgatcagtaaaatgatattttaaagagtg

SEQ ID NO: 1555 - DNA, 5089 bp, Homo sapiens
  source 1..5089: mol_type = genomic DNA
gtaggctgcgggcagcgaggagcggctggcgctcgaggcggcggacggcaccatgtccccggggagcggggtgaagagcgagtacatgaagcgctaccaggagccgcgctgggaggagtacgggccgtgctaccgcgagctgctgcactaccgcctaggccgccggctgctggagcaggcgcacgcgccctggctctgggacgactggggcccggccggctcctcggaggactcggcgtcgtcagagtcgtcgggcgccgggggccccgcaccccggtgcgccccgccctcgcccccgccgcccgtagagccggcgacccaggaggaggcggaacggcgggcgcgcggggccccggaggagcaggacgcggaggccggggacgcggaggccgaggacgcggaggacgcggctctgccagcactgccagtgaaagatgtagaagataaacctgaacaacaaaccagaacaagagagactgacaaatcacccaccagtactgagcctcgacagcaaccaagtgccttatttgctagaggaaacaggaaagcggtcaaaagtccccaaagatcatcgagtaaaataaaagaaaacaagcatccatttgctctttatggctggggagaaaaacagaccgatacaggaagccagaagactcacaacgtctgtgcgtccgctcctgtgcacgagattcatgaatcagcattacgagccaagaacagaagacaggtggaaaaaaggaaactggttgctcaaaggcagcgagctcactctgtggatgtggagaagaacagaaagatgaaggcttcctcctcagagaacccgtggatgacagaatacatgaggtgctattcggcaagagcttaaagaaacacttgcgtggacagcctcttttaaaaagtgtaaatgactgaaaggaaaaacaaaacaaaaaccatcaaaagaaacggacacaggtttaagaaaccaactgattatgcaaggttttttttagggaatttgtaaaagattgttttattttgatgaatattggtcacctacctcggcagtagggcagacagttgaagccatagacatttggttatttatgaagataattccctaaatctttgatattcttataaggtttttgttttaaagcatcttaatcttttaagatactgacaccaaatgcctttaaatggcaacagatgcttacagttcagtattcttttcataagcttaggtagagcctattatcatcttgttctaaataactttccagattccatagctataagatcattccatcctacagcataagactcgttttccttatatgccgttttgtttgtgaaagaatatcaagtcaaaaatgagtgtcagcactactactgattccatgtataatgaaagtagaactttgctagttcctgaaaatttttaacttatttgtatttcagttcagcagcatctttatgtagattgtgatatttaagaattatctgggctgggcgagggtctctttttctctttcagtgatcatctaggcagttattatttaatagtttaatagctcaagtacattccaatagacgaagtgcacacaacacaatatgtgtgtacagtagtagtaaagtttcttttgagtagtcaaagactcactttttttattgcctttttttttttttttaaagaatacatactgtggattcagtcccttgtcacacttgaccttttggcatacacccactgtggacttttgcctcttctgtaatggctggcaatgacatttcaaacttacaatctggaattgcacttggtacattggcattgcttgttccactgggatggggaccagtgtgaagatgcctgttagatagactgcccacccctactttctctttttctttatagcacttaacaataacaaagtcttgatgatgtacagtattcaaactttaggttgaaatacgttactctttgattcctagccagtagatcttatctacactttaatgggagagaatggtggtgtgtgggtaggcacaaatttatgtaaatagtgctccttctctttagtatgtttgctttgggggtagaaaaatggttttaacaaacactggtttccatcaaatgaatgatgtcttctccatcctgtggagacaagaatctgctagaaggatatgtgctaagttccttataagagataatggtgctctgcctatgccagcttggcacccgaagatgtgtgagtggacgtgaggctgagtattaccttagtatttttctctgggtctttggaaaaccatagtcaatttttagaacatattgctttcattccccataaactcttcacacatgataactgtttaagctttgaaaacacatactgaagtattgtgagcttaaaaaaactttttaaatatttgcatagttttgaggtgaatttgtttccttacagatctctcctaatcattgagatgtatatttcaaaagaggaaattttacatgttgtccaaaacagccttgctagtaactggtgaattttggtattaactattattaaagtctttaaacgacacaggtacctaaagatcaccttaatgtggcaatttgtgatggtgtagctagctgattgtgaaaactgttcctttaaagtcgcttcttgcatgttcggtgttagtcatccagctcaggcttgtgttgcagctgacaatctaggaaagacggccttagagagtggtgcaggccccacactgacggactgccttagaaacccgacttcctctagactttgaaccgccagacttttctcttgtttagaaaacaaacttatatttaatgtacttactacttaaaactccagacagagatataatgtagaaggcaaatattggccaattttttcctctttttaagtggaagacaaatgaacgggatttttaaagtgcttttaaagtgcatgaatggttaataaatcagtatgaattgtaagccttcatcttacatccaagtccttagttggttagggtttcttttctttcttttttaaagagtgtcaattaccttttgaacctgtgaaaatttgatagttgttaacagtctgatggtcctaattctttcttttcattctagaaatgaatgtggttgtaatcatgttcctaattcttgggacaacctgcaagacagtgagacagtttaaaaattacctttcatgttgaaaaagtctgaaacagagaacccaatgatatttaaaataaatgctacataaaactctttttaaaattttgattttaacttaattaaaacaatgtcataaatatgctttttgattttgttactgcttttaatattaaagtaatagaatattgaagcaatattgtctagcactctgctggacattaagtccgcgggaggagaagtgaacaggaatcgattctttgtcttttaactgcccttagttaggagatgttaaaatacttggcacctctggttatatgtatgttatgtgtgttctcccccctaaaatttctaagcacatttattcacttttaaaatgaatctttaaaagattatagttagtagttatagttaatattctatttacttggaaaaatgtgaataaatggatcttcaaaagattcattttaaaaatgaataaatgtataataggctataggtgatcttacttgcgtattaggtaggaggcacatatttataccatttcatatgtaatatctttgtcattgtgtttcatcgaagatcaattgctagcaacttgaagggtatttatacttgggtcacttgaactcagctgactaaattgtaagaacgagagcaagcaagatggctgttattggaagccataacttccagaagataattctgcacaattcgtaagttaaaaaaaatctgtagggtcttccactatcctttttcaggttgataatgctgttctgggcacacactttgtaaatggaatgttatggtacagtcgcctctcagtatccatggggcattggttccaggcctcccttaggatgccaaactccatggatactcaaaccccttctataaaatggtgtagtatttgcatatatcctagacacatcctcctgtatgctttaaatcatctctagattacttaaaatacctaatacaatgtaaatgctctgtaaatagttgttatactatattgtttagggaataatgacaaggaaaaaaaagcctgtacatgttcagcacaagtgaaaccatcctttttgcccccaaatattttcaatttgtatttggttgaatccatggatgcagaactcacggatacagagggccgactgtactttctttaaagtgttcaaaagtattactagcaaagaggaggaggagcaaagcatatatcagaagtaaaacaatttttcttgttgactgctttggtaaaaaacagtttgatggatagttttacatttcactggactagataaaaaatggtgctaatatttatgtagcttgatgctatagttgctttggtatcaaacttaatacctaacccatataagatccttattatataattttgtgatcagtaaaatgatattttaaagagtgatcttaaaaatatgacctggtcattgcacaacgtttgcatttgaaatgaatttgtgtactatagggtggatatggagttattcagtgcaagtgtgtgcttaatatcaaaccctatgcaaggagctatgtctagatttttggtccaaatttgcctccttcaagcctactagtgtgagatggaaaaaaatcgattgctcttttaatattatttccattttgaaattctcgacacttgaatgaaggcagtagaggcctctttttggatttctcttctaataacaaaactttatttagggaaggtttccctgtgctatcgtaagtttgttttgagcactgcattcactttaaaattctggaggaacaaaggctgggcacataatcacaaagcccaggccacacaataattcggggttgtattttctaagaactatgtattgtttttagcttatagttaatattgtatttacttggaaaaatgtgaataaagttaattaacattacaag

SEQ ID NO: 1556 - DNA, 2511 bp, Homo sapiens
  source 1..2511: mol_type = genomic DNA
ctacgtcccgcgtcccccgagcgctcggagcctacgcgcccagcgctaccgaaacccagagtcctgcgccctggagtccccgcgccccggagcccgagcacccgggagtcccgagcctcgcgccccggagtgcccgagcctgcgccgccgcacccggataccccgcgtccccgcgagctgccgaggccgcccgccgccgccccgcggacagtaccgccttcctcccctctgtccgcgccatggccgcccccgacctgtccaccaacctccaggaggaggccacctgcgccatctgcctcgactacttcacggatccggtgatgaccgactgcggccacaacttctgccgcgagtgcatccggcgctgctggggccagcccgagggcccgtacgcgtgccccgagtgccgcgagctgtccccgcagaggaacctgcggcccaaccgcccgcttgctaagatggccgagatggcgcggcgcctgcacccgccgtcgccggtcccgcagggcgtgtgccccgcgcaccgcgagccactggccgccttctgtggcgacgagctgcgcctcctgtgtgcggcctgcgagcgctctggggagcactgggcgcaccgcgtgcggccgctgcaggacgcggccgaagacctcaaggcgaagctggagaagtcactggagcatctccggaagcagatgcaggatgcgttgctgttccaagcccaggcggatgagacctgcgtcttgtggcagaagatggtggagagccagcggcagaacgtgctgggtgagttcgagcgtcttcgccgtttgctggcagaggaggagcagcagctgctgcagaggctggaggaggaggagctggaggtgctgccccggctgcgggagggcgcagcccacctaggccagcagagcgcccacctagctgagctcatcgccgagctcgagggccgctgccagctgcctgctctggggctgctgcaggacatcaaggacgccctgcgcagggtccaggatgtgaagctgcagcccccagaagttgtgcctatggagctgaggaccgtgtgcagggtcccgggactggtagagacactgcggaggtttcgaggtaggtgtggaggccccaggtggggagatgactccaggaggggacctgccaaggacctgggcagccagccacgtgttctgtgccctgccactgccagctccaaactcacagtgtcatggtggtgggttgttgggaaaacgtcctctgctcatacttctgacatcagttgtgtgggtattttcacaccaaacaattcttcaacttctggaaacgaattgggtatccaaggattccattcagcattgaacagaattgccagtgctgacactacaggagttagtacagaccccacagattaagggctcagtcccataagactgcccccacttcagatgccagtcacaacttccaggggctgcccatacttctgttccctcagcgcctctgcagatgtgagcattcgctagcacagcccatggaactcagaagagcactttacttactgtcattggtttattgtgaaggataccactcaggaagagccaaatggaagagacacatgggcaaagcctggggaagggctcagagctttcccaccctccctgggtgcaccttcccagcacctcagtgtgctcaccaacctggaaactccctgagccccaagagctgtttaggtgtctttgtggaggttccattacatggttatgattgattaaatcattggtcattggtgatggggctcaacctcagacccctttccccttcctgaggtcagaggctggggctgagtgttcccgccctctactgacaggattggtctttctggtggctggccttatgctgggctctcaggtccccacctcagccactgcagtggcatcaactcaggtgtgatggaaaggggcatcttatgatagcacaagatgcttctatcagtcaggaaattcccagggttctgtgagctctgcgccaggaactgggcacaaaacccaaatctgagtcttgtatcacagtcacccaaaggaagtactatcctcagctcttgctagcaggtcaggagcctgttgtgtaggaactgtgtgcaggcctccagaggtggatagatctgaaatcggagtggtcagggttgggacagctgccctaattcacatccttcatttggagattgaaaggaaaaacagactggatgcattggctcacctctgtaatcccagcactttgagaggctcaggcgggaggattgcttgaggccatcagttcaagaccaacccgggaaacatagcaagactcccatctctacaaataaaaaacaaaaaaatgagccagccatggtggcacacgcctgtaatcccagcagcttgggaggatctgaggcgggaggatcatttgagcccaggagatcaaggctgcagtgagccatgatcgcaccactgcactgcagcctggggccacagagcaagaccctgcctcttt

SEQ ID NO: 1557 - DNA, 2534 bp, Homo sapiens
  source 1..2534: mol_type = genomic DNA
caggatgcagaggccacggaggagggctgggccagcttctcctgtgagctgtcccacgaggatgaggaggtcgagtggtcgctcaacgggatgcccctgtacaacgacagcttccatgagatctcacacaagggccggcgccacacgctggtactgaagagcatccagcgggctgatgcgggcatagtacgcgcctcctccctgaaggtgtcgacctctgcccgcctggaggtccgagtgaagccggtggtgttcctgaaggcgctggatgacctgtccgcagaggagcgcggcaccctggccctgcagtgtgaagtctctgaccccgaggcccatgtggtgtggcgcaaagatggcgtgcagctgggccccagtgacaagtatgacttcctgcacacggcgggcacgcgggggctcgtggtgcatgacgtgagccctgaagacgccggcctgtacacctgccacgtgggctccgaggagacccgggcccgggtccgcgtgcacgatctgcacgtgggcatcaccaagaggctgaagacaatggaggtgctggaaggggaaagctgcagctttgagtgcgtcctgtcccacgagagtgccagcgacccggccatgtggacagtcggtgggaagacagtgggcagctccagccgcttccaggccacacgtcagggccgaaaatacatcctggtggtccgggaggctgcaccaagtgatgccggggaggtggtcttctctgtgcggggcctcacctccaaggcctcactcattgtcagagagaggccggccgccatcatcaagcccctggaagaccagtgggtggcgccaggggaggacgtggagctgcgctgtgagctgtcacgggcgggaacgcccgtgcactggctgaaggacaggaaggccatccgcaagagccagaagtatgatgtggtctgcgagggcacgatggccatgctggtcatccgcggggcctcgctcaaggacgcgggcgagtacacgtgtgaggtggaggcttccaagagcacagccagcctccatgtggaagaaaaagcaaactgcttcacagaggagctgaccaatctgcaggtggaggagaaaggcacagctgtgttcacgtgcaagacggagcaccccgcggccacagtgacctggcgcaagggcctcttggagctacgggcctcagggaagcaccagcccagccaggagggcctgaccctgcggctcaccatcagtgccctggagaaggcagacagcgacacctatacctgcgacattggccaggcccagtcccgggcccagctcctagtgcaaggtgaggcggccaagtgtgctcgggcctaggctttgaatggcacggagacttggaggtggacaggcccagcctcagtttcttatcatgagggtatagggggtgcaccctgggtggtcactgaggctccccagcatggctgtgaatgagctgctggtgctcacttactcgtgtgtttatttggtcactgtgtgtttctcccacatgccccgtgtgcctggcccccatgcgtaagctcagcgtgtatccgtacataaaacgtgtcacccttatcccagagggacagcctgactcagccgtgccaggcagcctcaggtgctcccagggaagaactgatggtcattagggttgtcattgagagttacagtggcattttagtctttttcttgttgtttacaacagaatacctgaaactgggtaatttataaaggaaataaatttacttcttacagctctggaggctgggaagtccaaggtcaaggggccacatctggtgagggcccttttgctgacaggaactctctgcagagtccccaagggacggcacagggcatcccatggggagggggctgagtgtgctagcttgggcctctcttcatcttcttttaaagccaccactcatatggaagcactttaacccattaacctgttaacccgttgatccatgaatgggttaatccattcccgccttggacccaatcccctcttaaaggctccacctcttaatattgccacattgggattaagtttcaacatgagtttccagggggacattcagatcatagtaggtggctgttcgatcttactgtttggctccacatttgagtggcaggcagagtgagagctgtcattctctcaactctgtagataagaaaactgaagctttagtgggtccatggccagggcaaggtcatcaggcacattgggatcagagcaggcgaggcccagccccatcaccgcagccttcacttggctctgaagtcccgggctggtgtccagagctgagtttgcaggaggtccctactggggtctgaccacagggcgttcacagggttcagtatttgaaaggccccagttgtgatcatcagaagtaacgtaaaccaggaatcatcactgattttttctctccaatggatttggtgaccctggtgaaagtattctgttagcacagtaacgccccatgatctaataaagttggtacccagagttaatttttaaaaaagtc

SEQ ID NO: 1558 - DNA, 2712 bp, Homo sapiens
  source 1..2712: mol_type = genomic DNA
ctgacaacgtgcgcatccgccaggaaggaaggacatacactctcatctaccggagagtcctggcggaagatgcaggagagatccaatttgtagccgaaaatgcagaatcgcgagcccagctccgagtgaaggagctgccagtgaccctcgtgcgcccgctgcgggacaagattgccatggagaagcaccgcggtgtgctggagtgtcaggtgtcccgggccagcgcccaggtgcggtggttcaagggcagtcaggagctgcagcccgggcccaagtacgagctggtcagtgatggcctctaccgcaagctgatcatcagtgatgtccacgcagaggacgaggacacctacacctgtgacgccggtgatgtcaagaccagtgcacagttcttcgtggaagagcaatccatcaccattgtgcggggtctgcaggacgtgacagtgatggagcccgctcctgcctggtttgagtgtgagacctccatcccctcagtgcggccacctaagtggctcctggggaagacggtgttgcaggctggggggaacgtgggcctggagcaggagggcacggtgcaccggctgatgctgcggcggacctgctccaccatgaccgggcccgtgcacttcaccgttggcaagtcgcgctcctctgcccgcctggtggtctcagacatccccgtagtcctcacacggccgttggagcccaagacagggcgtgagctgcagtcagtggtcctgtcctgcgacttccggccagcccccaaggctgtgcagtggtacaaggatgacacgcccctgtctccctctgagaagtttaagatgagcctggagggtcagatggctgagctgcgcatcctccggctcatgcctgctgatgctggtgtctaccggtgccaggcgggcagtgcccacagcagcactgaggtcactgtggaagcgcgggaggtgacagtgacagggccgctacaggatgcagaggccacggaggagggctgggccagcttctcctgtgagctgtcccacgaggatgaggaggtcgagtggtcgctcaacgggatgcccctgtacaacgacagcttccatgagatctcacacaagggccggcgccacacgctggtactgaagagcatccagcgggctgatgcgggcatagtacgcgcctcctccctgaaggtgtcgacctctgcccgcctggaggtccgagtgaagccggtggtgttcctgaaggcgctggatgacctgtccgcagaggagcgcggcaccctggccctgcagtgtgaagtctctgaccccgaggcccatgtggtgtggcgcaaagatggcgtgcagctgggccccagtgacaagtatgacttcctgcacacggcgggcacgcgggggctcgtggtgcatgacgtgagccctgaagacgccggcctgtacacctgccacgtgggctccgaggagacccgggcccgggtccgcgtgcacgatctgcacgtgggcatcaccaagaggctgaagacaatggaggtgctggaaggggaaagctgcagctttgagtgcgtcctgtcccacgagagtgccagcgacccggccatgtggacagtcggtgggaagacagtgggcagctccagccgcttccaggccacacgtcagggccgaaaatacatcctggtggtccgggaggctgcaccaagtgatgccggggaggtggtcttctctgtgcggggcctcacctccaaggcctcactcattgtcagagagaggccggccgccatcatcaagcccctggaagaccagtgggtggcgccaggggaggacgtggagctgcgctgtgagctgtcacgggcgggaacgcccgtgcactggctgaaggacaggaaggccatccgcaagagccagaagtatgatgtggtctgcgagggcacgatggccatgctggtcatccgcggggcctcgctcaaggacgcgggcgagtacacgtgtgaggtggaggcttccaagagcacagccagcctccatgtggaagaaaaagcaaactgcttcacagaggagctgaccaatctgcaggtggaggagaaaggcacagctgtgttcacgtgcaagacggagcaccccgcggccacagtgacctggcgcaagggcctcttggagctacgggcctcagggaagcaccagcccagccaggagggcctgaccctgcggctcaccatcagtgccctggagaaggcagacagcgacacctatacctgcgacattggccaggcccagtcccgggcccagctcctagtgcaaggtgaggcggccaagtgtgctcgggcctaggctttgaatggcacggagacttggaggtggacaggcccagcctcagtttcttatcatgagggtatagggggtgcaccctgggtggtcactgaggctccccagcatggctgtgaatgagctgctggtgctcacttactcgtgtgtttatttggtcactgtgtgtttctcccacatgccccgtgtgcctggcccccatgcgtaagctcagcgtgtatccgtacataaaacgtgtcacccttatcccagagggacagcctgactcagccgtgccaggcagcctcaggtgctcccagggaagaactgatggtcattagggttgtcattgagagttacagtggcattttagtctttttcttgttgtttacaacagaatacctgaaactgggtaatttataaaggaaataaa

SEQ ID NO: 1559 - DNA, 25575 bp, Homo sapiens
  source 1..25575: mol_type = genomic DNA
gctgcccagagcccccatagagagaggtccccgccgccaccctcatggatcagccacagttcagcggggcgccccgctttctcacccggcccaaggccttcgtggtgtcggtgggcaaggacgccaccctcagctgccagatcgtgggtaatcccacgccacaggtgagctgggagaaggaccagcagccggtggcggccggcgcgcgcttccgtctggcccaggacggcgacctctaccgcctcactatcctggacctggcgctgggcgacagtgggcaatacgtgtgccgcgcgcgcaatgccataggcgaggccttcgctgctgtgggcctgcaggtggacgcggaggccgcgtgcgccgagcaggcgccgcacttcctgctgcggcccacgtccatccgcgtgcgcgagggctcagaggccaccttccgctgccgcgtgggtggctccccgaggccggcagtgagctggtccaaggacgggcggcgcctgggtgagcccgacggcccccgcgtgcgcgtggaggagctcggcgaggcaagtgcgctgcgcattcgggcggcgcggccgcgcgacggcggcacttacgaggtccgcgccgagaacccgctgggcgctgccagcgccgccgcggcgctagtggtggactcggacgccgcggacacggccagccggcccgggacctccacggccgcgctcctggcgcacctgcagcggcggcgcgaggctatgcgcgccgagggcgcccccgcctcaccgcccagcaccggcacgcgcacctgcacggtgactgaaggcaagcacgcgcgcctcagctgctacgtgaccggcgagcccaagcccgagacggtgtggaagaaggacggccagctggtgaccgagggccggcgccacgtggtgtacgaggacgcgcaggagaacttcgtgctcaagatcctcttctgcaagcagtcggaccgcggcctctacacctgcacggcgtccaacctcgtgggccagacctacagctctgtgctggtcgtagtgcgcgagcccgcggttcccttcaaaaagcggctgcaagatctggaggtgcgggagaaggagtcggccacgttcctatgtgaggtgccccagccgtccactgaggccgcgtggttcaaggaggagacgcggttgtgggcgagcgccaagtacggcatcgaggaggagggcaccgagcgccgcctgaccgtgcgcaatgtctcggccgacgacgacgcggtgtacatctgcgagacgccagagggcagccgcacggtggcggagctcgcagtccaaggaaacctcctccgaaagctccctcggaagacggcggtgcgcgtgggcgacacggctatgttttgcgtggagctggcggtcccggtgggccccgtccactggctgcggaaccaggaggaagtggtggcggggggccgcgtggccatctccgcggagggcacgcgccacacactaaccatctcccagtgctgcctggaggatgtgggccaggtggcctttatggctggcgactgccagacgtccacccagttctgcgtgtcggcccccaggaagcctcccctgcaaccccctgtggatcctgtggtaaaggccaggatggagagttccgtgattctcagctggtccccaccaccccatggggaacgccctgtcactatcgacggctacctggtagagaagaagaagcttggcacctacacctggatcaggtgccacgaggctgaatgggtggctacacctgagctgaccgtggctgatgtggcggaggaggggaacttccagttccgagtgtccgctctcaacagctttggtcagagtccctacctcgagttcccggggactgtccacctggcccccaagctggccgtgaggacaccgctgaaggcggtgcaggcggtagagggtggcgaggtcactttctccgtggacctcacggtggcctcagcgggtgagtggttcctggatgggcaggccctgaaggccagcagtgtgtatgagatccactgtgatcgcacccggcacacgctcaccatccgggaggtgcccgccagcctgcacggggcgcagctgaagttcgtggccaacggcattgagagcagcatccggatggaggtccgggcggccccagggctgactgccaacaagccgccagccgcagctgcccgggaggtgctggctcggctgcacgaggaggcgcagctgctggctgagctgtcagatcaggctgcggctgtgacgtggctgaaggatggtcgcacactgtccccaggccccaagtatgaggtgcaggcatcggccgggcggcgggtgctccttgtgcgagatgtggcccgggacgatgcaggcctctacgagtgcgtcagccgcgggggccgcatcgcctaccagctctccgtgcaaggcctcgcgcgctttctgcacaaggacatggcgggcagctgtgtggatgccgtggctgggggcccggcgcagtttgagtgtgagacctccgaagcccacgtccacgtgcactggtacaaggatggcatggagctgggccactccggtgagcgcttcttgcaggaggatgtggggacgcggcaccggctggtggcagccacagtcaccaggcaggatgaaggcacctactcctgccgcgtgggcgaggactctgtggacttccggctccgcgtctctgagcccaaggtggtgtttgctaaggagcagctggcacgcaggaagctgcaggcagaggcaggagccagtgccacactgagctgcgaggtggcccaggcccagacggaggtgacgtggtacaaggatgggaagaagctgagctccagctcgaaagtgtgcatggaggccacaggctgcacgcgcaggctggttgtgcagcaggcaggccaggcggatgccggggagtatagctgcgaggctgggggccagcggctctccttccatctggatgtcaaagagcccaaggtggtgtttgccaaggaccaggtggcacacagtgaggtgcaggctgaggcaggggccagtgccacgctgagctgcgaggtggcccaggcccagacggaggtgatgtggtacaaagatgggaagaagctgagctccagcttgaaagtgcatgtagaggccaagggctgcagacggaggctggtggtgcagcaggcaggcaagacagatgccggggactacagctgcgaggccaggggccagagggtctccttccgcctgcacatcacagagcccaagatgatgtttgcaaaggagcagtcagtgcataatgaggtgcaggctgaggcgggggccagtgccatgctgagctgtgaggtggcccaggcccagacggaggtgacgtggtacaaggatgggaagaagctgagctccagctcaaaagtgggcatggaggtcaaagggtgcacacggaggctggtgctgccacaggcgggcaaagcagatgctggggagtacagctgtgaggctgggggccagagagtctccttccacctgcacatcacagagcccaagggggtgtttgcgaaggagcagtcagtgcataatgaggtgcaggctgaggcggggaccactgccatgctgagctgtgaggtggcccagccccagacagaggtgacgtggtacaaggacgggaagaagctgagctccagctcaaaagtacgcatggaggtcaagggctgcacacgaaggctggtagtgcagcaggtgggcaaagcagatgctggggagtacagctgcgaggctgggggccagagagtctcctttcaactgcacatcacagagcccaaggcagtgtttgccaaggagcagttggtgcataatgaggtgcggactgaggcaggggccagtgccacactgagctgtgaggtggcccaggcccagacagaggtgacgtggtacaaggatgggaagaagctgagctccagttcgaaagtgcgcatagaggctgcgggctgcatgcggcagctggtggtgcagcaggcaggccaggcagatgctggggagtacacctgtgaggctgggggccagcggctctccttccacctggatgtttcagagcccaaggcggtgtttgcaaaggagcagctggcacacaggaaggtgcaggccgaggcgggggccattgccacgctgagctgcgaggtggcccaggcccagacagaggtgacgtggtacaaggacgggaagaagctgagctccagctcgaaagttcgaatggaggctgtgggctgcacacggaggctggtggtgcagcaggcatgccaggcggacaccggggagtatagctgcgaggccgggggccagcggctctccttcagcctggacgtggcagagcccaaggtggtgtttgccaaggagcagccagtgcacagggaggtgcaggcccaggcgggggccagcaccacactcagctgcgaggtggctcaggcccagacggaggtgatgtggtacaaggacgggaagaagctgagcttcagctcgaaagtgcgcatggaggctgtgggctgcacacggaggctggtggtgcagcaggcgggccaggcggtcgccggggagtacagctgcgaggcggggagccagcggctctccttccacctgcacgtggcagagcccaaggcggtgtttgccaaggagcagccagcgagcagggaggtgcaggctgaggcggggaccagtgccacgctgagctgcgaggtggcccaggcccagacagaggtgacgtggtacaaggacgggaagaaactgagctccagctcgaaagtgcgaatggaggccgtgggctgcacacggaggctggtggtgcaggaggcaggccaggcggacgccggggagtacagctgcaaggccggggatcagcggctgtccttccacctgcacgtggcagagcccaaggtggtgtttgccaaggagcagccagcacacagggaggtgcaggctgaggcgggggccagtgccacgctgagctgcgaggtggcccaggcccagacagaggtgacgtggtacaaggatgggaagaagctgagttccagctcgaaagtgcgcgtggaggccgtgggctgcacacggaggctggtggtgcagcaggcgggccaggcagaggccggggagtacagctgcgaggcagggggtcagcagctctccttccgcctgcaggtggcagagctggagccccaaatttcagagagaccctgccgcagggagcctctggtggtcaaggagcatgaagacatcatcctgaccgccacactggccacaccctctgcggccacggtgacctggctcaaggatggtgtggagattcgccgcagcaagcggcatgagacagccagccagggggacacccacaccctgaccgtgcatggcgcccaggttctggacagcgccatctacagctgccgtgtgggcgcagaggggcaggacttcccagtgcaggtggaagaggtggccgccaagttctgccggctgctggagcctgtgtgcggcgagctgggtggcacggtgacactggcctgcgagctaagcccagcgtgtgcagaggtggtgtggcgctgcggcaacacgcagcttcgggtgggcaagcgcttccagatggtggccgaggggcccgtgcgctcactcactgtgttggggctgcgcgcagaggacgcaggggagtacgtgtgtgagagccgtgatgaccacaccagtgcgcagctcaccgtcagtgtgccccgagtggtgaagtttatgtctgggctgagcaccgtggtcgcagaggagggcggcgaggccaccttccagtgcgtggtgtcccccagtgatgtggcagtcgtgtggttccgggacggtgccctgcttcagcccagcgagaagtttgccatatcacagagtggcgccagccacagcctgaccatctcagacctggtgctggaggacgcgggccagatcaccgtggaggctgagggcgcctcatcctctgctgccctgagggtccgagaggcgcctgtgctgttcaaaaagaagctggagccgcagacggtggaggagcggagctcggtgaccctggaggtggagctgacgcggccgtggccggagctgaggtggacacggaacgcgacggccctggcgccgggaaagaacgtggagatccacgccgagggcgcccgccaccgcctggttctgcacaacgtaggttttgccgaccgtggcttctttggctgcgagacgccggatgacaagacacaggccaaactcaccgtggagatgcgccaggtacggctcgtacggggcctgcaggcagtggaggcacgggagcagggcacggctaccatggaggtgcagctgtcgcatgcggacgtggatggcagctggactcgtgacggtctgcggttccagcaggggcccacgtgccacctggctgtgcggggccccatgcacaccctcacactctcggggctgcggccagaggatagtggccttatggtcttcaaggccgaaggagtgcacacgtcggcgcggctcgtggtcaccgagcttcccgtgagcttcagccgcccgctgcaggacgtggtgaccactgagaaggagaaggttaccctggagtgcgagctgtcgcgtcctaatgtggatgtgcgctggctgaaggacggtgtggagctgcgggcaggcaagacgatggccatcgcagcccagggcgcctgcaggagcctcaccatttaccggtgcgagttcgcggatcagggagtgtatgtgtgtgatgcccatgatgcccagagctctgcctccgtgaaggtacaaggaaggacatacactctcatctaccggagagtcctggcggaagatgcaggagagatccaatttgtagccgaaaatgcagaatcgcgagcccagctccgagtgaaggagctgccagtgaccctcgtgcgcccgctgcgggacaagattgccatggagaagcaccgcggtgtgctggagtgtcaggtgtcccgggccagcgcccaggtgcggtggttcaagggcagtcaggagctgcagcccgggcccaagtacgagctggtcagtgatggcctctaccgcaagctgatcatcagtgatgtccacgcagaggacgaggacacctacacctgtgacgccggtgatgtcaagaccagtgcacagttcttcgtggaagagcaatccatcaccattgtgcggggtctgcaggacgtgacagtgatggagcccgctcctgcctggtttgagtgtgagacctccatcccctcagtgcggccacctaagtggctcctggggaagacggtgttgcaggctggggggaacgtgggcctggagcaggagggcacggtgcaccggctgatgctgcggcggacctgctccaccatgaccgggcccgtgcacttcaccgttggcaagtcgcgctcctctgcccgcctggtggtctcagacatccccgtagtcctcacacggccgttggagcccaagacagggcgtgagctgcagtcagtggtcctgtcctgcgacttccggccagcccccaaggctgtgcagtggtacaaggatgacacgcccctgtctccctctgagaagtttaagatgagcctggagggtcagatggctgagctgcgcatcctccggctcatgcctgctgatgctggtgtctaccggtgccaggcgggcagtgcccacagcagcactgaggtcactgtggaagcgcgggaggtgacagtgacagggccgctacaggatgcagaggccacggaggagggctgggccagcttctcctgtgagctgtcccacgaggatgaggaggtcgagtggtcgctcaacgggatgcccctgtacaacgacagcttccatgagatctcacacaagggccggcgccacacgctggtactgaagagcatccagcgggctgatgcgggcatagtacgcgcctcctccctgaaggtgtcgacctctgcccgcctggaggtccgagtgaagccggtggtgttcctgaaggcgctggatgacctgtccgcagaggagcgcggcaccctggccctgcagtgtgaagtctctgaccccgaggcccatgtggtgtggcgcaaagatggcgtgcagctgggccccagtgacaagtatgacttcctgcacacggcgggcacgcgggggctcgtggtgcatgacgtgagccctgaagacgccggcctgtacacctgccacgtgggctccgaggagacccgggcccgggtccgcgtgcacgatctgcacgtgggcatcaccaagaggctgaagacaatggaggtgctggaaggggaaagctgcagctttgagtgcgtcctgtcccacgagagtgccagcgacccggccatgtggacagtcggtgggaagacagtgggcagctccagccgcttccaggccacacgtcagggccgaaaatacatcctggtggtccgggaggctgcaccaagtgatgccggggaggtggtcttctctgtgcggggcctcacctccaaggcctcactcattgtcagagagaggccggccgccatcatcaagcccctggaagaccagtgggtggcgccaggggaggacgtggagctgcgctgtgagctgtcacgggcgggaacgcccgtgcactggctgaaggacaggaaggccatccgcaagagccagaagtatgatgtggtctgcgagggcacgatggccatgctggtcatccgcggggcctcgctcaaggacgcgggcgagtacacgtgtgaggtggaggcttccaagagcacagccagcctccatgtggaagaaaaagcaaactgcttcacagaggagctgaccaatctgcaggtggaggagaaaggcacagctgtgttcacgtgcaagacggagcaccccgcggccacagtgacctggcgcaagggcctcttggagctacgggcctcagggaagcaccagcccagccaggagggcctgaccctgcggctcaccatcagtgccctggagaaggcagacagcgacacctatacctgcgacattggccaggcccagtcccgggcccagctcctagtgcaaggccggagagtgcacatcatcgaggacctggaggatgtggatgtgcaggagggctcctcggccaccttccgttgccggatctccccggccaactacgagcctgtgcactggttcctggacaagacacccctgcatgccaacgagctcaatgagatcgatgcccagcccgggggctaccacgtgctgaccctgcggcagctggcgctcaaggactcgggcaccatctactttgaggcgggtgaccagcgggcctcggccgccctgcgggtcactgagaagccaagcgtcttctcccgggagctcacagatgccaccatcacagagggtgaggacttgaccctggtgtgcgagaccagcacctgcgacattcctgtgtgctggaccaaggatgggaagaccctgcgggggtctgcccggtgccagctgagccatgagggccaccgggcccagctgctcatcactggggccaccctgcaggacagtggacgctacaagtgtgaggctgggggcgcctgcagcagctccattgtcagggtgcatgcgcggccagtgcggttccaggaggccctgaaggacctggaggtgctggagggtggtgctgccacactgcgctgtgtgctgtcatctgtggctgcgcccgtgaagtggtgctatggaaacaacgtcctgaggccaggtgacaaatacagcctacgccaggagggtgccatgctggagctggtggtccggaacctccggccgcaggacagcgggcggtactcatgctccttcggggaccagactacttctgccaccctcacagtgactgccctgcctgcccagttcatcgggaaactgagaaacaaggaggccacagaaggggccacggccacgctgcggtgtgagctgagcaaggcagcccctgtggagtggagaaaggggtccgagaccctcagagatggggacagatactgtctgaggcaggacggggccatgtgtgagctgcagatccgtggcctggccatggtggatgccgcggagtactcgtgtgtgtgtggagaggagaggacctcagcctcactcaccatcaggcccatgcctgcccacttcataggaagactgagacaccaagagagcatagaaggggccacagccacgctgcggtgtgagctgagcaaggcggcccccgtggagtggaggaaggggcgtgagagcctcagagatggggacagacatagcctgaggcaggacggggctgtgtgcgagctgcagatctgtggcctggctgtggcagatgctggggagtactcctgtgtgtgtggggaggagaggacctctgccactctcaccgtgaaggccctgccagccaagttcacagagggtctgaggaatgaagaggccgtggaaggggccacagccatgttgtggtgtgaactgagcaaggtggcccctgtggagtggaggaaggggcccgagaacctcagagatggggacagatacatcctgaggcaggaggggaccaggtgtgagctgcagatctgtggcctggccatggcggacgccggggagtacttgtgtgtgtgcgggcaggagaggacctcagccacgctcaccatcagggctctgcctgccaggttcatagaagatgtgaaaaaccaggaggccagagaaggggccacagctgtgctgcagtgtgagctgaacagtgcagcccctgtggagtggagaaaggggtctgagacccttagagatggggacagatacagcctgaggcaggacgggactaaatgtgagctgcagattcgtggcctggccatggcagacactggggagtactcgtgcgtgtgcgggcaggagaggacctcggctatgctcaccgtcagggctctacccatcaagttcacagagggtctgaggaacgaagaggccacagaaggggcaacagccgtgctgcggtgtgagctgagcaagatggcccccgtggagtggtggaaggggcatgagaccctcagagatggagacagacacagcctgaggcaggacggggccaggtgtgagctgcagatccgcggcctcgtggcagaggacgctggggagtacctgtgcatgtgcgggaaggagaggacctcagccatgctcaccgtcagggccatgccttccaagttcatagagggtctgaggaatgaagaggccacagaaggggacacggccacgctgtggtgtgagctgagcaaggcggcaccggtggagtggaggaaggggcatgagaccctcagagatggggacagacacagcctgaggcaggacgggtccaggtgtgagctgcagatccgtggcctggctgtggtggatgccggggagtactcgtgtgtgtgcgggcaggagaggacctcagccacactcactgtcagggccctgcctgccagattcatagaagatgtgaaaaaccaggaggccagagaaggggccacggccgtgctgcaatgtgagctgagcaaggcggcccccgtggagtggaggaaggggtctgagaccctcagaggtggggacagatacagcctgaggcaggatgggaccagatgtgagctgcagattcatggcctgtctgtggcagacactggggagtactcgtgtgtgtgcgggcaggagaggacctcggccacactcaccgtcagggccctgcctgcacgattcactcaagatctgaagaccaaggaggcctcagaaggggccacagctacactgcagtgtgagctgagcaaggtggcccctgtggaatggaagaagggtcctgagaccctcagagatgggggcagatacagcctgaagcaggatgggacgaggtgtgagctgcagatccatgacctgtctgtggcggatgctggggaatactcatgcatgtgtggacaagagaggacctcggccacgctcactgtcagggccctgcctgccaggttcacagagggtctgaggaatgaagaggccatggaaggggccacagccacactgcaatgtgagctgagcaaggcagcccctgtggagtggaggaaaggccttgaggctctcagagatggggacaaatacagcctgagacaagacggggctgtgtgtgagctgcagattcatggcctggctatggcagataacggggtgtactcatgtgtgtgtgggcaggagaggacctcagctacactcactgtcagggccctgcctgccagattcatagaggatatgagaaaccagaaggccacagaaggggctacagtcacattgcaatgtaagctgagaaaggcggcccccgtggagtggagaaaggggcccaacaccctcaaagatggggacaggtacagcctgaagcaggatgggaccagttgtgagctgcagattcgtggcctggtcatagcagatgctggagaatactcgtgcatatgtgagcaggagaggacctcggccacgctcactgtcagggccctgccggccagattcatagaagatgtgagaaatcacgaggccacagaaggggccacagctgtgctgcagtgtgagctgagcaaggcggcccccgtggagtggcggaaggggtctgagaccctcagagatggggacagatatagcctgaggcaggacgggacgaggtgtgagctgcagattcgtggcctggctgtggaggacactggagagtatttgtgtgtgtgcgggcaggagagaacctcagctacactcactgtcagggccctgccagccagattcatagacaacatgacaaaccaggaggccagagaaggggccacggccacactgcactgtgaactgagcaaggtggcccctgtggagtggaggaagggacctgaaaccctccgagatggggacagacacagcctgaggcaggatgggaccaggtgtgagctgcagattcgtggcctgtctgtggcagatgccggggagtactcgtgcgtgtgtgggcaggagaggacctcagccacactcacgatcagggaggccacagaaggggccacggctatgttgcagtgtgagctgagcaaggtggcccctgttgagtggaggaagggacctgaaaccctcagagatggggacagatacaacctgaggcaggatgggaccagatgtgagctgcagattcatggcctgtccgtggcagacactggggagtactcatgtgtatgtggtcaggagaagacgtcggccactctcactgtcaaggccccacagccagtgttccgggagccgctgcagagtctgcaggcggaggagggctccacggccaccctgcagtgtgagctgtctgagcccactgctacagtggtctggagcaagggtggcctgcagctgcaggccaatgggcgccgggagccacggcttcagggctgcaccgcggagctggtgttacaggacctacaacgtgaagacactggcgaatacacttgcacctgtggctcccaggccaccagtgccaccctcactgtcacagctgcgcctgtgcggttcctccgagagctgcagcaccaggaggtggatgagggaggcaccgcacacttatgctgcgagctgagccgggcgggtgcgagcgtggagtggcgcaagggctccctacagctcttcccttgtgccaagtaccagatggtgcaggatggtgcagctgcagagctgctggtacgcggagtggagcaggaggatgcgggtgactacacgtgtgacacgggccacacgcagagcatggccagcctctctgtccgtgtccccaggcccaagttcaagacccggcttcagagtctggagcaggagacaggtgacatagcccggctgtgctgtcagctgagtgatgcagagtcgggggccgtggtgcaatggctcaaggagggcgtggagctgcatgcgggccccaagtacgagatgcggagccagggggccacgcgggagctgctgatccaccaactggaggccaaggacacgggcgagtatgcctgtgtgacaggcggccagaaaaccgctgcctccctcagggtcacagagcctgaggtgaccattgtacgggggctggttgatgcggaggtgacggccgatgaggatgttgagttcagctgtgaggtgtccagggctggagccacaggcgtgcagtggtgcctacagggcctgccactgcaaagcaatgaggtgacagaggtggctgtgcgggatggccgcatccacaccctgcggctgaagggcgtgacgcccgaggacgctggcactgtctccttccatttgggaaaccatgcttcctctgcccagctcaccgtcagagctcctgaggtgaccatcctggagcccctgcaggacgtgcagctcagtgagggccaggatgccagcttccagtgccggctatccagagcttcaggccaggaggcccgctgggctttaggaggggtgcccctgcaggccaacgagatgaatgacatcactgtggagcagggcacactccacctgctcaccctgcacaaggtgacccttgaggatgctggaactgtcagtttccacgtgggcacgtgtagctctgaggcccagctgaaagtcacagccaagaacacggtggtgcgggggctggagaatgtggaggcgctggagggcggcgaggcgctgttcgagtgccagctgtcccagcccgaggtggccgcccacacctggctgctggacgacgaacccgtgcacacctcggagaacgccgaggtggtcttcttcgagaacggcctgcgccacctgctgctgctcaaaaacttgcggccacaagacagctgccgggtgaccttcctggctggggatatggtgacgtccgcattcctcacggtccgaggctggcgcctggagatcctggagcctctgaaaaacgcggcggtccgggccggcgcacaggcatgcttcacctgcacgctcagcgaggcggtgcccgtgggagaggcgtcctggtacatcaatggcgcggcagtgcagccggatgacagcgactggactgtcaccgccgacggcagtcaccacgccctactgctgcgcagcgcccagccccaccacgccggggaggtcaccttcgcttgccgcgacgccgtggcctctgcgcggctcaccgtgctgggcctccctgatcccccagaggatgctgaggtggtggctcgcagcagccacactgtgacactgtcttgggcagctcccatgagtgatggaggcggtggtctctgtggctaccgcgtggaggtgaaggagggggccacaggccagtggcggctgtgccacgagctggtgcctggacccgagtgtgtggtggatggcctggcccccggggagacctaccgcttccgtgtggcagctgtgggccctgtgggtgctggggaaccggttcacctgccccagacagtgcggcttgcagagccaccgaagcctgtgcctccccagccctcagcccctgagagccggcaggtggcagctggtgaagatgtctctctggagcttgaggtggtggctgaggctggtgaggtcatctggcacaagggaatggagcgcatccagcccggtgggcggttcgaggtggtctcccagggtcggcaacagatgctggtgatcaagggcttcacggcagaagaccagggcgagtaccactgtggcctggctcagggctccatctgccctgcggctgccaccttccaggtggcactgagcccagcctctgtggatgaggcccctcagcccagcttgccccccgaggcagcccaggagggtgacctgcacctactgtgggaggccctggctcggaaacgtcgcatgagccgtgagcccacgctggactccattagcgagctgccagaggaggacggccgctcgcagcgcctgccacaggaggcagaggaggtggcacctgatctctctgaaggctactccacggccgatgagctggcccgcactggagatgctgacctctcacacaccagctctgatgatgagtcccgggcaggcaccccttccctggtcacctacctcaagaaggctgggaggccaggcacctcaccactggccagcaaggttggggccccagcagccccctctgtgaagccacagcagcagcaggagccactggctgctgtgcgcccaccactgggagacctgagcaccaaagacctgggtgatccctcaatggacaaggcagctgtgaagatccaggctgcctttaagggctacaaggtccggaaggagatgaagcagcaggaagggcccatgttctcccacacatttggggacaccgaggcacaggtgggggatgccctgcggctggagtgtgtcgtggccagcaaggcagatgtgcgagcccgctggctgaaggatggtgtggagctgaccgatgggcggcaccatcacatcgaccagcttggggatggcacctgctctctgctgatcactggcctggaccgtgctgatgctggctgctacacctgtcaggtgagcaacaagtttggccaggtgacccacagtgcctgtgtggtggtcagtgggtcagagagtgaagccgagagctcctctgggggtgagctggacgatgccttccgccgggctgcccgtcggctgcaccggctcttccgcaccaaaagtccggctgaagtttcagatgaggagctcttcctgagtgcagacgagggccctgcagagccagaggagcccgcggactggcagacataccgcgaagatgagcatttcatctgcatccgttttgaggcgctcactgaggcccgccaggcggtaactcgcttccaggagatgtttgccacactgggcattggggtggagatcaagctggtggaacaggggcctcggagggtagagatgtgcatcagcaaagagactcctgcccctgtggtgcctccagagccattgcccagcctactgacttctgacgctgccccagtgttcctgactgagttgcagaaccaagaagtgcaggatgggtatcctgtgagctttgactgcgtggtgacaggtcagcccatgcccagtgtgcgctggttcaaggatgggaagttgttggaggaggatgatcactacatgattaatgaagaccaacagggtggccatcagctcatcatcacagccgtggtgccagcagacatgggcgtctaccgctgcctggccgagaacagcatgggtgtctcctccaccaaggctgagctccgtgtggacttgacaagcacagactatgacactgcagcagatgccacggagtcctcatcctacttcagtgcccaaggctacctgtccagccgggagcaggagggaacagagtccaccactgatgagggccagctgccccaggtggtggaggagctgagagacctccaggtggcccctggcacacgcctggccaagttccagctcaaggtgaaaggctaccctgctcccagattatactggttcaaagatggccagcccctgaccgcatctgcccacatccgcatgactgacaagaagatcctgcacaccctggagatcatctccgtcacccgggaggactctggccagtatgcagcctatatcagcaatgccatgggtgctgcctactcgtctgcccggctgctggttcgaggccctgatgagccagaagagaagcctgcatcagatgtgcatgagcagctggtgccgccccgaatgctggagaggttcacccccaagaaagtgaagaaaggctccagcatcaccttctctgtgaaggtagaaggacgcccggtgcccaccgtgcactggctcagggaggaggctgagagaggcgtgctgtggattggccctgacacaccgggctacaccgtggccagctctgcgcagcagcacagcctggtcctgctggacgtgggccggcagcaccagggcacctacacatgcattgccagcaacgctgccggccaggccctctgctccgccagcctgcacgtctcgggcctgcctaaggtggaggagcaggagaaagtgaaggaagcgctgatttccactttcctgcaggggaccacacaagccatctcagcacaggggttggaaactgcgagttttgctgaccttggtgggcagaggaaagaagagcctctggctgccaaggaggccctcggccacctgtccctcgctgaggtgggcacagaggagttcctgcagaaactgacctcccagatcactgagatggtatcggccaagatcacgcaggccaagctgcaggtgcccggaggtgacagtgatgaggactccaagacaccatctgcatccccccgccatggccgatcacggccatcctccagcatccaggagtcttcctcagagtcagaggacggcgatgcccgaggcgagatctttgacatctacgtggtcaccgctgactacctgcccctaggggctgagcaggatgccatcacgctgcgggaaggccagtatgtggaggtcctggatgcagcccacccactgcgctggcttgtccgcaccaagcccaccaagtccagcccctcacggcagggctgggtgtcaccagcctacctggacaggaggctcaagctgtcacctgagtggggggccgctgaggcccctgagttccctggggaggctgtgtctgaagacgaatacaaggcaaggctgagctctgtgatccaggagctgctgagttctgagcaggccttcgtggaggagctgcagttcctgcagagccaccacctgcagcacctggagcgctgcccccacgtgcccatagctgtggccggccagaaggcagtcatcttccgcaatgtgcgggacatcggccgcttccacagcagcttcctgcaggagttgcagcagtgcgacacggacgacgacgtggccatgtgcttcatcaagaaccaggcggcctttgagcagtacctggagttcctggtggggcgtgtgcaggctgagtcggtggtcgtcagcacggccatccaggagttctacaagaaatacgcggaggaggccctgttggcaggggacccctctcagcccccgccaccacctctgcagcactacctggagcagccagtggagcgggtgcagcgctaccaggccttgctgaaggagctgatccgcaacaaggcgcggaacagacagaactgcgcgctgctggagcaggcctatgccgtggtgtctgccctgccacagcgcgctgagaacaagctgcacgtgtccctcatggagaactacccaggcaccctgcaggccctgggcgagcccatccgccagggccacttcatcgtgtgggagggtgcaccgggggcccgcatgccctggaagggccacaaccgtcacgtgttcctcttccgcaaccacctggtaatctgcaagccccggcgagactcccgcaccgataccgtcagctacgtgttccggaacatgatgaagctgagcagcatcgacctgaacgaccaggtggagggggatgaccgcgccttcgaggtgtggcaggagcgggaggactcggtgcgcaagtacctgctgcaggcacggacagccattatcaagagctcgtgggtgaaggagatctgtggcatccagcagcgtctggccctgcctgtgtggcggcccccggactttgaagaggagctggccgactgcacagccgagctgggtgagacagtcaagctggcctgccgcgtgacgggcacacccaagcctgtcatcagctggtacaaagatgggaaagcagtgcaggtggacccccaccacatcctcattgaagaccctgatggctcgtgtgcactcatcctggacagcctgaccggtgtggactctggccagtacatgtgcttcgcggccagcgccgctggcaactgcagtaccctgggcaagatcctggtgcaagtcccaccacggttcgtgaacaaggtccgggcctcaccctttgtggagggagaggacgcccagttcacctgcaccatcgaaggcgccccgtacccgcagatcaggtggtacaaggacggggccctgctgaccactggcaacaagttccagacactgagtgagcctcgcagcggcctgctagtgctggtgatccgggcggccagcaaggaggacctggggctctacgagtgtgagctggtgaaccggctgggctccgcgcgggctagtgcggagctgcgcattcagagccccatgctgcaggcccaggagcagtgtcacagggagcagctcgtggctgcagtggaagacaccaccctggagcgagcggaccaggaggtcacatctgtcctgaagagactgctgggccccaaggcgccaggcccctccacaggggacctcactggccctggcccctgccccaggggggcacccgcactccaggaaaccggctcccagcccccagtcaccggaacttcggaggcacctgccgtgcccccgagggtgccacagcccctcctccacgaaggcccagagcaggagccggaggccattgccagagcccaggaatggactgtgcccattcggatggagggtgcagcctggcccggggcaggcacaggggagctgctctgggacgtccacagccacgtggtcagagagaccacacagaggacctacacataccaggccatcgacacgcacaccgcacggcccccatccatgcaggtaaccatcgaggatgtgcaggcacagacaggcggaacggcccaattcgaggctatcattgagggcgacccacagccctcggtgacctggtacaaggacagcgtccagctggtggacagcacccggcttagccagcagcaagaaggcaccacatactccctggtgctgaggcatgtggcctcgaaggatgccggcgtttacacctgcctggcccaaaacactggtggccaggtgctctgcaaggcagagctgctggtgcttgggggggacaatgagccggactcagagaagcaaagccaccggaggaagctgcactccttctatgaggtcaaggaggagattggaaggggcgtgtttggcttcgtaaaaagagtgcagcacaaaggaaacaagatcttgtgcgctgccaagttcatccccctacggagcagaactcgggcccaggcatacagggagcgagacatcctggccgcgctgagccacccgctggtcacggggctgctggaccagtttgagacccgcaagaccctcatcctcatcctggagctgtgctcatccgaggagctgctggaccgcctgtacaggaagggcgtggtgacggaggccgaggtcaaggtctacatccagcagctggtggaggggctgcactacctgcacagccatggcgttctccacctggacataaagccctctaacatcctgatggtgcatcctgcccgggaagacattaaaatctgcgactttggctttgcccagaacatcaccccagcagagctgcagttcagccagtacggctcccctgagttcgtctcccccgagatcatccagcagaaccctgtgagcgaagcctccgacatttgggccatgggtgtcatctcctacctcagcctgacctgctcatccccatttgccggcgagagtgaccgtgccaccctcctgaacgtcctggaggggcgcgtgtcatggagcagccccatggctgcccacctcagcgaagacgccaaagacttcatcaaggctacgctgcagagagcccctcaggcccggcctagtgcggcccagtgcctctcccacccctggttcctgaaatccatgcctgcggaggaggcccacttcatcaacaccaagcagctcaagttcctcctggcccgaagtcgctggcagcgttccctgatgagctacaagtccatcctggtgatgcgctccatccctgagctgctgcggggcccacccgacagcccctccctcggcgtagcccggcacctctgcagggacactggtggctcctccagttcctcctcctcctctgacaacgagctcgccccatttgcccgggctaagtcactgccaccctccccggtgacacactcaccactgctgcacccccggggcttcctgcggccctcggccagcctgcctgaggaagccgaggccagtgagcgctccaccgaggccccagctccgcctgcatctcccgagggtgccgggccaccggccgcccagggctgcgtgccccggcacagcgtcatccgcagcctgttctaccaccaggcgggtgagagccctgagcacggggccctggccccggggagcaggcggcacccggcccggcggcggcacctgctgaagggcgggtacattgcgggggcgctgccaggcctgcgcgagccactgatggagcaccgcgtgctggaggaggaggccgccagggaggagcaggccaccctcctggccaaagccccctcattcgagactgccctccggctgcctgcctctggcacccacttggcccctggccacagccactccctggaacatgactctccgagcaccccccgcccctcctcggaggcctgcggtgaggcacagcgactgccttcagccccctccgggggggcccctatcagggacatggggcaccctcagggctccaagcagcttccatccactggtggccacccaggcactgctcagccagagaggccatccccggacagcccttgggggcagccagcccctttctgccaccccaagcagggttctgccccccaggagggctgcagcccccacccagcagttgccccatgccctcctggctccttccctccaggatcttgcaaagaggcccccttagtaccctcaagccccttcttgggacagccccaggcaccccctgcccctgccaaagcaagccccccattggactctaagatggggcctggagacatctctcttcctgggaggccaaaacccggcccctgcagttccccagggtcagcctcccaggcgagctcttcccaagtgagctccctcagggtgggctcctcccaggtgggcacagagcctggcccctccctggatgcggagggctggacccaggaggctgaggatctgtccgactccacacccaccttgcagcggcctcaggaacaggcgaccatgcgcaagttctccctgggtggtcgcgggggctacgcaggcgtggctggctatggcacctttgcctttggtggagatgcagggggcatgctggggcaggggcccatgtgggccaggatagcctgggctgtgtcccagtcagaggaggaggagcaggaggaggccagggctgagtcccagtcggaggagcagcaggaggccagggctgagagcccactgccccaggtcagtgcaaggcctgtgcctgaggtcggcagggctcccaccaggagctctccagagcccaccccatgggaggacatcgggcaggtctccctggtgcagatccgggacctgtcaggtgatgcggaggcggccgacacaatatccctggacatttccgaggtggaccccgcctacctcaacctctcagacctgtacgatatcaagtacctcccattcgagtttatgatcttcaggaaagtccccaagtccgctcagccagagccgccctcccccatggctgaggaggagctggccgagttcccggagcccacgtggccctggccaggtgaactgggcccccacgcaggcctggagatcacagaggagtcagaggatgtggacgcgctgctggcagaggctgccgtgggcaggaagcgcaagtggtcctcgccgtcacgcagcctcttccacttccctgggaggcacctgccgctggatgagcctgcagagctggggctgcgtgagagagtgaaggcctccgtggagcacatctcccggatcctgaagggcaggccggaaggtctggagaaggaggggccccccaggaagaagccaggccttgcttccttccggctctcaggtctgaagagctgggaccgagcgccgacattcctaagggagctctcagatgagactgtggtcctgggccagtcagtgacactggcctgccaggtgtcagcccagccagctgcccaggccacctggagcaaagacggagcccccctggagagcagcagccgtgtcctcatctctgccaccctcaagaacttccagcttctgaccatcctggtggtggtggctgaggacctgggtgtgtacacctgcagcgtgagcaatgcgctggggacagtgaccaccacgggcgtcctccggaaggcagagcgcccctcatcttcgccatgcccggatatcggggaggtgtacgcggatggggtgctgctggtctggaagcccgtggaatcctacggccctgtgacctacattgtgcagtgcagcctagaaggcggcagctggaccacactggcctccgacatctttgactgctgctacctgaccagcaagctctcccggggtggcacctacaccttccgcacggcatgtgtcagcaaggcaggaatgggtccctacagcagcccctcggagcaagtcctcctgggagggcccagccacctggcctctgaggaggagagccaggggcggtcagcccaacccctgcccagcacaaagaccttcgcattccagacacagatccagaggggccgcttcagcgtggtgcggcaatgctgggagaaggccagcgggcgggcgctggccgccaagatcatcccctaccaccccaaggacaagacagcagtgctgcgcgaatacgaggccctcaagggcctgcgccacccgcacctggcccagctgcacgcagcctacctcagcccccggcacctggtgctcatcttggagctgtgctctgggcccgagctgctcccctgcctggccgagagggcctcctactcagaatccgaggtgaaggactacctgtggcagatgttgagtgccacccagtacctgcacaaccagcacatcctgcacctggacctgaggtccgagaacatgatcatcaccgaatacaacctgctcaaggtcgtggacctgggcaatgcacagagcctcagccaggagaaggtgctgccctcagacaagttcaaggactacctagagaccatggctccagagctcctggagggccagggggctgttccacagacagacatctgggccatcggtgtgacagccttcatcatgctgagcgccgagtacccggtgagcagcgagggtgcacgcgacctgcagagaggactgcgcaaggggctggtccggctgagccgctgctacgcggggctgtccgggggcgccgtggccttcctgcgcagcactctgtgcgcccagccctggggccggccctgcgcgtccagctgcctgcagtgcccgtggctaacagaggagggcccggcctgttcgcggcccgcgcccgtgaccttccctaccgcgcggctgcgcgtcttcgtgcgcaatcgcgagaagagacgcgcgctgctgtacaagaggcacaacctggcccaggtgcgctgagggtcgccccggccacacccttggtctccccgctgggggtcgctgcagacgcgccaataaaaacgcacagccgggcgag

SEQ ID NO: 1560 - DNA, 19907 bp, Homo sapiens
  source 1..19907: mol_type = genomic DNA
gctgcccagagcccccatagagagaggtccccgccgccaccctcatggatcagccacagttcagcggggcgccccgctttctcacccggcccaaggccttcgtggtgtcggtgggcaaggacgccaccctcagctgccagatcgtgggtaatcccacgccacaggtgagctgggagaaggaccagcagccggtggcggccggcgcgcgcttccgtctggcccaggacggcgacctctaccgcctcactatcctggacctggcgctgggcgacagtgggcaatacgtgtgccgcgcgcgcaatgccataggcgaggccttcgctgctgtgggcctgcaggtggacgcggaggccgcgtgcgccgagcaggcgccgcacttcctgctgcggcccacgtccatccgcgtgcgcgagggctcagaggccaccttccgctgccgcgtgggtggctccccgaggccggcagtgagctggtccaaggacgggcggcgcctgggtgagcccgacggcccccgcgtgcgcgtggaggagctcggcgaggcaagtgcgctgcgcattcgggcggcgcggccgcgcgacggcggcacttacgaggtccgcgccgagaacccgctgggcgctgccagcgccgccgcggcgctagtggtggactcggacgccgcggacacggccagccggcccgggacctccacggccgcgctcctggcgcacctgcagcggcggcgcgaggctatgcgcgccgagggcgcccccgcctcaccgcccagcaccggcacgcgcacctgcacggtgactgaaggcaagcacgcgcgcctcagctgctacgtgaccggcgagcccaagcccgagacggtgtggaagaaggacggccagctggtgaccgagggccggcgccacgtggtgtacgaggacgcgcaggagaacttcgtgctcaagatcctcttctgcaagcagtcggaccgcggcctctacacctgcacggcgtccaacctcgtgggccagacctacagctctgtgctggtcgtagtgcgcgagcccgcggttcccttcaaaaagcggctgcaagatctggaggtgcgggagaaggagtcggccacgttcctatgtgaggtgccccagccgtccactgaggccgcgtggttcaaggaggagacgcggttgtgggcgagcgccaagtacggcatcgaggaggagggcaccgagcgccgcctgaccgtgcgcaatgtctcggccgacgacgacgcggtgtacatctgcgagacgccagagggcagccgcacggtggcggagctcgcagtccaaggaaacctcctccgaaagctccctcggaagacggcggtgcgcgtgggcgacacggctatgttttgcgtggagctggcggtcccggtgggccccgtccactggctgcggaaccaggaggaagtggtggcggggggccgcgtggccatctccgcggagggcacgcgccacacactaaccatctcccagtgctgcctggaggatgtgggccaggtggcctttatggctggcgactgccagacgtccacccagttctgcgtgtcggcccccaggaagcctcccctgcaaccccctgtggatcctgtggtaaaggccaggatggagagttccgtgattctcagctggtccccaccaccccatggggaacgccctgtcactatcgacggctacctggtagagaagaagaagcttggcacctacacctggatcaggtgccacgaggctgaatgggtggctacacctgagctgaccgtggctgatgtggcggaggaggggaacttccagttccgagtgtccgctctcaacagctttggtcagagtccctacctcgagttcccggggactgtccacctggcccccaagctggccgtgaggacaccgctgaaggcggtgcaggcggtagagggtggcgaggtcactttctccgtggacctcacggtggcctcagcgggtgagtggttcctggatgggcaggccctgaaggccagcagtgtgtatgagatccactgtgatcgcacccggcacacgctcaccatccgggaggtgcccgccagcctgcacggggcgcagctgaagttcgtggccaacggcattgagagcagcatccggatggaggtccgggcggccccagggctgactgccaacaagccgccagccgcagctgcccgggaggtgctggctcggctgcacgaggaggcgcagctgctggctgagctgtcagatcaggctgcggctgtgacgtggctgaaggatggtcgcacactgtccccaggccccaagtatgaggtgcaggcatcggccgggcggcgggtgctccttgtgcgagatgtggcccgggacgatgcaggcctctacgagtgcgtcagccgcgggggccgcatcgcctaccagctctccgtgcaaggcctcgcgcgctttctgcacaaggacatggcgggcagctgtgtggatgccgtggctgggggcccggcgcagtttgagtgtgagacctccgaagcccacgtccacgtgcactggtacaaggatggcatggagctgggccactccggtgagcgcttcttgcaggaggatgtggggacgcggcaccggctggtggcagccacagtcaccaggcaggatgaaggcacctactcctgccgcgtgggcgaggactctgtggacttccggctccgcgtctctgagcccaaggtggtgtttgctaaggagcagctggcacgcaggaagctgcaggcagaggcaggagccagtgccacactgagctgcgaggtggcccaggcccagacggaggtgacgtggtacaaggatgggaagaagctgagctccagctcgaaagtgtgcatggaggccacaggctgcacgcgcaggctggttgtgcagcaggcaggccaggcggatgccggggagtatagctgcgaggctgggggccagcggctctccttccatctggatgtcaaagagcccaaggtggtgtttgccaaggaccaggtggcacacagtgaggtgcaggctgaggcaggggccagtgccacgctgagctgcgaggtggcccaggcccagacggaggtgatgtggtacaaagatgggaagaagctgagctccagcttgaaagtgcatgtagaggccaagggctgcagacggaggctggtggtgcagcaggcaggcaagacagatgccggggactacagctgcgaggccaggggccagagggtctccttccgcctgcacatcacagagcccaagatgatgtttgcaaaggagcagtcagtgcataatgaggtgcaggctgaggcgggggccagtgccatgctgagctgtgaggtggcccaggcccagacggaggtgacgtggtacaaggatgggaagaagctgagctccagctcaaaagtgggcatggaggtcaaagggtgcacacggaggctggtgctgccacaggcgggcaaagcagatgctggggagtacagctgtgaggctgggggccagagagtctccttccacctgcacatcacagagcccaagggggtgtttgcgaaggagcagtcagtgcataatgaggtgcaggctgaggcggggaccactgccatgctgagctgtgaggtggcccagccccagacagaggtgacgtggtacaaggacgggaagaagctgagctccagctcaaaagtacgcatggaggtcaagggctgcacacgaaggctggtagtgcagcaggtgggcaaagcagatgctggggagtacagctgcgaggctgggggccagagagtctcctttcaactgcacatcacagagcccaaggcagtgtttgccaaggagcagttggtgcataatgaggtgcggactgaggcaggggccagtgccacactgagctgtgaggtggcccaggcccagacagaggtgacgtggtacaaggatgggaagaagctgagctccagttcgaaagtgcgcatagaggctgcgggctgcatgcggcagctggtggtgcagcaggcaggccaggcagatgctggggagtacacctgtgaggctgggggccagcggctctccttccacctggatgtttcagagcccaaggcggtgtttgcaaaggagcagctggcacacaggaaggtgcaggccgaggcgggggccattgccacgctgagctgcgaggtggcccaggcccagacagaggtgacgtggtacaaggacgggaagaagctgagctccagctcgaaagttcgaatggaggctgtgggctgcacacggaggctggtggtgcagcaggcatgccaggcggacaccggggagtatagctgcgaggccgggggccagcggctctccttcagcctggacgtggcagagcccaaggtggtgtttgccaaggagcagccagtgcacagggaggtgcaggcccaggcgggggccagcaccacactcagctgcgaggtggctcaggcccagacggaggtgatgtggtacaaggacgggaagaagctgagcttcagctcgaaagtgcgcatggaggctgtgggctgcacacggaggctggtggtgcagcaggcgggccaggcggtcgccggggagtacagctgcgaggcggggagccagcggctctccttccacctgcacgtggcagagcccaaggcggtgtttgccaaggagcagccagcgagcagggaggtgcaggctgaggcggggaccagtgccacgctgagctgcgaggtggcccaggcccagacagaggtgacgtggtacaaggacgggaagaaactgagctccagctcgaaagtgcgaatggaggccgtgggctgcacacggaggctggtggtgcaggaggcaggccaggcggacgccggggagtacagctgcaaggccggggatcagcggctgtccttccacctgcacgtggcagagcccaaggtggtgtttgccaaggagcagccagcacacagggaggtgcaggctgaggcgggggccagtgccacgctgagctgcgaggtggcccaggcccagacagaggtgacgtggtacaaggatgggaagaagctgagttccagctcgaaagtgcgcgtggaggccgtgggctgcacacggaggctggtggtgcagcaggcgggccaggcagaggccggggagtacagctgcgaggcagggggtcagcagctctccttccgcctgcaggtggcagagctggagccccaaatttcagagagaccctgccgcagggagcctctggtggtcaaggagcatgaagacatcatcctgaccgccacactggccacaccctctgcggccacggtgacctggctcaaggatggtgtggagattcgccgcagcaagcggcatgagacagccagccagggggacacccacaccctgaccgtgcatggcgcccaggttctggacagcgccatctacagctgccgtgtgggcgcagaggggcaggacttcccagtgcaggtggaagaggtggccgccaagttctgccggctgctggagcctgtgtgcggcgagctgggtggcacggtgacactggcctgcgagctaagcccagcgtgtgcagaggtggtgtggcgctgcggcaacacgcagcttcgggtgggcaagcgcttccagatggtggccgaggggcccgtgcgctcactcactgtgttggggctgcgcgcagaggacgcaggggagtacgtgtgtgagagccgtgatgaccacaccagtgcgcagctcaccgtcagtgtgccccgagtggtgaagtttatgtctgggctgagcaccgtggtcgcagaggagggcggcgaggccaccttccagtgcgtggtgtcccccagtgatgtggcagtcgtgtggttccgggacggtgccctgcttcagcccagcgagaagtttgccatatcacagagtggcgccagccacagcctgaccatctcagacctggtgctggaggacgcgggccagatcaccgtggaggctgagggcgcctcatcctctgctgccctgagggtccgagaggcgcctgtgctgttcaaaaagaagctggagccgcagacggtggaggagcggagctcggtgaccctggaggtggagctgacgcggccgtggccggagctgaggtggacacggaacgcgacggccctggcgccgggaaagaacgtggagatccacgccgagggcgcccgccaccgcctggttctgcacaacgtaggttttgccgaccgtggcttctttggctgcgagacgccggatgacaagacacaggccaaactcaccgtggagatgcgccaggtacggctcgtacggggcctgcaggcagtggaggcacgggagcagggcacggctaccatggaggtgcagctgtcgcatgcggacgtggatggcagctggactcgtgacggtctgcggttccagcaggggcccacgtgccacctggctgtgcggggccccatgcacaccctcacactctcggggctgcggccagaggatagtggccttatggtcttcaaggccgaaggagtgcacacgtcggcgcggctcgtggtcaccgagcttcccgtgagcttcagccgcccgctgcaggacgtggtgaccactgagaaggagaaggttaccctggagtgcgagctgtcgcgtcctaatgtggatgtgcgctggctgaaggacggtgtggagctgcgggcaggcaagacgatggccatcgcagcccagggcgcctgcaggagcctcaccatttaccggtgcgagttcgcggatcagggagtgtatgtgtgtgatgcccatgatgcccagagctctgcctccgtgaaggtacaaggaaggacatacactctcatctaccggagagtcctggcggaagatgcaggagagatccaatttgtagccgaaaatgcagaatcgcgagcccagctccgagtgaaggagctgccagtgaccctcgtgcgcccgctgcgggacaagattgccatggagaagcaccgcggtgtgctggagtgtcaggtgtcccgggccagcgcccaggtgcggtggttcaagggcagtcaggagctgcagcccgggcccaagtacgagctggtcagtgatggcctctaccgcaagctgatcatcagtgatgtccacgcagaggacgaggacacctacacctgtgacgccggtgatgtcaagaccagtgcacagttcttcgtggaagagcaatccatcaccattgtgcggggtctgcaggacgtgacagtgatggagcccgctcctgcctggtttgagtgtgagacctccatcccctcagtgcggccacctaagtggctcctggggaagacggtgttgcaggctggggggaacgtgggcctggagcaggagggcacggtgcaccggctgatgctgcggcggacctgctccaccatgaccgggcccgtgcacttcaccgttggcaagtcgcgctcctctgcccgcctggtggtctcagacatccccgtagtcctcacacggccgttggagcccaagacagggcgtgagctgcagtcagtggtcctgtcctgcgacttccggccagcccccaaggctgtgcagtggtacaaggatgacacgcccctgtctccctctgagaagtttaagatgagcctggagggtcagatggctgagctgcgcatcctccggctcatgcctgctgatgctggtgtctaccggtgccaggcgggcagtgcccacagcagcactgaggtcactgtggaagcgcgggaggtgacagtgacagggccgctacaggatgcagaggccacggaggagggctgggccagcttctcctgtgagctgtcccacgaggatgaggaggtcgagtggtcgctcaacgggatgcccctgtacaacgacagcttccatgagatctcacacaagggccggcgccacacgctggtactgaagagcatccagcgggctgatgcgggcatagtacgcgcctcctccctgaaggtgtcgacctctgcccgcctggaggtccgagtgaagccggtggtgttcctgaaggcgctggatgacctgtccgcagaggagcgcggcaccctggccctgcagtgtgaagtctctgaccccgaggcccatgtggtgtggcgcaaagatggcgtgcagctgggccccagtgacaagtatgacttcctgcacacggcgggcacgcgggggctcgtggtgcatgacgtgagccctgaagacgccggcctgtacacctgccacgtgggctccgaggagacccgggcccgggtccgcgtgcacgatctgcacgtgggcatcaccaagaggctgaagacaatggaggtgctggaaggggaaagctgcagctttgagtgcgtcctgtcccacgagagtgccagcgacccggccatgtggacagtcggtgggaagacagtgggcagctccagccgcttccaggccacacgtcagggccgaaaatacatcctggtggtccgggaggctgcaccaagtgatgccggggaggtggtcttctctgtgcggggcctcacctccaaggcctcactcattgtcagagagaggccggccgccatcatcaagcccctggaagaccagtgggtggcgccaggggaggacgtggagctgcgctgtgagctgtcacgggcgggaacgcccgtgcactggctgaaggacaggaaggccatccgcaagagccagaagtatgatgtggtctgcgagggcacgatggccatgctggtcatccgcggggcctcgctcaaggacgcgggcgagtacacgtgtgaggtggaggcttccaagagcacagccagcctccatgtggaagaaaaagcaaactgcttcacagaggagctgaccaatctgcaggtggaggagaaaggcacagctgtgttcacgtgcaagacggagcaccccgcggccacagtgacctggcgcaagggcctcttggagctacgggcctcagggaagcaccagcccagccaggagggcctgaccctgcggctcaccatcagtgccctggagaaggcagacagcgacacctatacctgcgacattggccaggcccagtcccgggcccagctcctagtgcaaggccggagagtgcacatcatcgaggacctggaggatgtggatgtgcaggagggctcctcggccaccttccgttgccggatctccccggccaactacgagcctgtgcactggttcctggacaagacacccctgcatgccaacgagctcaatgagatcgatgcccagcccgggggctaccacgtgctgaccctgcggcagctggcgctcaaggactcgggcaccatctactttgaggcgggtgaccagcgggcctcggccgccctgcgggtcactgagaagccaagcgtcttctcccgggagctcacagatgccaccatcacagagggtgaggacttgaccctggtgtgcgagaccagcacctgcgacattcctgtgtgctggaccaaggatgggaagaccctgcgggggtctgcccggtgccagctgagccatgagggccaccgggcccagctgctcatcactggggccaccctgcaggacagtggacgctacaagtgtgaggctgggggcgcctgcagcagctccattgtcagggtgcatgcgcggccagtgcggttccaggaggccctgaaggacctggaggtgctggagggtggtgctgccacactgcgctgtgtgctgtcatctgtggctgcgcccgtgaagtggtgctatggaaacaacgtcctgaggccaggtgacaaatacagcctacgccaggagggtgccatgctggagctggtggtccggaacctccggccgcaggacagcgggcggtactcatgctccttcggggaccagactacttctgccaccctcacagtgactgccctgcctgcccagttcatcgggaaactgagaaacaaggaggccacagaaggggccacggccacgctgcggtgtgagctgagcaaggcagcccctgtggagtggagaaaggggtccgagaccctcagagatggggacagatactgtctgaggcaggacggggccatgtgtgagctgcagatccgtggcctggccatggtggatgccgcggagtactcgtgtgtgtgtggagaggagaggacctcagcctcactcaccatcaggcccatgcctgcccacttcataggaagactgagacaccaagagagcatagaaggggccacagccacgctgcggtgtgagctgagcaaggcggcccccgtggagtggaggaaggggcgtgagagcctcagagatggggacagacatagcctgaggcaggacggggctgtgtgcgagctgcagatctgtggcctggctgtggcagatgctggggagtactcctgtgtgtgtggggaggagaggacctctgccactctcaccgtgaaggccctgccagccaagttcacagagggtctgaggaatgaagaggccgtggaaggggccacagccatgttgtggtgtgaactgagcaaggtggcccctgtggagtggaggaaggggcccgagaacctcagagatggggacagatacatcctgaggcaggaggggaccaggtgtgagctgcagatctgtggcctggccatggcggacgccggggagtacttgtgtgtgtgcgggcaggagaggacctcagccacgctcaccatcagggctctgcctgccaggttcatagaagatgtgaaaaaccaggaggccagagaaggggccacagctgtgctgcagtgtgagctgaacagtgcagcccctgtggagtggagaaaggggtctgagacccttagagatggggacagatacagcctgaggcaggacgggactaaatgtgagctgcagattcgtggcctggccatggcagacactggggagtactcgtgcgtgtgcgggcaggagaggacctcggctatgctcaccgtcagggctctacccatcaagttcacagagggtctgaggaacgaagaggccacagaaggggcaacagccgtgctgcggtgtgagctgagcaagatggcccccgtggagtggtggaaggggcatgagaccctcagagatggagacagacacagcctgaggcaggacggggccaggtgtgagctgcagatccgcggcctcgtggcagaggacgctggggagtacctgtgcatgtgcgggaaggagaggacctcagccatgctcaccgtcagggccatgccttccaagttcatagagggtctgaggaatgaagaggccacagaaggggacacggccacgctgtggtgtgagctgagcaaggcggcaccggtggagtggaggaaggggcatgagaccctcagagatggggacagacacagcctgaggcaggacgggtccaggtgtgagctgcagatccgtggcctggctgtggtggatgccggggagtactcgtgtgtgtgcgggcaggagaggacctcagccacactcactgtcagggccctgcctgccagattcatagaagatgtgaaaaaccaggaggccagagaaggggccacggccgtgctgcaatgtgagctgagcaaggcggcccccgtggagtggaggaaggggtctgagaccctcagaggtggggacagatacagcctgaggcaggatgggaccagatgtgagctgcagattcatggcctgtctgtggcagacactggggagtactcgtgtgtgtgcgggcaggagaggacctcggccacactcaccgtcagggccccacagccagtgttccgggagccgctgcagagtctgcaggcggaggagggctccacggccaccctgcagtgtgagctgtctgagcccactgctacagtggtctggagcaagggtggcctgcagctgcaggccaatgggcgccgggagccacggcttcagggctgcaccgcggagctggtgttacaggacctacaacgtgaagacactggcgaatacacttgcacctgtggctcccaggccaccagtgccaccctcactgtcacagctgcgcctgtgcggttcctccgagagctgcagcaccaggaggtggatgagggaggcaccgcacacttatgctgcgagctgagccgggcgggtgcgagcgtggagtggcgcaagggctccctacagctcttcccttgtgccaagtaccagatggtgcaggatggtgcagctgcagagctgctggtacgcggagtggagcaggaggatgcgggtgactacacgtgtgacacgggccacacgcagagcatggccagcctctctgtccgtgtccccaggcccaagttcaagacccggcttcagagtctggagcaggagacaggtgacatagcccggctgtgctgtcagctgagtgatgcagagtcgggggccgtggtgcaatggctcaaggagggcgtggagctgcatgcgggccccaagtacgagatgcggagccagggggccacgcgggagctgctgatccaccaactggaggccaaggacacgggcgagtatgcctgtgtgacaggcggccagaaaaccgctgcctccctcagggtcacagagcctgaggtgaccattgtacgggggctggttgatgcggaggtgacggccgatgaggatgttgagttcagctgtgaggtgtccagggctggagccacaggcgtgcagtggtgcctacagggcctgccactgcaaagcaatgaggtgacagaggtggctgtgcgggatggccgcatccacaccctgcggctgaagggcgtgacgcccgaggacgctggcactgtctccttccatttgggaaaccatgcttcctctgcccagctcaccgtcagagctcctgaggtgaccatcctggagcccctgcaggacgtgcagctcagtgagggccaggatgccagcttccagtgccggctatccagagcttcaggccaggaggcccgctgggctttaggaggggtgcccctgcaggccaacgagatgaatgacatcactgtggagcagggcacactccacctgctcaccctgcacaaggtgacccttgaggatgctggaactgtcagtttccacgtgggcacgtgtagctctgaggcccagctgaaagtcacagccaagaacacggtggtgcgggggctggagaatgtggaggcgctggagggcggcgaggcgctgttcgagtgccagctgtcccagcccgaggtggccgcccacacctggctgctggacgacgaacccgtgcacacctcggagaacgccgaggtggtcttcttcgagaacggcctgcgccacctgctgctgctcaaaaacttgcggccacaagacagctgccgggtgaccttcctggctggggatatggtgacgtccgcattcctcacggtccgaggctggcgcctggagatcctggagcctctgaaaaacgcggcggtccgggccggcgcacaggcatgcttcacctgcacgctcagcgaggcggtgcccgtgggagaggcgtcctggtacatcaatggcgcggcagtgcagccggatgacagcgactggactgtcaccgccgacggcagtcaccacgccctactgctgcgcagcgcccagccccaccacgccggggaggtcaccttcgcttgccgcgacgccgtggcctctgcgcggctcaccgtgctgggcctccctgatcccccagaggatgctgaggtggtggctcgcagcagccacactgtgacactgtcttgggcagctcccatgagtgatggaggcggtggtctctgtggctaccgcgtggaggtgaaggagggggccacaggccagtggcggctgtgccacgagctggtgcctggacccgagtgtgtggtggatggcctggcccccggggagacctaccgcttccgtgtggcagctgtgggccctgtgggtgctggggaaccggttcacctgccccagacagtgcggcttgcagagccaccgaagcctgtgcctccccagccctcagcccctgagagccggcaggtggcagctggtgaagatgtctctctggagcttgaggtggtggctgaggctggtgaggtcatctggcacaagggaatggagcgcatccagcccggtgggcggttcgaggtggtctcccagggtcggcaacagatgctggtgatcaagggcttcacggcagaagaccagggcgagtaccactgtggcctggctcagggctccatctgccctgcggctgccaccttccaggtggcactgagcccagcctctgtggatgaggcccctcagcccagcttgccccccgaggcagcccaggagggtgacctgcacctactgtgggaggccctggctcggaaacgtcgcatgagccgtgagcccacgctggactccattagcgagctgccagaggaggacggccgctcgcagcgcctgccacaggaggcagaggaggtggcacctgatctctctgaaggctactccacggccgatgagctggcccgcactggagatgctgacctctcacacaccagctctgatgatgagtcccgggcaggcaccccttccctggtcacctacctcaagaaggctgggaggccaggcacctcaccactggccagcaaggttggggccccagcagccccctctgtgaagccacagcagcagcaggagccactggctgctgtgcgcccaccactgggagacctgagcaccaaagacctgggtgatccctcaatggacaaggcagctgtgaagatccaggctgcctttaagggctacaaggtccggaaggagatgaagcagcaggaagggcccatgttctcccacacatttggggacaccgaggcacaggtgggggatgccctgcggctggagtgtgtcgtggccagcaaggcagatgtgcgagcccgctggctgaaggatggtgtggagctgaccgatgggcggcaccatcacatcgaccagcttggggatggcacctgctctctgctgatcactggcctggaccgtgctgatgctggctgctacacctgtcaggtgagcaacaagtttggccaggtgacccacagtgcctgtgtggtggtcagtgggtcagagagtgaagccgagagctcctctgggggtgagctggacgatgccttccgccgggctgcccgtcggctgcaccggctcttccgcaccaaaagtccggctgaagtttcagatgaggagctcttcctgagtgcagacgagggccctgcagagccagaggagcccgcggactggcagacataccgcgaagatgagcatttcatctgcatccgttttgaggcgctcactgaggcccgccaggcggtaactcgcttccaggagatgtttgccacactgggcattggggtggagatcaagctggtggaacaggggcctcggagggtagagatgtgcatcagcaaagagactcctgcccctgtggtgcctccagagccattgcccagcctactgacttctgacgctgccccagtgttcctgactgagttgcagaaccaagaagtgcaggatgggtatcctgtgagctttgactgcgtggtgacaggtcagcccatgcccagtgtgcgctggttcaaggatgggaagttgttggaggaggatgatcactacatgattaatgaagaccaacagggtggccatcagctcatcatcacagccgtggtgccagcagacatgggcgtctaccgctgcctggccgagaacagcatgggtgtctcctccaccaaggctgagctccgtgtggacttgacaagcacagactatgacactgcagcagatgccacggagtcctcatcctacttcagtgcccaaggctacctgtccagccgggagcaggagggaacagagtccaccactgatgagggccagctgccccaggtggtggaggagctgagagacctccaggtggcccctggcacacgcctggccaagttccagctcaaggtgaaaggctaccctgctcccagattatactggttcaaagatggccagcccctgaccgcatctgcccacatccgcatgactgacaagaagatcctgcacaccctggagatcatctccgtcacccgggaggactctggccagtatgcagcctatatcagcaatgccatgggtgctgcctactcgtctgcccggctgctggttcgaggccctgatgagccagaagagaagcctgcatcagatgtgcatgagcagctggtgccgccccgaatgctggagaggttcacccccaagaaagtgaagaaaggctccagcatcaccttctctgtgaaggtagaaggacgcccggtgcccaccgtgcactggctcagggaggaggctgagagaggcgtgctgtggattggccctgacacaccgggctacaccgtggccagctctgcgcagcagcacagcctggtcctgctggacgtgggccggcagcaccagggcacctacacatgcattgccagcaacgctgccggccaggccctctgctccgccagcctgcacgtctcgggcctgcctaaggtggaggagcaggagaaagtgaaggaagcgctgatttccactttcctgcaggggaccacacaagccatctcagcacaggggttggaaactgcgagttttgctgaccttggtgggcagaggaaagaagagcctctggctgccaaggaggccctcggccacctgtccctcgctgaggtgggcacagaggagttcctgcagaaactgacctcccagatcactgagatggtatcggccaagatcacgcaggccaagctgcaggtgcccggaggtgacagtgatgaggactccaagacaccatctgcatccccccgccatggccgatcacggccatcctccagcatccaggagtcttcctcagagtcagaggacggcgatgcccgaggcgagatctttgacatctacgtggtcaccgctgactacctgcccctaggggctgagcaggatgccatcacgctgcgggaaggccagtatgtggaggtcctggatgcagcccacccactgcgctggcttgtccgcaccaagcccaccaagtccagcccctcacggcagggctgggtgtcaccagcctacctggacaggaggctcaagctgtcacctgagtggggggccgctgaggcccctgagttccctggggaggctgtgtctgaagacgaatacaaggcaaggctgagctctgtgatccaggagctgctgagttctgagcaggccttcgtggaggagctgcagttcctgcagagccaccacctgcagcacctggagcgctgcccccacgtgcccatagctgtggccggccagaaggcagtcatcttccgcaatgtgcgggacatcggccgcttccacagcagcttcctgcaggagttgcagcagtgcgacacggacgacgacgtggccatgtgcttcatcaagaaccaggcggcctttgagcagtacctggagttcctggtggggcgtgtgcaggctgagtcggtggtcgtcagcacggccatccaggagttctacaagaaatacgcggaggaggccctgttggcaggggacccctctcagcccccgccaccacctctgcagcactacctggagcagccagtggagcgggtgcagcgctaccaggccttgctgaaggagctgatccgcaacaaggcgcggaacagacagaactgcgcgctgctggagcaggcctatgccgtggtgtctgccctgccacagcgcgctgagaacaagctgcacgtgtccctcatggagaactacccaggcaccctgcaggccctgggcgagcccatccgccagggccacttcatcgtgtgggagggtgcaccgggggcccgcatgccctggaagggccacaaccgtcacgtgttcctcttccgcaaccacctggtaatctgcaagccccggcgagactcccgcaccgataccgtcagctacgtgttccggaacatgatgaagctgagcagcatcgacctgaacgaccaggtggagggggatgaccgcgccttcgaggtgtggcaggagcgggaggactcggtgcgcaagtacctgctgcaggcacggacagccattatcaagagctcgtgggtgaaggagatctgtggcatccagcagcgtctggccctgcctgtgtggcggcccccggactttgaagaggagctggccgactgcacagccgagctgggtgagacagtcaagctggcctgccgcgtgacgggcacacccaagcctgtcatcagctggtacaaagatgggaaagcagtgcaggtggacccccaccacatcctcattgaagaccctgatggctcgtgtgcactcatcctggacagcctgaccggtgtggactctggccagtacatgtgcttcgcggccagcgccgctggcaactgcagtaccctgggcaagatcctggtgcaagtcccaccacggttcgtgaacaaggtccgggcctcaccctttgtggagggagaggacgcccagttcacctgcaccatcgaaggcgccccgtacccgcagatcaggtggtacaaggacggggccctgctgaccactggcaacaagttccagacactgagtgagcctcgcagcggcctgctagtgctggtgatccgggcggccagcaaggaggacctggggctctacgagtgtgagctggtgaaccggctgggctccgcgcgggctagtgcggagctgcgcattcagagccccatgctgcaggcccaggagcagtgtcacagggagcagctcgtggctgcagtggaagtcactgagcaagagactaaagtccccaagaaaaccgtcatcatagaagagaccatcaccactgtggtgaagagcccacgtggccaacgacggtcccccagcaagtccccctcccgctcaccttcccgctgctctgccagcccgctgaggccaggcctactggcccccgacctgctgtacctgccaggtgctggccagccccgcaggccggaggcagaaccaggccagaagcccgtggtgcccacactgtatgtgacggaggccgaggcccactctccagctctgcccggactctcggggccccagcccaagtgggtggaggtggaggagaccattgaagtccgggtgaagaagatgggcccgcagggtgtgtctcccaccacagaggtgcccaggagctcatcggggcatctcttcacactgcccggtgcgacccccggaggggaccccaattccaacaactccaacaacaagctgctggcccaggaggcctgggcccagggcacagccatggtcggcgtcagagagccccttgtcttccgcgtggatgccagaggcagtgtggactgggctgcttctggcatgggcagcctggaggaggagggcaccatggaggaggcgggagaggaagagggggaagacggagacgcctttgtgacggaggagtcccaggacacacacagccttggggatcgtgaccccaagatcctcacgcacaacggccgcatgctgacactggctgacctggaagattacgtgcctggggaaggggagaccttccactgtggtggccctgggcctggcgcccctgatgaccctccctgcgaggtctcggtgatccagagagagatcggggagcccacggtggggcagcctgtgctgctcagcgtggggcatgcactgggtccccgaggccctctcggcctctttaggcctgagccccgtggggcgtcaccaccgggaccccaggtccgtagccttgagggcacctccttcctcttgcgggaggccccggctcggcctgtgggcagtgctccctggacgcagtctttctgcacccgcatccggcgttctgcggacagtggccagagcagcttcaccacagagctttccacccagaccgtcaacttcgggacagtgggggagacggtcacccttcacatctgcccagacagggatggggatgaggcggcacagccctga

SEQ ID NO: 1561 - DNA, 7817 bp, Homo sapiens
  source 1..7817: mol_type = genomic DNA
agatggcgaccgcggcgctgcttcgaggcgccactccggggcgcggcggcccggtctggcgctggcggctgcgcgcggccccaaggtgccgcctggcccacagctcctgcagtcctggtggcgacccaacggccggagcggcctgggcctgcttccggctggacgggcgcaccctgctgcgcgtgcgtggccccgacgcggcgcccttcctgctagggctgctgaccaatgaactgccgcttccgagtcctgcggccgcgggggccccgcctgctgcgcgcgcgggctacgcccacttcctgaacgtgcagggccggacgctctatgacgtcatcttgtacgggctccaggaacactcggaggtgtctggcttccttctggagtgtgacagctcggtgcagggcgcgctgcagaagcacctcgcgctatacaggatccggcggaaggtcacggtggagccgcacccggagctgcgagtgtgggcggtgttgcccagttcccctgaggcctgcggggctgcatcgctgcaggagagggcaggggctgccgccatcctcatccgcgacccgcgaacagcacgcatggggtggcggctcctcacccaggatgaaggcccagccctggtgcccgggggccggctcggggacttgtgggattatcaccagcaccgatacctgcaaggcgttcctgagggggtccgagacttgcctcctggggtggccctgcccctggagtccaacctggccttcatgaacggcgtgagcttcaccaaaggctgctacattggccaggagctgacggcccgcacccaccacatgggcgtcatccgcaagcgcctcttccctgtccggttcttggacccccttcccaccagtggcatcacccctggtgccacggtgctgactgcctcaggacagactgtgggcaagttcagggctggccagggcaacgtggggctggccctgctgtggtcagagaagatcaagggtcctctgcacatcagagcctctgagggtgcccaggtggccttagccgcatctgtgccagactggtggcctacagtctccaagtagtccgaagccttggctggcgcaggctgatggggaggctggggcctggggcctttggcctctgtccagggtcttcccgtcccatctgtctgctgcgcctactgggtgggagccctggtttccatctgggaaagtcccccttgtaggtgccctgcctggccccacccatgctcaggggccccaggcacgtgggttgttttctccctggacttcctgtggccccagaggagcccaccgtgtgagtgctgggctccagatggcgccgggtcccaatcgtggctccacacagggttgtctgggaggacgggacggtgtctctggccagcactggcagcttccgggccttgtaccccactctgcctggcatgagcctcatggggggttggtccctgtgcctggaagcggggtggtgtccagggtctgcaggctggggctcgggctttgggagttgtttcactgtgcttgcttccagcatgtctcagggtggggctatgcgtggtctagaggggtctggggcattggatcaggtggcatgtgggtgtctacacatcgagaagcacacagggatgagccactaggtatcccatgctggaggcttgtggaaggctgtgcccatctcccatgtttccccacctctgttcctcctcagagccctccaggagcgtggggtgggggccagcgcagggctcaggagccagcagggcagagttctgcctgtgtgtgctgggttttggcatagcctgtgtttgcagtgagagtgacttgctgtcagtcacggggcacagcctcctgttcacccactggcttcccccttcccactgaagtgtgagctctatgtttcagggcatctattaaagagtgagccacaggcagccccttgggagctctggtttcatttgggggagagggaggtgggggcttagtttttgtgatctggctgactggaccccgggaacagcgctcctttgagaacgcccagacctaccagatgaagcacttggcatggctgcaggccagcaggggaggcctcagaggcccaggctgggcacgtgggtgccgagtctgcaaaggacagccccatggctgtgagctgtcggctgcagggcgcagggcctggggggcaggcgtttgggccaccaagctggacgttagggtggccacagagggccaagcaggcagggagcctgtgccgccatcctggggggccacaggtgctctctagaaatctgcagccatggcggttttggggtcaggggtctaaaggcagctctgagctgcagtgtagtttgtgatcacccaggaggagggtgtagagcggatggacgggaggaagcggctgcagctggagggaagagaggggccgtccagcctcacccgctgcagtcagctctcctatgggcaaggaaacagctaggtggccctgacccctgcggtcctgagagccggtggccttcagcccctcttggacaggtcatggtctggaagcgcccagcgcaggatggattccagaccagcatccctgcaaccttttcagccccactggctgctgctttaaactggcatggagacatttgatcagcttcccagccagttttctctccagctcagccaggagtgggtgcctgtggcctgtgtcaccaagagctggtgtctcctgcatgaggggcatgcacccctggaatgagggtctgtgcctcgagctcaaagtgtcccggctctgtcatctgcctgaagttgcctggcttttccagtggggcctccttgagtgctgcagcatctgggagcatcctagcctgtcccgtgggtgtggctgggtgagggctaggaggtgagccaggaaggaagcactccactccagagtgaggtgccgcctgagccatcctgtgccccctcagtgtcttcaggtctctgcaggtgtcaggatctcaaaatacttggttcagatcaaacacatttcgtgttcttctgtgtccttttttttttttttttttttttttgagatggagtcttgctctgttggccaggctggagctcagtggcacaatctctgctcactgcaacctctgcctcccaggttccagtgattttcctgcctcagcctcctgggtagctgggactacaggcacatgccccatgcccggctaatttttgtatttttagtagagatggggttttaccatgttggccaggatggtctcaattacaggcatgagccactgtgcccagcctcttctgtgtctttaaaaaggaaagtgtcagtcaacaaaagagcccctctgtcatacaaaccaaatcagttttcaccaaaatgtccttagtcctctcagaaaggcctggcctttaggaccttggaagcaggccctaaagcgcatcggcagggtcagagctttgtgttcaggaacactgggatctgctgagagctggtgtagccgctccaaaactgcacactgcttttcctgtctgctttagtttgtgttgtaaaaacataggaagttcgtgtgtgtgtgtgtgtgtgtgaattcaaggcataaggtgcagttgtgttatgtgggtatagtgcatggtggtgcagtctgggcttcttaccctcacacctcctgcctcccctcgttagagtcccccacatccgccttccactttctgagcccacattgcctgttgggcagctcctggttatgaggcaggacgtgtggtgtttgactgtctgtttctgagctgttttacttaacacagtgtatatggtgcatctttaggaaagcatgcttgtattttcctttcaaagccagatatgggcgggtgtggtggctcatgcctgtgatcccagcactttgggaggccgaggcaggaggattgcttgagcccaggagtttgagagcagcctgggcaacatatcaagactctgtctcttaaaaaaaaaaaaattagccaggcatggtggtccacacctgtggtcccacctattcgggaggctgaagtgcgaggatcacttgagcccaggaggttgaggctgcagtgagctgtgattgtgccactgcactccagcctgggcaacagagcaagaccctgtcttaaaacaaagaaagaataaaaaagaagagaagttgcagttggtagtatttccagagcccggcagacagtgtagaaactgtgagaaacccacctccaaatcaggccttagatagaaaacatcctaagaagtatacgttcattgtaaaatcattatcatcatcatcttctaatccccaaggagacaagctccctgttctgtgttcttgtatgaggcggtcagtcaagcgcagcccgagaggagaggcaggagcctgggagagcctctgctagacctttcctggcacttccccaggaaaggcaaggcagggcagatgtgcggctggccagctggagtgatttccatgggctccaagctgtaggagtggtccctggctgccagagtgctctggccagatagaggtgggctctggactggtgaggctgcattgcggaggcgcgcacacccagctgggcccttatctgtaaggactggctggcctgggaggggcagtctcccagccagaaggtggaatttttttttttttttgagataccaaaacatcctaaggtacaggaaagaaattgtcaacacacacacacagtaccataaacaaggcccagcagaaaggcagacagaagcacacacaccaatgttctgatcttagagtaagcagacacatcacatggaatgaggatgtttaatatatttaaagaaaacaatttatgcacaggaagcaagagactataaaaatgaccaagcagattttaaaaagagaacttgttgaaataaaaataaaatactctaaaaaatattccatgatgtgtttcctgaagaatcgggaactgtttgaagaaatgacccaaagtgcagcacagaaagacagagctggaaaatatgagatgggatgagacaagaagatggagagtttagtatgacatccgcaatttacgagtaattccagaaggaggggaaagagaatatggggtggaggcaagtattcagagaaatacggctgagaactttcccaaaccaacaggagcccctgctccttaggttcaggaaccagcagctcccaagcagcatagttaaaaagctctacccaaacagtcacgtcttggtgaaagtacagaatctcatgacaaagagatcttaaggcagaaaagaaagagattatctggaaagaagaaaataagtagttgattaaaagcaacagtggaagccagaaagatagtaaataatatcttcaaagtcctgggagaaaatagtgatagcctagaattgtgtacccagaaaatccgtctttcaagaatgaggggccaggcgcagtggctcacgtctgtattcccagcactttgggaggccaaggcaggtggatcacctgaggtcaggagttcaagaccagcctgatcaacatggtgaaaccctgtctctactaaaaatataaaaattagctgggtgtggtggcatattcctgtaatcccagctactcgggaggctgaggcaggagaatcacttgaacccaggaggcagaggttgcagtgagccaagattgtgccattgcactccagcctgggcaatagaatgagactctgtctcaaaaaaaaaaaaaaaaaaaaaaaaaaaaagagggctaaacgcattttcataccacgaaactgccctcactccggagtttgctgccagcagagcctagagcgtctaaggcatgtctgggcttctggcgagggatcctgtggggaagctggagatggaagaaggagtgaataggcaggaaggtggatttgtgggcatgtctaaaacaccacatctagaagcttctacttagaatgcctacttttggagtttataaaaaagatgccacatgttgagttgggagagaggtgcccaaacctacagtgttctaaagtccccctactggtcggaaggagggcacggacactgacttcagcatctgttacaaggcttatcagagttttcagataatctctaaaagaatggaaatatatcttccaaactatagagggaagaccatggaatttaaaagccagtccttcaaggagaaatgaacaaactcaaaatcgtagttgggagtgttttttttttttttgagacagagtctcactcttgcccaggctggagtggagtggcataaacacagctcactacagcctcaaccttctgggctcagatgattctcctgcctcagcctcctgagtagcaggaactacaggtgtgagtcatcacactcagctaattttttttttttttttttactttttgtagagatggggttctcactgcattgcccaggctggtcttgaatttctgggctcaggtgatcttcccacctcagcctcctgagtagctgggaccacaggtgcatgctaatttttaaaattttttgtttttaaatgctggtcttcaactcttgtccccaagtagctgggattggggcatgaggcactgtgctaacttcatgttgaaattgaattgccattctaacagtgttaagagatggggcctgtaagaggtgattaggctgtgagggctccactctccaagggcggagttaatgttatgaaagggtaagtccagcccgcttgtgcctctcttgccctccagtgttcaaagcaccatcttggaggtggaattcccaagtcggccagttcctggatcttggactgtccggtctccagaaccgtgagccaataaacctctgttccttgtaaatgagtcagcctcaggtattctcttgtagcagcacaaatggaggcagacacttccttcaccaatctcatgggaggcccactcctgtgagctgcctctagttccccaggccacagactccatcagggctcacctggagccgtccctgtctcacctggaagctctcccactcctctggccagcctgggcatctccacccaatatgagtgatggcgactgattcccttactttagcaagctgggaataaggaatgtttgcctgttcttattcaggggtctctgcatctccacacttgcacaggttgtgtgtacatacattttcctgtctttctggtaagcccctggggtggagctctgggccacagggcaggaaaactcagtgttgctaggaactgccagacattttcccggagtgagtgcagcatttacattcccaccagaagtgtgccaggttcttgtcatactgcgtcctcgccagcgcttggtgctgtcagtcttcttagtttccatttagagattcagtgtttaaattttgaacgtcttgggtgaacaccttggtttgagaaaagtaagaaaaagggtctgtctggctatgggccatggagacccagggcagtgctccacgtgccaaccctggggcagggagcccaagctaggactgtgactgtctgggctgtgggcatctgaccatctccagtgtccccgtctttgatttccctggcgatggtgctagcttagtttgtgcgcatcggcatttgtgggagaaatgaaggattaatacattttgttttatgtcagactctctcagtgagaagttctcagggacaataatagcagggggtcctgctgaagaaaaactgggagatggctgagctctggtccatctttcattgattcattcatttcttcattcattcaaccatgtattgaatgcttatagccaatgaaaataaagtacacagtatatttta

SEQ ID NO: 1562 - DNA, 2362 bp, Homo sapiens
  source 1..2362: mol_type = genomic DNA
gcggccgccgccccaccgtaggtccgtagcaggtggtcgaagtcgggcctccccgcgggcgtcacccagcgccgccggctgccccagccctgcgtgaaggcgctggaaaacacgcagggcaggttgggcagcaagaagccccgcacaaagtcggcgtaggagaaggcgcccggctccgagacgaaggctacccggcccggagcctggccgacgccggggacatcgacccccaggcctcggaagtggctgtcggcgagggcgcgcgtctcgcggtccatccagctcagcacgggtcgaaggaccctcctcctcacttccgccggagcggaaacggtgaggaccagcctcggaaccagaagacgcagggcgccgcgtttctgccccgccagcgcctggggctccgggcctgcacgcatgcgcgcggctcgccgcggtcttcactgcgcaggcgccgagcggccgaggcgccgcggtcggctctgggactcgtctggcgtccctcagaggcagaagaggcctggaccttggcgcacacagacccaggaacagatgagcagggatgtctgcatccacacctggccgtgcacctactacctggagcccaagaggcgatgggttactggacagctgtccttaacatcgctgtcgctcaggttcatgactgacagcactggagagattctggtcagcttccccctctccagcatagttgagatcaagaaggaggcttcacattttatcttcagctccatcaccatcctggagaagggccatgccaagcactggttcagctccctgcggccaagtcgaaatgtggtcttcagcatcatcgagcatttctggagggagctgctgctgtctcagcctggagccgtggcagacgcatctgtcccaaggacccggggcgaggagctgacgggactcatggctggatcccagaaacgcctggaggacacggcgagggtcctgcaccaccagggccagcagctggacagcgtcatgagaggcctggacaagatggagtcagacctggaggtggcggacagattgctgacagaactggaatctcctgcttggtggccctttagctccaagctttggaagacaccaccggaaacaaagcccagggaagatgtctccatgaccagttgtgaaccctttgggaaagaagggatactgataaaaattcctgctgttatttcccacagaacagagtctcacgttaaaccagggaggctcaccgtccttgtgtctgggttggaaatacatgactccagttctttgctcatgcacaggtttgaaagagaagacgtggacgacatcaaggtccactcaccttacgaaattagcatccgccagcggtttattggaaagccagacatggcctatcgtttgatatctgccaagatgccagaggttatccccattttagaagtgcagttcagcaagaagatggagctgttagaagatgcattggtgctcagaagcgcaagaacctcttcccccgcagagaagagctgctcagtctggcatgcagcatctgggctgatgggccgtaccctgcaccgtgagccacccgcaggagaccaggagggcacagcactgcacctgcagacaagcctgccagccctttctgaggcagatacccaggaactaacccagatcctgaggaggatgaaggggctggccctggaggccgagagtgagctggagagacaagacgaagccctggatggcgttgcagcagctgtggacagggcaaccttgaccatcgacaagcacaacaggcggatgaagaggctgacctaggggcagaacgtccctgcattcctgtctcaccctgcacatcccgctgagatggagggctgggcggcagtgccagggctgcagaggcctgtggccctccggagtggtcttcctctggatggggctgctactgtggggctgcttctgcaccaggggcctccccaggtgtgcaccatgcctgcctcccacttggctgtccctgctgctgggcaggacccggccacatgttctgcggatgctgcagaagtgtggaccatggcgggaccccaaggacacttggcacaggcctggaagaggccgccctcgtcttgtctcggctccctttcatggacagactggccttcttagctgtactataaatttgtgagtgaagttagagcccagctcacttagccagctcactttgagggcatcctataaacacccaactgttcttttatcgtctcggttttagccaaaagtgaaattagcatgactgcatctttcaaacaaaaatattgatttctgcttttagggccccgtttccatccagaaataaagggaaatgctggcttca

SEQ ID NO: 1563 - DNA, 1446 bp, Homo sapiens
  source 1..1446: mol_type = genomic DNA
atgagggcaaggctccggttcctgccctcacagggtcccagaagcaagggcagtgaggacctggcccacgtccctggcacgggctgtctgattctccttcgctgtggcgggaagatggccggatttgaagattgctgacagaactggaatctcctgcttggtggccctttagctccaagctttggaagacaccaccggaaacaaagcccagggaagatgtctccatgaccagttgtgaaccctttgggaaagaagggatactgataaaaattcctgctgttatttcccacagaacagagtctcacgttaaaccagggaggctcaccgtccttgtgtctgggttggaaatacatgactccagttctttgctcatgcacaggtttgaaagagaagacgtggacgacatcaaggtccactcaccttacgaaattagcatccgccagcggtttattggaaagccagacatggcctatcgtttgatatctgccaagatgccagaggttatccccattttagaagtgcagttcagcaagaagatggagctgttagaagatgcattggtgctcagaagcgcaagaacctcttcccccgcagagaagagctgctcagtctggcatgcagcatctgggctgatgggccgtaccctgcaccgtgagccacccgcaggagaccaggagggcacagcactgcacctgcagacaagcctgccagccctttctgaggcagatacccaggaactaacccagatcctgaggaggatgaaggggctggccctggaggccgagagtgagctggagagacaagacgaagccctggatggcgttgcagcagctgtggacagggcaaccttgaccatcgacaagcacaacaggcggatgaagaggctgacctaggggcagaacgtccctgcattcctgtctcaccctgcacatcccgctgagatggagggctgggcggcagtgccagggctgcagaggcctgtggccctccggagtggtcttcctctggatggggctgctactgtggggctgcttctgcaccaggggcctccccaggtgtgcaccatgcctgcctcccacttggctgtccctgctgctgggcaggacccggccacatgttctgcggatgctgcagaagtgtggaccatggcgggaccccaaggacacttggcacaggcctggaagaggccgccctcgtcttgtctcggctccctttcatggacagactggccttcttagctgtactataaatttgtgagtgaagttagagcccagctcacttagccagctcactttgagggcatcctataaacacccaactgttcttttatcgtctcggttttagccaaaagtgaaattagcatgactgcatctttcaaacaaaaatattgatttctgcttttagggccccgtttccatccagaaataaagggaaatgctggcttca

SEQ ID NO: 1564 - DNA, 540 bp, Homo sapiens
  source 1..540: mol_type = genomic DNA
gccacgatgccgcagtaccagacctgggaggagttcagccgcgctgccgagaagctttacctcgctgaccctatgaaggcacgtgtggttctcaaatataggcattctgatgggaacttgtgtgttaaagtaacagatgatttagttcagtggcatttaaattactgtactttaagacatggaattgctggaggcttggaaacttgagtgcaatttccctagtacgacctccaaggagaatagagcaaaacagtgtgtttggtgtataaaacagaccaagctcaagatgtaaagaagattgagaaattccacagtcaactaatgcgacttatggtagccaaggaagcccgcaatgttaccatggaaactgagtgaatggtttgaaatgaagactttgtcgtgtacttaggaagtaaatatcttttgaattagagaaagtgttgggacagaaagtactttatgtaactaagtgggctgttcagaagcttagaggtcattttttgtaattttctttttaattactttagagagctagggatg

SEQ ID NO: 1565 - DNA, 1596 bp, Homo sapiens
  source 1..1596: mol_type = genomic DNA
ggggctgctgggactcgcgtcggttggcgactcccggacgtaggtagtttgttgggccgggttctgaggccttgcttctctttacttttccactctaggccacgatgccgcagtaccagacctgggaggagttcagccgcgctgccgagaagctttacctcgctgaccctatgaaggcacgtgtggttctcaaatataggcattctgatgggaacttgtgtgttaaagtaacagatgatttagttagacagtgtcttgctctattgctcaggctgcagtgcagtggcatgatcatagctcactgcatcctcgacctcctgggctcaagcggtcctcttgcttcagcctcctgaatagcagagactacagtgtttggtgtataaaacagaccaagctcaagatgtaaagaagattgagaaattccacagtcaactaatgcgacttatggtagccaaggaagcccgcaatgttaccatggaaactgagtgaatggtttgaaatgaagactttgtcgtgtacttaggaagtaaatatcttttgaattagagaaagtgttgggacagaaagtactttatgtaactaagtgggctgttcagaagcttagaggtcattttttgtaattttctttttaattactttagagagctagggatgcaaatgttttcagttagaaagcctttatttacttttggaaattgaacaagaaatgcatctgtcttagaaactggagattatttgatgttaggtaaaacatgtaattgtttctctggcaaatttgtatcagtaatttgaaaatgagatattaggaaaaaccaattcttcttaaatttagttcatctttctttaaaagaacattaaatgtaaccattttgtcagatccatgtattttggagcataaaatgtatgctgttgtgaccaataaatataaaatatggtaattggaattaactccacaccatagtatgcattgttatacatactgtgtacctaattatgtatagcagtgtagtctcaattatatctgaaagtaattgtgactaacaagtatgctttgccttatttccacatttaaactacctgttaatataagggatttgtagtatcagcttgttgagcaatgactttgaatctagttttcagtgatcagaagcagcagttatttgagtgtatgaatggaatgatgatcactgtgctataatgtactgaaaccaccatattacagaaatatttactacatattttccatctgtagtttctcagaagggctatggattagtttgaactgtcaaatccttgcatacttctgtgacacccctgcccattttctgtctttaattaaccaaggtgttaggtgtgactgtcacaactgttatgttttccagtaaactagaagtacgatatttgataattatatttgtatttcaccacctaaatgtaatgttgattcctcaagaatgaaatgaaggcactacattgaaatatgttttgtataaatttgtcatgttgaacagcattttagcatggtaagttcccttagctatatgaattttggcatgtttcagagagatcagtaaataaaatattagataaaatata

SEQ ID NO: 1566 - DNA, 2890 bp, Homo sapiens
  source 1..2890: mol_type = genomic DNA
atgcaggccaatggggcaggaggaggaggaggaggtggcggcggcggcggtggaggaggagggggcggcgggggccagggacagaccccggaactcgcctgcttgtcggcccagaacggggagtcgtccccctcgtcgtcgtcgtccgcgggggacctggcccacgccaatgggctcctgccttccgccccctccgccgccagcaacaatagcaacagcctgaatgtcaataacggggttcccggcggggcggccgccgcatcctcagccaccgtcgcagctgcctccgccaccaccgccgcctcctcttccttggccaccccagaactgggcagcagcctcaagaagaagaagcggctctcccagtcagatgaggatgtcattaggctaataggacagcacttgaatggcttagggctcaaccagactgttgatctcctcatgcaagagtcaggatgtcgtttagaacatccttctgctaccaaattccgaaatcatgtcatggaaggagactgggataaggcagaaaatgacctgaatgaactaaagcctttagtgcattctcctcatgctattgtggcacaaacattttctgaaacttccatcaacttttttcccctgactgctgctttctgtcatgtcagaggatgaagtttttgctgctgcagcagaagtacctagaatacctggaggatggcaaggtcctggaggcacttcaagttctacgctgtgaattgacgccgctgaaatacaatacagagcgcattcatgttcttagtgggtatctgatgtgtagccatgcagaagacctacgtgcaaaagcagaatgggaaggcaaagggacagcttcccgatctaaactattggataaacttcagacctatttaccaccatcagtgatgcttcccccacggcgtttacagactctcctgcggcaggcggtggaactacaaagggatcggtgcctatatcacaataccaaacttgataataatctagattctgtgtctctgcttatagaccatgtttgtagtagactggtgaattgacaaaatgtaattctaaattattgattgggaaaagaagcaaggaagaccgtgtttcaagatacacttaaaggaggcagttcccatgttatacgcagcagatacttacggagcattgtaatgaagtgtggttctgtaaattctctaatgatggcactaaactagcaacaggatcaaaagatacaacagttatcatatggcaagttgatccggatacacacctgctaaaactgcttaaaacattagaaggacatgcttatggcgtttcttatattgcatggagtccagatgacaactatcttgttgcttgtggcccagatgactgctctgagctttggctttggaatgtacaagaaaactatccccatgtaccttttattattacaccaagggcagctattatctctcagatcctgtttctaatccatgaacaaaatggaatcaagactagattaaatgacaggagaactaaggacaaaaatgagccagtctcatgaagacagtttgacaagtgtggcttggaatccagatgggaagcgctttgtgactggaggtcagcgtgggcagttctatcagtgtgacttagatggtaatctccttgactcctgggaaggggtaagagtgcaatgcctttggtgcttgagtgatggaaagactgttctggcatcagatacacaccagcgaattcggggctataacttcgaggaccttacagataggaacatagtacaagaagatcatcctattatgtcttttactatttcaaaaaatggccgattagctttgttaaatgtagcaactcagggagttcatttatgggacttgcaagacagagttttagtaagaaagtatcaaggtgttacacaagggttttatacaattcattcatgttttggaggccataatgaagacttcatcgctagtggcagtgaagatcacaaggtttacatctggcacaaacgtagtgaactgccaattgcggagctgacagggcacacacgtacagtaaactgtgtgagctggaacccacagattccatccatgatggccagcgcctcagatgatggcactgttagaatatggggaccagcaccttttatagaccaccagaatattgaagaggaatgcagtagcatggatagttgatggtgaatttggagcagacgacttctgtttaacttaaaattagtcgtattttaatggcttgggatttggtgcaaacaaacatgattgatagctggacagacatgctcgtcatgaaaaaagaaccatttctgaagcccgattggggccaaacatttacaccttgcttcatagtaaccagttgagatgaagcacgtcgttagaacgttgttggacaccatgttgaattattcccccatcggttgtgaagaactgtgctacattcaggcttacccattgaactcagtatatatatttttttccttcctgtcttttgtctggcaggataccattcttgttgctcttctgtgtaatgaagtttaaatgcttgtttggaaaactttatttaacagtttagaaggcttgatagaaagagtgcattagtctgaagagtatacattggataggaaagaatttccttcttttgtttctccaaatctttccgccttatttagcttgagatctttgcagcttggttcatggattctagccttgcccgttgcgcagtatatactgatccagatgataaaccagtgaactatgtcaaaagcactctcaatattacatttgacaaaaagttttgtacttttcacatagcttgttgccccgtaaaagggttaacagcacaattttttaaaaataaattaagaagtatttatagg

SEQ ID NO: 1567 - DNA, 8233 bp, Homo sapiens
  source 1..8233: mol_type = genomic DNA
ccaggcggcggcggccaaactccgcggcgtccccagggcgccagcttcgccctcgccgccgcggccgcgctgctcttcggctccgacatggaagatggaccttctaataatgcgagctgcttccgaaggctgaccgagtgcttcctgagccccaaatgaggatagaagagaggaaatcccaacatttaacaggtttgacagatgaaaaagtgaaggcatatctttctcttcacccccaggtattagatgaatttgtatctgaaagtgttagtgcagagacagtagagaaatggctgaagaggaagaacaacaaatcagaagatgaatcagctcctaaggaagtcagcaggtaccaagatacgaatatgcagggagttgtatatgaactaaacagctatatagaacaacggttggacacaggaggagacaaccagctactcctctatgaactgagcagcatcattaaaatagccacaaaagccgatggatttgcactgtatttccttggagagtgcaataatagcctgtgtatattcacgccacctgggataaaggaaggaaaaccccgcctcatccctgctgggcccatcactcagggcaccaccgtctctgcttatgtggccaagtccaggaaaacactgctagtagaagacatccttggagatgaacgatttccaagaggtactggactggaatcagggactcgtatccagtctgttctttgcttaccaattgtcactgcaattggtgacttgattggtattctcgagctgtatcggcactggggcaaagaagccttctgtcttagtcaccaggaggttgcaacagcaaatcttgcctgggcttcagtagcaatacatcaggtgcaggtatgcagaggccttgccaaacagacagaattgaatgacttcctactcgacgtatcaaaaacatattttgataacatagttgcaatagattctctacttgaacacataatgatatatgcaaaaaacctggtgaatgccgatcgttgtgcgcttttccaggtggaccataagaacaaggagttatattcagacctttttgatattggagaggaaaaggaaggaaaacctgtcttcaagaagaccaaagagataagattttcaattgagaaaggaattgctggccaagtagcaagaacaggggaagtcctgaacattccagatgcctatgcagacccacgctttaacagagaagtagacttgtacacaggctacaccacgcggaacatcctgtgcatgcccatcgtcagccgaggcagcgtgataggtgtggtgcagatggtcaacaaaatcagtggcagtgccttctctaaaacagatgaaaacaacttcaaaatgtttgccgtcttttgtgctttagccttacactgtgctaatatgtatcatagaattcgccactcagagtgcatttaccgggtaacgatggaaaagctgtcctaccatagcatttgtacttcagaagagtggcaaggtctcatgcaattcacccttcccgtgcgtctctgcaaagaaattgaattattccactttgacattggtccttttgaaaacatgtggcctggaatttttgtctacatggttcatcggtcctgtgggacatcctgctttgagcttgaaaagttgtgtcgttttattatgtctgtgaagaagaactatcggcgggttccttatcacaactggaagcatgcggtcactgtagcacactgcatgtatgccatacttcagaacaatcacacgcttttcacagaccttgagcgcaaaggactgctgattgcgtgtctgtgtcatgacctggaccacaggggcttcagtaacagctacctgcagaagttcgaccaccctctggccgctctctactccacttccaccatggagcagcaccacttctcccagactgtgtccatcctccagttggaagggcacaatatcttctccactctgagctccagtgaatatgagcaggtgcttgagatcatccgcaaagccatcattgccacagaccttgctttatactttggaaacaggaagcagttggaagagatgtaccagaccggatcactaaaccttaataatcaatcacatagagaccgtgtaattggtttgatgatgactgcctgtgacctttgttctgtgacaaaactgtggcccgttacaaaattgacggcaaatgatatatatgcagaattctgggctgagggtgatgaaatgaagaaattgggaatacagcctattcctatgatggacagagacaagaaggatgaagtcccccaaggccagcttgggttctacaatgccgtggccattccctgctatacaacccttacccagatcctccctcccacggagcctcttctgaaagcatgcagggataatctcagtcagtgggagaaggtgattcgaggggaggagactgcaacctggatttcatccccatccgtggctcagaaggcagctgcatctgaagattgagcactggtcaccctgacacgctgtcccacctacagatcctcatcttgcttctttgacattcttttcctttttttggggggggtggggggaacctgcacctggtaactggggtgcaaacctcttcaagaaggtaacatcaaataaataagtcaagcagaggacttcctgccaatctcttctgtgaggcatcatagacactgagcaaccaggaccacccccacgttcagaaatcagctggccaagtgactccatttgacttgcaaaccagccttttctaataggctaatattgctgaggccttaaaggaaatggacaaaaattatccagaaggggtacttttccattgtatctttctaataagggtttaaaatggtactattatggtattgtacttgggctttaacatcaatgttgctttgatgttgttggatataaataggaatttttacacattactattgtgaatggtgaatgttcatgtatgacctacttgtaattaacttgagttgtagtccacagcctcaggacaaatgtcgttgaggttacagagtaagaaatgatggcaaaacgtcaaactcttatttcagagcttcatgaatttagttagactaaacataattctttaagttcaacctaaagggctgagatcaataaatttaacactagacgaagtagacttcctgtctttttgagaagagatgaggtatatgttacaataaatctcagaacttcaagtagcagttcaaaagatgtcagtttttaaaattgtttttgttgttgtcttggcagttttactgaaccctttgcataaagaacaaaataaaagctcggcattgtaatttttttaatggacaagtcttatggatacgaagggtacatttttcataatgattcctttatattttcactttgtgtcattgcagaattttagactctcattcacaatgaaaagtttattttaaacattgtttaattaaaataccatacagttctcttttaaacatcaaaccataaaaagtgtattttgtaattttactctgacctgccgcagtcacctctcacttatctcttccacgtactgcacggtcgtatttcatgagctttctgtccatagcacagaaacagagcagaaagtagtacaatcatgttggaccttctttctgttctctttactcttctcacagatcagatcactccatagaagcctgtgggtttcgatggtttcttctatacacctttttggttgaccagtattactatacaatgtaagtgttttaaaaaatacgaaagtaatactctgcaccccttcctacaaagatgataaagcagtcacttctggcgcattttaataatttaaagatttttagtgcaatggcacggtaacctccaaacctgaattagacagagactcactcaggaagtgacaggcccatcatatcaaataacttattcacttttcatgtggcaggaaactggaatatcgcttttaataaaatggaaaaatatgcttctacatatttaccaccataggcgttttgttcatatgagcctggtttgtgcaaaattaaatcagaggcttctacaacatggtttatttatgttgtagcaaagttggctctacataaacattgttcttattttaaaattaacactatgtgttcagttttcttgtgggcttctgaaagttgccatcttccctccgtggagctccatttgctattttcattatacactatgaggtaaaatgtaataacaaaagagagagaagtaccactgtggctagatatatacacacacatatatatatggatggatgtaatatatgtagaacacacacatagatgtatataggatacacactcatgtatgtaaacgtatacatatgtgtatatatgatacatacacatacacacacacgagagacagaaggaaagagaggaagagagaagcaaacatgtaggaaaaaatataaatcagccccattctcccattctttaagaacaatgatttttcttgatggaaaatgcatatcacttgacagttgacaagaaagtgtcatttttgtgttagtgtatcatataattgaatttgaacaagatacatatttttctgcatacaaatttatgaagctggagtctaccaaacacagctttagtcacaaaagttagtttagttatctcatttcgcttggagatggaatttcaggaagggatatattatttaagattattgtttaattacaagaattttaaaagaatgtatgaattctgttttttaatatagaaaataattatggagttaggaatctcatggctacatttacatttttaggttattacagaaaattctcttaatttattatagtcaagtgtattatgtaatctctatttagaacagtttcccaaaggaatgtgattggatttactggttggttaatttcttgtgaaatattgtcataatagaagcacagcttgaacaaaagactgaattctgatataaactgtcaatattgcttttaccatgtgtaagatttacttagtaatcacagatttacctaaaataaaaggacccgggttgcagtgatatttagttaatgatttgttttggaaaacatgcagttaggagtatttttgtattttgtcagatgtttaggagacagactttcgggtcatgtttcttgtcttgttcccagatcttttcttaaaagaacagtgtgacaccagaagccaagagatggtttttactaacaacagctttgatgagttcctattaaggtcgtattgtgtattgtgccaaattttccacccagtataaatttagtaacccgctatgagcatatgtaggatattcaatttgcagatacttttgttggttatgttggtttataatagacaagttttatggtcatatgcaattattccattatctttttggacacagtgaatatgttttttagctaaaaatgtccttggaaacataaatgcctgccaataacatggaatattgaattcgggcaatgtgaattgattaattagaaaagggtcaaaagaaatacaatggatgtggaaactaattctaaaaaatagccctattaatagggcagagactctggtccatttcccagctgtacttctctctaagaggtgtatgaaaaacccatcttgcaaaagagaccaaaatattagacacaatcgttcccattcctgactcttcaatggaaaaggaaggtacagatgtttacagtggtgccccaggtgactcgttctcaccacaacaaaagcaactaattggaaactagatgtgttcaataatagatttcctcttttttggcatgctttttagattttttttcattttgtaaaatctcagttaatttttctttattggtatatttgtgtatgcgagacaaatcctgtattgtacaggatataaatagatgcataaatccttagatacctgggttttttaataggtttaggtttgggtattgtgtttctggtcttttaactcaaaattaaggtttgagctttaataggactaaattattcacctgccttggcctgtgcctttattttaaatactgcaattttacttcttcattcatgtatttattattttgcttttcttgcttaagtataattgaaaatatttgcaggaacgcacaattcattttatcaagttgaatgaataggaccattctctcctcatcagatttctgttctttatttgacttcattgacatataccctggtgactataaccagtgaactgttcagagtcagtcttttcggcaagaacttcagagaactgtgacactggttatgatgtgattttggggggtttcaggtacctaagcatgatttttaaaatcacttctctctttacatatttcgaacatatgtttgctttctacactttgcagattttatttaggatttaattctttaaagactatattcatttagtcactatagtggatctcttctactgcaagtattcatctgatttttaaattatgtaaaatgtaaatcagccaagtatgtcatccgttatagtttccccatgctttcagcgcatggccatgagatttttacatgtgcataagtatttagccaatacacattttgctgacttctttaaccatttatattgtttaaattagtaatatccaatgcagtgcacacttttttgtcttttttccaacggaatattttggttgtctgtagcgttggaagcattttatatgataaaaatagcaagaaaaaattaaaaagtgtcaacggtgtgctggttctaaattaagaagatagaacaaagagaaagacattaatgttacctaagaaacacatttaacatccgaagaagcaatgctgtcctcacttgatgtttctcttctcaacccagcaatggagagcagggcttgcaaagccgtacagagcctacgtgctctttcctgcaagtgggagaaaactaatcaatggcacacagggccaggtgtggccctgtgaggcaaaggataatgtcacctcaggaccaaggtggaaacttacagctgaatccagggcttactaagtagggaagtcagtttacatatttcagttttcctctgatgtttttgaggtactgtgtatttgcagaagtttaagcagaagggttttgtttctattgtaagttaggttctaaaagtgtataatctgatactctagcccaactgaaatattatatcttgggcgttacagcctttgtctttttctttagtcaccttaatacccagtcctatgctgtatctctgatagcctatataaatgacatataggaatattattttccatatgatctgttgtatggtgtatatgctatgtgttcatttcgtgtgcaagttcagagtgtaatagatttacccagagaaggtgtttctatacaatgcccctacctatttgaaattacatgcttgcccaacacactgtgaaatagttaccaaaatttgtacaaatgcagcatcttcattctttctgagaagacaagatggttttctttacatgaacaaatgaacaaaagagatcctagatccataacgtagctaaggcatctaagagtttgctgttgataatcttgctgaccaaaaactactggagagtaacacaggttatatgccatcacaaatacaatgctcatgaagaactgatttgtagagtcaatgaacctgtgtccagaattttaataggctctctattggaaggagaaagaatttcaagttaacagtatctaactttatcatagttgatgttagtaaattttaaaaaatgattttatatgtatgacaaaaatctttgtaaaatgcgcaagtgcaataatttaaagaggtcttaactttgcatttataaattataaatattgtacatgtgtgtaattttttcatgtattcatttgcagtctttgtatttaaaaaacatttactgttatgtttgtataatagaacagtaatcatttattataatctaggcaagttgtaaataaattcataattcaaacagccagtatatatgcatatatgagtgttatattgcaaaatctttgttttacttacatggttaaagcagcaagaattcttttgttgatatgtaattatacacataaaatatatatatgtatgatacatgaaatatatttagaaatgttcataattttaatggatatcctttggtgtgaataattgaatacagagtttttaaaatatc

SEQ ID NO: 1568 - DNA, 1819 bp, Homo sapiens
  source 1..1819: mol_type = genomic DNA
ggcagtggcatcagcgatggcggctgcgtcggggtcggttctgcagcgctgtatcgtgtcgccggcagggaggcatagcgcctctctgatcttcctgcatggctcaggtgattctggacaaggattaagaatgtggatcaagcaggttttaaatcaagatttaacattccaacacataaaaattatttatccaacagctcctcccagatttaaaataaccaatgactgcccagaacaccttgaatcaattgatgtcatgtgtcaagtgcttactgatttgattgatgaagaagtaaaaagtggcatcaagaagaacaggatattaataggaggattctctatgggaggatgcatggcaatacatttagcatatagaaatcatcaagatgtggcaggagtatttgctctttctagttttctgaataaagcatctgctgtttaccaggctcttcagaagagtaatggtgtacttcctgaattatttcagtgtcatggtactgcagatgagttagttcttcattcttgggcagaagagacaaactcaatgttaaaatctctaggagtgaccacgaagtttcatagttttccaaatgtttaccatgagctaagcaaaactgagttagacatattgaagttatggattcttacaaagctgccaggagaaatggaaaaacaaaaatgaatgaatcaagagtgatttgttaatgtaagtgtaatgtctttgtgaaaagtgatttttactgccaaattataatgataattaaaatattaagaaataacactttcctgacttttttattattaaaatgcttatcactgtagacagtagctaatcttattaatgaaaaacaatagacaaacatctgtgcataatttttcagacacaattctgtaaatatttggaaaccttttaagtatttaaacttttaaatttttgaaataaagtattctaaactaatataaataaggacaatgaaaaaacatgaaaggacttagcataatgttattttatcttttctacaactttgtttaaattacctttccaaagatatttgtgtttatgtaattttccacggaataacattaatactctaggtttataaaccggtttcacattatttcatttgatcatcacaagagctttgtgaagtaagccgagaagttgttactggtatttaataatagcaatagaggagttaaagactttcccacagcttgcaggtcaagacaagaaattcaggtctcctaattctcagtggagctctatttctgttaacccaaattgctgctctgttttaggtctcaatttcatctgtaaaatgatactaatagtacttatcccattggatttttgttgagatttaaataaatagccaaaagccaatacataataaacactcaataaagattaaccataaggagagtcatgatctggttccaggaatacattgttagatgactgaaaaattgtattacttcaatgaaaatactataaataataacattttcatatattagttggttctcatgcatacataatctaattttatttgatcctcacaactgtttaagttttattaaatatacattatccctatttgtataaatagaatcatacaatacctgcctgctttcattcaacaaaattatcatgagatttttccatgttgtgtacatcaatagttcatctattttattgctcagtaatattccattgtgtggatgtatcactatttgtttacacattcaccactgatatataagttgcttccagtgtgaggctgttttaaataaagctgctatgaatattcatgtaaga

SEQ ID NO: 1569 - DNA, 1898 bp, Homo sapiens
  source 1..1898: mol_type = genomic DNA
cgcggcaacgcaggggcggaaccgcatgactggcagtggcatcagcgatggcggctgcgtcggggtcggttctgcagcgctgtatcgtgtcgccggcagggaggcatagcgcctctctgatcttcctgcatggctcaggtgattctggacaaggattaagaatgtggatcaagcaggttttaaatcaagatttaacattccaacacataaaaattatttatccaacagctcctcccagatcatatactcctatgaaaggaggaatctccaatgtatggtttgacagatttaaaataaccaatgactgcccagaacaccttgaatcaattgatgtcatgtgtcaagtgcttactgatttgattgatgaagaagtaaaaagtggcatcaagaagaacaggatattaataggaggattctctatgggaggatgcatggcaatacatttagcatatagaaatcatcaagatgtggcaggagtatttgctctttctagttttctgaataaagcatctgctgtttaccaggctcttcagaagagtaatggtgtacttcctgaattatttcagtgtcatggtactgcagatgagttagttcttcattcttgggcagaagagacaaactcaatgttaaaatctctaggagtgaccacgaagtttcatagttttccaaatgtttaccatgagctaagcaaaactgagttagacatattgaagttatggattcttacaaagctgccaggagaaatggaaaaacaaaaatgaatgaatcaagagtgatttgttaatgtaagtgtaatgtctttgtgaaaagtgatttttactgccaaattataatgataattaaaatattaagaaataacactttcctgacttttttattattaaaatgcttatcactgtagacagtagctaatcttattaatgaaaaacaatagacaaacatctgtgcataatttttcagacacaattctgtaaatatttggaaaccttttaagtatttaaacttttaaatttttgaaataaagtattctaaactaatataaataaggacaatgaaaaaacatgaaaggacttagcataatgttattttatcttttctacaactttgtttaaattacctttccaaagatatttgtgtttatgtaattttccacggaataacattaatactctaggtttataaaccggtttcacattatttcatttgatcatcacaagagctttgtgaagtaagccgagaagttgttactggtatttaataatagcaatagaggagttaaagactttcccacagcttgcaggtcaagacaagaaattcaggtctcctaattctcagtggagctctatttctgttaacccaaattgctgctctgttttaggtctcaatttcatctgtaaaatgatactaatagtacttatcccattggatttttgttgagatttaaataaatagccaaaagccaatacataataaacactcaataaagattaaccataaggagagtcatgatctggttccaggaatacattgttagatgactgaaaaattgtattacttcaatgaaaatactataaataataacattttcatatattagttggttctcatgcatacataatctaattttatttgatcctcacaactgtttaagttttattaaatatacattatccctatttgtataaatagaatcatacaatacctgcctgctttcattcaacaaaattatcatgagatttttccatgttgtgtacatcaatagttcatctattttattgctcagtaatattccattgtgtggatgtatcactatttgtttacacattcaccactgatatataagttgcttccagtgtgaggctgttttaaataaagctgctatgaatattcatgtaaga

SEQ ID NO: 1570 - DNA, 1101 bp, Homo sapiens
  source 1..1101: mol_type = genomic DNA
ggaacatcggcggctgcccgggtgacttggttatatgtcacagaataacattcgagaatgggacatggaatgaggcgacggccccagcaagccccagcagccccagccccagccccaggcccagcagcagcagcagcagcccctgctctcccgccgcccggagaggctctgcagccatgaagccaaccgtcccgaggcaccgccggtaagcagggagcctccgcggagctcccgccgccgctcccccttggcgccaaaggcacccggtcccggagcagccacgcgcggcccgtgagcctcgccaccagcgggggctcagaggaggaggacaaagacggcggggtgctgttccacgtcaacaagagcggcttccccatcgacagccacacctgggagcgcatgtggatgcacgtggccaaggtgcaccctaaggggggagaaatggtgggcgccatcaggaacgccgccttcttggcaaagccttcaataccccaggtcccaaactacaggctgtcgatgacgatcccagactggctccaggcgatccagaattacatgaagaccctacaatataatcacacagggacccagttctttgaaattaggaaaatgagaccgctgagtgggttaatggaaacagcaaaagaaatgacccgagagtccttgcctatcaaatgccttgaagctgtcatcctgggcatctacttaaccaatgggcagccttccattgagcggttccccatcagctttaaaacctacttctcaggaaactactttcaccacgttgtgctggggatttactgcaatggccgctatggctcattgggcatgagccgcagggctgagctgatggacaagccattgacttttcggactctgagtgacctcatctttgactttgaggactcttacaagaaatacctgcacacagtcaagaaggtcaagattgggctgtacgtcccccatgagcctcatagcttccagcccattgagtggaagcagctggtcctcaacgtctcaaagatgctgagggctgacataaggaaggagctggagaaatatgccagggacatgagaatgaagggcttgtgcagtcactaa

SEQ ID NO: 1571 - DNA, 3572 bp, Homo sapiens
  source 1..3572: mol_type = genomic DNA
gccccagcagccccagccccagccccaggcccagcagcagcagcagcagcccctgctctcccgccgcccggagaggctctgcagccatgaagccaaccgtcccgaggcaccgccggtaagcagggagcctccgcggagctcccgccgccgctcccccttggtgagtcctgccgcagcgagaggcatggagaaggccgcccccgcggggcgctgatcccctcgccgcgcccgcgcgcacacgccccccgccgccgccgccgctgccgccgccgcgcgcccccagtacctcgctccccgcccaggccccaccatgaccggctccgcggccgacactcaccgctgcccccaccccaaaggcgccaaaggcacccggtcccggagcagccacgcgcggcccgtgagcctcgccaccagcgggggctcagaggaggaggacaaagacggcggggtgctgttccacgtcaacaagagcggcttccccatcgacagccacacctgggagcgcatgtggatgcacgtggccaaggtgcaccctaaggggggagaaatggtgggcgccatcaggaacgccgccttcttggcaaagccttcaataccccaggtcccaaactacaggctgtcgatgacgatcccagactggctccaggcgatccagaattacatgaagaccctacactacttaaccaatgggcagccttccattgagcggttccccatcagctttaaaacctacttctcaggaaactactttcaccacgttgtgctggggatttactgcaatggccgctatggctcattgggcatgagccgcagggctgagctgatggacaagccattgacttttcggactctgagtgacctcatctttgactttgaggactcttacaagaaatacctgcacacagtcaagaaggtcaagattgggctgtacgtcccccatgagcctcatagcttccagcccattgagtggaagcagctggtcctcaacgtctcaaagatgctgagggctgacataaggaaggagctggagaaatatgccagggacatgagaatgaagatcctgaaacctgcaagtgcccactctccgacccaagtgagaagccggggaaaatccctgtcccccagaaggagacaggcaagccccccgaggaggctcggccggcgagagaagtcgcctgcactgcctgaaaagaaggtggctgatctgagcactctgaatgaagtgggctatcaaatccgaatttagccaagccataccggccagcaagagggtttctgtggtgcttctctctgcactttacccagcatcttcaggaggaactgcaactatttattaagaacttgtgaattttatttttaaggattcacctggaaatagaatctgagtgggtggtaaccattagctttaaaaaattcactaaaaggcaccatgaaaaggctgaagtaataagccccactggggttggactatgtccctcactcaagatcttaaggataaccgtaactgaagttttatatttttccatttacctactttcttttacttgctttgaacattatgcctcaccaatagtaaatgttcatgaaataatctcttgaacttttggtatagtaaggtaactctaacagtattactgtctttttcagcaataacagaaagcaaaaatgggtgggttttttttaagcagttattacctcagcattttgacatcagatatgcaaacttaatggcgttttgtttttttatattctatttgtattctttccccagtatttcccatggggatctccacaagtttggagttttttcctggtgcacacacgtgaggagatttaaggtactatatgcaagtgttttactaaaaagcactgaaattcttctggcaatacaagaaccattttcaggatcttggagttacttccttcttaatctttcttaaagcattcactgatgtttttgttttttcaaaatgaaacaaaaatatcacattgagaagctagtctatgttctgtcactaacatttaaactttgcagactctaacaaaaagcacaagaggtcacgtactattatacaaatttagcggtactggatttacctctgacattaacacactcaggcagagaccaggagtgatcagcaggtcttcagaaccaaaaaacctttctgttcacatttcatctgatttttaaactgaggcaggctttgattcttctgaaggatgccaagaatcaaactaagggaggactcactgttaaagatgtgttctgatgtcttatattaagaccaaatgtgacatgatgtgattatcttccagtactttgcttttaggtaccatttcatgacattttaggaatgagtattggaaaatataaagaattagaaaagcagcactttttttttaatggaaaagtcttcggtccagtgttacaccttatagtgtaattcagtccctaagcacagaatgaatgtctggcctgcatatggtagttacagtgtaacctctggctgcagaccacacaggacaaccctaacagcctagtcttgtatggtgtaaatatcaagagtacagcttcaatttcatttgctttatcttagcaacaatgccaactcaggagagcagacggccgatttcagtgaagtctggtagtcaacagatgttatttcagtctcagtgcatctcctctggctttctttgactgaaggtgtttataggaaggaagttaaaaaaaaaaaaagctcattgagattctttaccaattctttacaagatttctgggggtgacagggaaagcaaaaggacttcaaagcaaaagggtgcacaagagcttacttcaccctgaaaatcagtattattaatgaaaagtactgttttcttaaagaagtcgaatgtcctttagatgaacaagaccaagtatacatctccattagattaaaatgtagcacagggttaaaaattatcagtttaatctctttaagaacagtattatcagagtttaaaatgagttagctctgtttatctacacacagcaaacccattcgcagcctcttggccacatgtattcagatgtttgaaatagtgaatcatttcattttcattctaaaacaatactgacttagccatataccttctgtttgtcaatctgaaacttgcttacatctaataagtagacctcttataacactgcaaccattctaagagttggaatttatttttgccaagtattaagtactgttacatctaaaatacagaatgtcaaatggttgcatagcttgtttcccacaacaaggaggaaaagaacaggaatacaaactctgtaatatgctgataaagaagccttagaactgccaactggcttgatggttcaattagtaagctaatttctcccacacccgctccttgatttttagactaattttcccaaagcaaggtttagtcacacaaacttgaaagtacatttaaaatgttcttagttgtcatcctacttttattgcctatggaatatgctaatttctaaaaaaaatacgggagaggcaccaaacccctaaattctagtgcaataatttaaaaaa

SEQ ID NO: 1572 - DNA, 1369 bp, Homo sapiens
  source 1..1369: mol_type = genomic DNA
gttgcggtggccaatagacgcattcggaacatcggcggctgcccgggtgacttggttatatgtcacagaataacattcgagaatgggacatggaatgaggcgacggccccagcaagccccagcagccccagccccagccccaggcccagcagcagcagcagcagcccctgctctcccgccgcccggagaggctctgcagccatgaagccaaccgtcccgaggcaccgccggtaagcagggagcctccgcggagctcccgccgccgctcccccttggtgacctcgccaccagcgggggctcagaggaggaggacaaagacggcggggtgctgttccacgtcaacaagagcggcttccccatcgacagccacacctgggagcgcatgtggatgcacgtggccaaggtgcaccctaaggggggagaaatggtgggcgccatcaggaacgccgccttcttggcaaagccttcaataccccaggtcccaaactacaggctgtcgatgacgatcccagactggctccaggcgatccagaattacatgaagaccctacaatataatcacacagggacccagttctttgaaattaggaaaatgagaccgctgagtgggttaatggaaacagcaaaagaaatgacccgagagtccttgcctatcaaatgccttgaagctgtcatcctgggcatctacttaaccaatgggcagccttccattgagcggttccccatcagctttaaaacctacttctcaggaaactactttcaccacgttgtgctggggatttactgcaatggccgctatggctcattgggcatgagccgcagggctgagctgatggacaagccattgacttttcggactctgagtgacctcatctttgactttgaggactcttacaagaaatacctgcacacagtcaagaaggtcaagattgggctgtacgtcccccatgagcctcatagcttccagcccattgagtggaagcagctggtcctcaacgtctcaaagatgctgagggctgacataaggaaggagctggagaaatatgccagggacatgagaatgaagatcctgaaacctgcaagtgcccactctccgacccaagtgagaagccggggaaaatccctgtcccccagaaggagacaggcaagccccccgaggaggctcggccggcgagagaagtcgcctgcactgcctgaaaagaaggtggctgatctgagcactctgaatgaagtgggctatcaaatccgaatttagccaagccataccggccagcaagagggtttctgtggtgcttctctctgcactttacccagcatcttcaggaggaactgcaactatttattaagaacttgtgaattttatttttaa

SEQ ID NO: 1573 - DNA, 1206 bp, Homo sapiens
  source 1..1206: mol_type = genomic DNA
agcagcagcagcagcagcccctgctctcccgccgcccggagaggctctgcagccatgaagccaaccgtcccgagccttcaataccccaggtcccaaactacaggctgtcgatgacgatcccagactggctccaggcgatccagaattacatgaagaccctacaatataatcacacagggacccagttctttgaaattaggaaaatgagaccgctgagtgggttaatggaaacagcaaaagaaatgacccgagagtccttgcctatcaaatgccttgaagctgtcatcctgggcatctacttaaccaatgggcagccttccattgagcggttccccatcagctttaaaacctacttctcaggaaactactttcaccacgttgtgctggggatttactgcaatggccgctatggctcattgggcatgagccgcagggctgagctgatggacaagccattgacttttcggactctgagtgacctcatctttgactttgaggactcttacaagaaatacctgcacacagtcaagaaggtcaagattgggctgtacgtcccccatgagcctcatagcttccagcccattgagtggaagcagctggtcctcaacgtctcaaagatgctgagggctgacataaggaaggagctggagaaatatgccagggacatgagaatgaagatcctgaaacctgcaagtgcccactctccgacccaagtgagaagccggggaaaatccctgtcccccagaaggagacaggcaagccccccgaggaggctcggccggcgagagaagtcgcctgcactgcctgaaaagaaggtggctgatctgagcactctgaatgaagtgggctatcaaatccgaatttagccaagccataccggccagcaagagggtttctgtggtgcttctctctgcactttacccagcatcttcaggaggaactgcaactatttattaagaacttgtgaattttatttttaaggattcacctggaaatagaatctgagtgggtggtaaccattagctttaaaaaattcactaaaaggcaccatgaaaaggctgaagtaataagccccactggggttggactatgtccctcactcaagatcttaaggataaccgtaactgaagttttatatttttccatttacctactttcttttacttgctttgaacattatgcctcaccaatagtaaatgttcatga

SEQ ID NO: 1574 - DNA, 4224 bp, Homo sapiens
  source 1..4224: mol_type = genomic DNA
attcgagaatgggacatggaatgaggcgacggccccagcaagccccagcagccccagccccagccccaggcccagcagcagcagcagcagcccctgctctcccgccgcccggagaggctctgcagccatgaagccaaccgtcccgaggcaccgccggtaagcagggagcctccgcggagctcccgccgccgctcccccttggcgccaaaggcacccggtcccggagcagccacgcgcggcccgtgagcctcgccaccagcgggggctcagaggaggaggacaaagacggcggggtgctgttccacgtcaacaagagcggcttccccatcgacagccacacctgggagcgcatgtggatgcacgtggccaaggtgcaccctaaggggggagaaatggtgggcgccatcaggaacgccgccttcttggcaaagccttcaataccccaggtcccaaactacaggctgtcgatgacgatcccagactggctccaggcgatccagaattacatgaagaccctacaatataatcacacagggacccagttctttgaaattaggaaaatgagaccgctgagtgggttaatggaaacagcaaaagaaatgacccgagagtccttgcctatcaaatgccttgaagctgtcatcctgggcatctacttaaccaatgggcagccttccattgagcggttccccatcagctttaaaacctacttctcaggaaactactttcaccacgttgtgctggggatttactgcaatggccgctatggctcattgggcatgagccgcagggctgagctgatggacaagccattgacttttcggactctgagtgacctcatctttgactttgaggactcttacaagaaatacctgcacacagtcaagaaggtcaagattgggctgtacgtcccccatgagcctcatagcttccagcccattgagtggaagcagctggtcctcaacgtctcaaagatgctgagggctgacataaggaaggagctggagaaatatgccagggacatgagaatgaagatcctgaaacctgcaagtgcccactctccgacccaagtgagaagccggggaaaatccctgtcccccagaaggagacaggcaagccccccgaggaggctcggccggcgagagaagtcgcctgcactgcctgaaaagaaggtggctgatctgagcactctgaatgaagtgggctatcaaatccgaatttagccaagccataccggccagcaagagggtttctgtggtgcttctctctgcactttacccagcatcttcaggaggaactgcaactatttattaagaacttgtgaattttatttttaaggattcacctggaaatagaatctgagtgggtggtaaccattagctttaaaaaattcactaaaaggcaccatgaaaaggctgaagtaataagccccactggggttggactatgtccctcactcaagatcttaaggataaccgtaactgaagttttatatttttccatttacctactttcttttacttgctttgaacattatgcctcaccaatagtaaatgttcatgaaataatctcttgaacttttggtatagtaaggtaactctaacagtattactgtctttttcagcaataacagaaagcaaaaatgggtgggttttttttaagcagttattacctcagcattttgacatcagatatgcaaacttaatggcgttttgtttttttatattctatttgtattctttccccagtatttcccatggggatctccacaagtttggagttttttcctggtgcacacacgtgaggagatttaaggtactatatgcaagtgttttactaaaaagcactgaaattcttctggcaatacaagaaccattttcaggatcttggagttacttccttcttaatctttcttaaagcattcactgatgtttttgttttttcaaaatgaaacaaaaatatcacattgagaagctagtctatgttctgtcactaacatttaaactttgcagactctaacaaaaagcacaagaggtcacgtactattatacaaatttagcggtactggatttacctctgacattaacacactcaggcagagaccaggagtgatcagcaggtcttcagaaccaaaaaacctttctgttcacatttcatctgatttttaaactgaggcaggctttgattcttctgaaggatgccaagaatcaaactaagggaggactcactgttaaagatgtgttctgatgtcttatattaagaccaaatgtgacatgatgtgattatcttccagtactttgcttttaggtaccatttcatgacattttaggaatgagtattggaaaatataaagaattagaaaagcagcactttttttttaatggaaaagtcttcggtccagtgttacaccttatagtgtaattcagtccctaagcacagaatgaatgtctggcctgcatatggtagttacagtgtaacctctggctgcagaccacacaggacaaccctaacagcctagtcttgtatggtgtaaatatcaagagtacagcttcaatttcatttgctttatcttagcaacaatgccaactcaggagagcagacggccgatttcagtgaagtctggtagtcaacagatgttatttcagtctcagtgcatctcctctggctttctttgactgaaggtgtttataggaaggaagttaaaaaaaaaaaaagctcattgagattctttaccaattctttacaagatttctgggggtgacagggaaagcaaaaggacttcaaagcaaaagggtgcacaagagcttacttcaccctgaaaatcagtattattaatgaaaagtactgttttcttaaagaagtcgaatgtcctttagatgaacaagaccaagtatacatctccattagattaaaatgtagcacagggttaaaaattatcagtttaatctctttaagaacagtattatcagagtttaaaatgagttagctctgtttatctacacacagcaaacccattcgcagcctcttggccacatgtattcagatgtttgaaatagtgaatcatttcattttcattctaaaacaatactgacttagccatataccttctgtttgtcaatctgaaacttgcttacatctaataagtagacctcttataacactgcaaccattctaagagttggaatttatttttgccaagtattaagtactgttacatctaaaatacagaatgtcaaatggttgcatagcttgtttcccacaacaaggaggaaaagaacaggaatacaaactctgtaatatgctgataaagaagccttagaactgccaactggcttgatggttcaattagtaagctaatttctcccacacccgctccttgatttttagactaattttcccaaagcaaggtttagtcacacaaacttgaaagtacatttaaaatgttcttagttgtcatcctacttttattgcctatggaatatgctaatttctaaaaaaaatacgggagaggcaccaaacccctaaattctagtgcaataatttaaaaaacaaaaaacaaaacaaaacaaaaaacatgttatatgcacccccctcccaaagctgattttaagactggctagaattcaaaatataaaaaataaaactatgaagtgatttgaaatcggttttaaaaagttgttagtgcaagagaaattttatgtttaagccatcatggcaatatatgcaaagtttaaatgaatgacagaaatcttgattttagactgtatgttgtgctgttttgagtacactttatttcggagatatttagtattttctatacactctgaaatcatgagcatttcactttttctaagtcaattatttcataaggattttattaatagatattggtaaatagaactttggaaatcttaattcagaattcttactatacctgagtcttttgtaagctatagttttatgtacaaccttgtacagtttttttgacatacaattcagaactttgtttattctcttggactttgttctggccaatacattttttttaaatctttaagaagaactgtgattgttttagtgggtatttttctaattaaatgaaaacttgtataatggtattttagagaatgccagtaagtgcatgtttcaagttaatgtttttctcatcacttgtatgtttctaacacagcatgggactttaataaaaccatcctggaaacttaa

SEQ ID NO: 1575 - DNA, 1218 bp, Homo sapiens
  source 1..1218: mol_type = genomic DNA
agttccgacgaaaaatggcggggtctcctgagttggtggtccttgaccctccatgggacaaggagctcgcggctggcacagagagccaggccttggtctccgccactccccgagaagactttcgggtgcgctgcacctcgaagcgggctgtgaccgaaatgctacaactgtgcggccgcttcgtgcaaaagctcggggacgctctgccggaggagattcgggagcccgctctgcgagatgcgcagtggacttttgaatcagctgtgcaagagaatatcagcattaatgggcaagcatggcaggaagcttcagataattgttttatggattctgacatcaaagtacttgaagatcagtttgatgaaatcatagtagatatagccacaaaacgtaagcagtatcccagaaagatcctggaatgtgtcatcaaaaccataaaagcaaaacaagaaattctgtccttgcctgcattaattgaacaaggagagggattttcccaagttctcaggatgcagcctgttatccacctccagaggattcaccaagaagtcttttccagttgtcataggaaaccagatgctaaacctgagaactttataacacagatagaaaccacaccaacagagactgcttccaggaaaacctctgacatggtactgaaaagaaagcaaactaaagactgcccccagagaaaatggtatccattgcggccaaagaaaattaatcttgatacatgagctctttctgtttattttgggagttgaaaataggcaccatcaacatttagattacagcctaattaatacctagataagacttcatttgaaataagaaataactcttttactagtgattcatttatacagatatagtatctctgtgcggggatatgatataatattgtatttccttactgttttatctattgtaaataaaaagcattttaaaaagtattgacacaaagcccatcagtgggcattaaaaatattaaaagtgcagacttttactgtccttaagtgccatcaactctcagctcccttgtagcttttgtgggatttaacaagtaacaaattctgttgtgtttccctggtatacatctttctaggaaaaaaaaaaaaaagagagagagctgtataatgatttttcgtttacatgctgaaaagtaattatcagttctgcacagcagcagatgcagggtttttttttaaagatgtagtt

SEQ ID NO: 1576 - DNA, 722 bp, Homo sapiens
  source 1..722: mol_type = genomic DNA
cccacagttccgacgaaaaatggcggggtctcctgagttggtggtccttgaccctccatgggacaaggagctcgcggctggcacagagagccaggccttggtctccgccactccccgagaagactttcgggtgcgctgcacctcgaagcgggctgtgaccgaaatgctacaactgtgcggccgcttcgtgcaaaagctcggggacgctctgccggaggagattcgggagcccgctctgcgagatgcgcagtggacttttgaatcagctgtgcaagagaatatcagcattaatgggcaagcatggcaggaagcttcagataattgttttatggattctgacatcaaagtacttgaagatcagtttgatgaaatcatagtagatatagccacaaaacgtaagcagtatcccagaaagatcctggaatgtgtcatcaaaaccataaaagcaaaacaagaaattctgaagcagtaccaccctgttgtacatccactggacctaaaatatgaccctgatccagtccttgcctgcattaattgaacaaggagagggattttcccaagttctcaggatgcagcctgttatccacctccagaggattcaccaagaagtcttttccagttgtcataggaaaccagatgctaaacctgagaactttataacacagatagaaaccacaccaacagagactgcttccaggaaaacctctgacatggtactgaaa

SEQ ID NO: 1577 - DNA, 2317 bp, Homo sapiens
  source 1..2317: mol_type = genomic DNA
cccacagttccgacgaaaaatggcggggtctcctgagttggtggtccttgaccctccatgggacaaggagctcgcggctggcacagagagccaggccttggtctccgccactccccgagaagactttcgggtgcgctgcacctcgaagcgggctgtgaccgaaatgctacaactgtgcggccgcttcgtgcaaaagctcggggacgctctgccggaggagattcgggagcccgctctgcgagatgcgcagtggacttttgaatcagctgtgcaagagaatatcagcattaatgggcaagcatggcaggaagcttcagataattgttttatggattctgacatcaaagtacttgaagatcagtttgatgaaatcatagtagatatagccacaaaacgtaagcagtatcccagaaagatcctggaatgtgtcatcaaaaccataaaagcaaaacaagaaattctgaagcagtaccaccctgttgtacatccactggacctaaaatatgaccctgatccagcccctcatatggaaaatttgaaatgcagaggggaaacagtagcaaaggagatcagtgaagccatgaagtccttgcctgcattaattgaacaaggagagggattttcccaagttctcaggatgcagcctgttatccacctccagaggattcaccaagaagtcttttccagttgtcataggaaaccagatgctaaacctgagaactttataacacagatagaaaccacaccaacagagactgcttccaggaaaacctctgacatggtactgaaaagaaagcaaactaaagactgcccccagagaaaatggtatccattgcggccaaagaaaattaatcttgatacatgagctctttctgtttattttgggagttgaaaataggcaccatcaacatttagattacagcctaattaatacctagataagacttcatttgaaataagaaataactcttttactagtgattcatttatacagatatagtatctctgtgcggggatatgatataatattgtatttccttactgttttatctattgtaaataaaaagcattttaaaaagtattgacacaaagcccatcagtgggcattaaaaatattaaaagtgcagacttttactgtccttaagtgccatcaactctcagctcccttgtagcttttgtgggatttaacaagtaacaaattctgttgtgtttccctggtatacatctttctaggaaaaaaaaaaaaaagagagagagctgtataatgatttttcgtttacatgctgaaaagtaattatcagttctgcacagcagcagatgcagggtttttttttaaagatgtagtttgatttatcaaattaatgtgctgatgataatactggctttgactttgttactccatgttcagctaatttaggtttgtgagattaactttaggattttttgttgtgtaagacaatgataactattatttgtgcaacattactctttgaaataaaaattggcatgtagccaatgtttcctgcccacactcacttttttctatagaccattaacataatttgacttggaactaatggtttctttttagggtttcttatttatttctttacaaatcattccagttcaaaatatatatcagattaatacactggcaaagtgtcattgtgttattgaactatttcacatttgaagatgtttatatatcaggtatataatcactgggagaagtctgagaaaacgatattggctttacttctaacatttaactatagtttcttatagctcttattgtgtgtcttacattatacagtgtaggcagggccatcaaacttaccaactgtttccccttttgatgactctgataccttcattcatttttcaaaggaatttactgatcatgaggttggaaaatctgtatttctcttgcttattatgtattaataatcataaatgtctagattcaccagaagtcaccagaaggtctgtctcagtgaagaaaacttataaagccactttgttgcattttgtgtttcagtgttacagtttgagatctgtatatttgtacacagctatgtgtttttcattgaaataatgtacaaagactgatcttgatgctgtgtatttttatgagttgtcttaggcattcctgagctcagcttcagttggatggtgggtcagcaccctgcgtttctgaacatactagacttcagtttaaaactgttttgaggctgtataatatgttgctgtttttacagtgctaatgtttttatagtattaaaattctgtatgatttgtttcacttcagaggtcccca

SEQ ID NO: 1578 - DNA, 1344 bp, Homo sapiens
  source 1..1344: mol_type = genomic DNA
ggacgctctgccggaggagattcgggagcccgctctgcgagatgcgcagtggacttttgaatcagctgtgcaagagaatatcagcattaatgggcaagcatggcaggaagcttcagataattgttttatggattctgacatcaaagtacttgaagatcagtttgatgaaatcatagtagatatagccacaaaacgtaagcagtatcccagaaagatcctggaatgtgtcatcaaaaccataaaagcaaaacaagaaattctgaagcagtaccaccctgttgtacatccactggacctaaaatatgaccctgatccaggagccaagcctggtggactagctctaggggcagtttaggagagaaggggatcggggaaccttcatcccttctgcctctggtgaactggcaagatgaagaggatgaagctgggtgacccagagcccgccctccctctctcggcagtcatctccaaggccggagtagactggactggagggcctctgagaggacacagccaggaagcacactctccctgtgctcttcacccaccatgaagagacaggacgggaaagtccgtgctgtgctggtgtccatcagagggagggacaccatccagcccctgggaccgggctcggctctgttgttgcacagaagtcatttggagatccccacgtgccacatggaggattgtgggaggaccccaccgaggtggctggcagcctctcatggacaccatggagagtgacccaatcactctgcatttgaggactgcagagtggctcagcggtctggacattgaagaggagccaacctcaggggtaacacagtgccgctgggagctgagatgagccaggtggtcggtgggggacacaagcctagaacaaattcaataaaccagccacagacgttatcatcagatgtgcccagagacaaggtggacaggggcatttgctgtggagaccagagggccagagagagtacagggacctggatagatggctccagcacctcttcttctccctacacccatatgccatcttgataaacagcagggaaatctgaaaaataccaagtcttcccatagggacagtgttacctcccaaaaactgtttgaataattggcttgaactggattttctgaactgaactaatgctattgttttgtgggtttttttcttcctactgagtagagtagttgtttatgggggacatctgatcctttcattttcttccagagagctaaccacctgttctgacaccatttattgaatagtacctcttttcccccactgatgtgagaggctgcatttttcatctaataaaatcgaatatatatttagatcta

SEQ ID NO: 1579 - DNA, 774 bp, Homo sapiens
  source 1..774: mol_type = genomic DNA
gggagccggaggggacgcgccggaggaaagatggaagactaccaggctgcggaggagactgcttttgttgttgatgaagtgagcaacattgtaaaagaggctatagaaagcgcaattggtggtaacgcttatcaacacagcaaagtgaaccagtggaccacaaatgtagtagaacaaactttaagccaactcaccaagctgggaaaaccatttaaatacatcggtaatggagtcttgtttcttttatatttgcgggatggttttttaacactgatcagaggggcatccagtaccagaaacaacagctaacgtggctcaactcaaggaaggctcctggtgggagtcggtcgtgtgtgtagtatacgttagcgtacgcttgaccatttggctgctggtacaattgcagatcgtatgtgaagcgggatcttacaggaggtcccatcagatgcttttagaacaagtgaagcatagaggaagtgtggacagcccccagctgacagtggctcaacttagaatttttcaactttgatggatttaccagggtattaagtgcatttgcaacttacattttcatatattgttgatttatgatgggtttatgggatgttgtaagtcaaggagcacctataatttgtcaatatagtgagacaaggcaatctgtccctataatttttatcgagaacatcaaccacgtggagctacatacattgtacgtttgctaaaagtggacagaatgacatttgtgttacccagtagacttctctaacaaaaatt

SEQ ID NO: 1580 - DNA, 2891 bp, Homo sapiens
  source 1..2891: mol_type = genomic DNA
ttttcgtactgtaaccatatgggaggtgatacagtgcctttcctttgtgattaaggtcacggtagtcacttggaaggatcctttaagcttccagaaatgacttaatctctaagatattgcaaattgttcttcactcagtgagttggttttgtttccaagtccgacttctgagtacagcaagtgaggtggcttcgggcagtcagctcctgaaccccctaaaaagaaagggcagggcctgcagtggacagcagccagacagggaggaagactcactgccaagtcagggttctctgccttgattccctcaggatgcacgttgactgagggccccaggggttgccctctcgaaggcgtgtccagagctacgtacctttcctgggactcagcagtaactttaaacgcttgtgctcatgtgaagagcacattggcaggcaagtgcctgactaatgttattttcaggatgaccttttacccattcagatctaccatgtgtaaaaggaaaactatactcctggcactagattcctgcaggcagcccacctcctgagtcatccagacactgacagagaacagccatgctggcagctggtggttagtcctggagtcggagggcagcactgggaaagaaaaataattacctggagataatgtaatcatcgtacattttacaagtaatggtgctttaaaaaaatctcctcaaggtcaaactgatcctcctaatcagtttacatcatggaagagagaattacatcttaaatggattacttcagcagcttcagttaatttatacaaaaatcaaccaactcattaagcctctctattggttaatgattctagcagccagttgaaatggaagaagagaatgaattctagtttaaagtgaagtcttagattgtggcatgattaaaacaaaacagggccaggtgtggtggcttacgcctgtaatcccagcattttgggaggctgaggcgggaggatcacctgaggtcaggagttcgagaccagcctggccaacatgatgaaaccccatctctactaaaaatacgaaaattagccgggtgtggtggagggcacctgtaatcccagctacttgggaggctgaggcaggagaatcacttgaacctgggaggcagagattgcagtgagctgagattgcgccactgcattccagcctgggctacagagcgacactccgtctcaaaaataaataaataaaaataaaacaatacctttaaattatgtgcatgtattctagtcttctggtttctgaagactgtaatgccatccttggtaaagctgaacagtctagttagattatttctaaggtcttcatttctacattatgttcattacctacatttgcatttatcaatgtagtggaaatatcttttaaataaatcaaacttaactgaatgttcttccttacagactgcttttgttgttgatgaagtgagcaacattgtaaaagaggctatagaaagcgcaattggtggtaacgcttatcaacacagcaaagtgaaccagtggaccacaaatgtagtagaacaaactttaagccaactcaccaagctgggaaaaccatttaaatacatcggtaatggagtcttgtttcttttatatttgcgggatggttttttaacactgatcagaggggcatccagtaccagaaacaacagctaacgtggctcaactcaaggaaggctcctggtgggagtcggtcgtgtgtgtagtatacgttagcgtacgcttgaccatttggctgctggtacaattgcagatcgtatgtgaagcgggatcttacaggaggtcccatcagatgcttttagaacaagtgaagcatagaggaagtgtggacagcccccagctgacagtggctcaacttagaatttttcaactttgatggatttaccagggtattaagtgcatttgcaacttacattttcatatattgttgatttatgatgggtttatgggatgttgtaagtcaaggagcacctataatttgtcaatatagtgagacaaggcaatctgtccctataatttttatcgagaacatcaaccacgtggagctacatacattgtacgtttgctaaaagtggacagaatgacatttgtgttacccagtagacttctctaacaaaaatttgttttaacttaagtgacctgtgtaattatgcagaagaatggagctggattacacacagcaagttcctgcttctgggacagctctactgacggtatgattttcattcatgtttgtgaagttttgttgtgtgaaatatatgactggaagtttcctatctttgaatgcaatgcatgtttatcaccttttaaaacatttaataatagacttgccaaggttctttgtgtagcatagagatgggtacttgaatgttggccttattgtgagtaaaacgtcgtcccccagctttccctgccgtaaatgctgctctcttccctcccgcagggagctgcactgtgcgatgggagaataagaccatgtactgcatcgtcagtgccttcggactgtctatttgacctgcagtccagcctatggcctttctccttttgtctctagttcatcctctaaccaccagccatgaattcagtgaactcttttctcattctctttgttttgtggcactttcacaatgtagaggaaaaaaccaaatgaccgcactgtgatgtgaatggcaccgaagtcagatgagtatccctgtaggtcacctgcagcctgcgttgccacttgtcttaactctgaatatttcatttcaaaggtgctaaaatctgaaatctgctagtgtgaaacttgctctactctctgaaatgattcaaatacactaattttccatactttatacttttgttagaataaattattcaaatctaaa

SEQ ID NO: 1581 - DNA, 726 bp, Homo sapiens
  source 1..726: mol_type = genomic DNA
agggagccggaggggacgcgccggaggaaagatggaagactaccaggctgcggaggagactgcttttgttgttgatgaagtgagcaacattgtaaaagaggctatagaaagcgcaattggtggtaacgcttatcaacacagcaaagtgaaccagtggaccacaaatgtagtagaacaaactttaagccaactcaccaagctgggaaaaccatttaaatacatcgtgacctgtgtaattatgcagaagaatggagctggattacacacagcaagttcctgcttctgggacagctctactgacgggagctgcactgtgcgatgggagaataagaccatgtactgcatcgtcagtgccttcggactgtctatttgacctgcagtccagcctatggcctttctccttttgtctctagttcatcctctaaccaccagccatgaattcagtgaactcttttctcattctctttgttttgtggcactttcacaatgtagaggaaaaaaccaaatgaccgcactgtgatgtgaatggcaccgaagtcagatgagtatccctgtaggtcacctgcagcctgcgttgccacttgtcttaactctgaatatttcatttcaaaggtgctaaaatctgaaatctgctagtgtgaaacttgctctactctctgaaatgattcaaatacactaattttccatactttatacttttgttagaataaattattcaaatctaaa

SEQ ID NO: 1582 - DNA, 5170 bp, Homo sapiens
  source 1..5170: mol_type = genomic DNA
gaaattttaatttattattcccccccttttttcctgcatctataggataatattgtaaaatagcaattgaaaccaataattattaaataaatatcaaggaaaatccaagcaaagctttctttttgttggactagtggtgtggtgtttggagacagtctctgaatgtgaacaggaaagcacccatcagcaaaacactatcactctctagggagacagctgggggaatctgactctggcttctgcttttgttttaagggattaacttccctgtcaagtccaagaagacttgcgtatgagaagattacctgatggacttaattctaagattagcttttttcatcaagatggaaaaagatctttaggagcagaaaaggggagtgctaactgggggagcgagaagggagacgagcaaaagaaacaaaatcttgccacgtggctctgttttgtcagcaagaggatttaagactcacccagggcaaacactgggaccactgtaagagcgctggaacattctgcctcttgagtgaaggggccttctttctagcctctatggcactgaggggtgcgccggctggtggaggagcagtccgatggagccctgcgttccccggggacacagggccaagctttgaggtggaaagtttctggttctgaaacaacaaggagagagtctgtttttcttcctaaaatttggactcttgtctgcacaaactctggtctgttttgcacggtttgtgtgcctttttttccctttatgcaatctttttcagctttagcagcagaaatttgtctagttcaggaaacatgctagagggtggcttcagaaggaagatgatcctgtgtattctgtctctgcatccgaacttttgaagagaaaaattcgagctagagggattcttaaagccttaagttacttgaaatctatgtatttgcaaccctttgtctctggaatcatattacactaaactggaatctcaggctgaatgagaataaccaagtggagtaaaaagaagaaaaccgtttcttgatcaccacttaattaacgatgctctttctccaaaggatcagcacgttcttcctctgagaacttgaaaatacaaatggaccccatgtttttttaagcattaccttttcttagaagactgccatcatcttttatagaggaattttttcactatgcattcggtggatctttataaaatactgaccttctaattagattcaggtcagtcttaattaaagggggaaaaaagcaacgcaagccaaccacaaaaacacatataccaatgaaagaaattggtttaaatttcacagcattaacattactttttaagtaaaacagttcattgaagaaagtatgtatgcagcagtggaacatgggcctgtgctttgcagcgattccaacatcctgtgcctgtcctggaaggggcgtgtccccaagagtgagaaggagaagcctgtgtgcaggagacgctactatgaggaaggctggctggccacgggcaacgggcgaggagtggttggggtgactttcacctctagtcactgtcgcagggacaggagtactccacagaggataaatttcaacctccggggccacaatagcgaggttgtgctggtgaggtggaatgagccctaccagaaactggccacgtgcgatgcggacggaggcatattcgtgtggattcagtacgagggcaggtggtctgtggagctggtcaacgaccgcggggcgcaggtgagtgatttcacgtggagccatgatggaactcaagcacttatttcctatcgagatgggtttgtcctggttgggtctgtcagtggacaaagacactggtcatccgaaatcaacttggaaagtcaaattacgtgtggcatatggactcctgacgaccaacaggtgctgtttggcacggccgatgggcaggtgattgtcatggattgccacggcagaatgctggcccacgtcctcttgcacgagtcagacggtgtcctcggcatgtcctggaactacccgatcttcctggtggaggacagcagcgagagcgacacggactcagatgactacgcccctccccaagatggtccggcagcatatcccatcccagtgcagaacatcaagcctctgctcaccgtcagcttcacctcgggagacatcagcttaatgaacaactacgatgacttgtctcccacggtcatccgctcagggctgaaagaggtggtagcccagtggtgcacacagggggacttgctggcagtcgctgggatggaacggcagacccagcttggtgagcttcccaatggtccccttctgaagagtgccatggtcaagttctacaatgttcgtggggagcacatcttcacactggacactctcgtgcagcgccccatcatctccatctgctggggtcaccgggattcgaggctgttgatggcatcaggaccagccctgtacgtggtgcgtgtggagcaccgggtgtccagcctgcagctgctgtgccagcaggccatcgccagcaccttgcgtgaggacaaggacgtcagcaagctgactctgcccccccgcctctgctcctacctctccactgccttcatccccaccatcaagcccccaattccagatccgaacaacatgagagactttgtcagctacccatcagccggcaacgagcggctgcactgcaccatgaagcgcacagaggacgacccggaggtgggcggcccgtgctacacgctctacctggagtacctgggcgggcttgtgcccatcctcaaagggcggcgcatcagcaagctgcggccagagttcgtcatcatggacccgcggacagatagcaaaccagatgaaatctatgggaacagcttgatttctactgtgatcgacagctgcaactgctcagactccagtgacattgagctgagtgatgactgggctgccaagaaatctcccaaaatctccagagctagcaaatcacccaaactcccaaggatcagcattgaggcccgcaagtcacccaagctgccccgggctgctcaggagctctcccggtccccacggttgcccctgcgcaagccctctgtgggctcgcccagcctgactcggagagagtttccttttgaagacatcactcagcacaactatcttgctcaggtcacgtctaatatctggggaaccaaatttaagattgtgggcttggctgctttcctgccaaccaacctcggtgcagtaatctataaaaccagcctcctgcatctccagccgcggcagatgaccatttatctcccagaagttcggaaaatttccatggactatattaatttacctgtcttcaacccaaatgttttcagtgaagatgaagatgatttaccaggtgatgcagtttggacggattgatggcagtgcgtacattctagacttccagtatccgttctcagccgtgcaggcctttgcagttgccctggccaacgtgactcagcgcctcaaatgaagagactggtgtggggaggagagagatgcagagagcctttggaagaggtcttcggagatgccagaggagccctctaggggtccgatgcctgggaggaccagaagccaacagcaaaactggaaaagcccggcaggcccaggagagggcgctgacctgtggtcgtcatttatttggttgggttttattaccttttattgtctgttcttcttttcttctttcatttcagtggcatttggaagcaaagagtgctaggcacctgctgttctttcaggaaacagcttggctgtggtaatgctctactgggcccttcagaatgaagacagtctgccttagagcctgctattcttttagacatagggaggatgcattatcctgtattctcctccaacatcaccactagcgtaaaagcaaaaagcttttacaaaacacagccaaaaattctcaagatgcaggttcttggggaatgggatggggacagcatttgatttacactgattatgttactccccaaaaggtgacttaattaataaagggcatttgggcagacacactgtgttggaccaacaaagtaggctctttacaggggtgttctcaccaggtagaaatgcgatttgctcactgaggatgttggggaagggacgaagggtaaagaagaaactgcacgtatacacaggttcacatcactctgcagacagcaatgtgactcagcgtgtgacttgtagcagcagtacgagggctacactcctctgctgaggatgtctacattgaaagcctccactagtttcatcgtttgtcaaagttccgtaggatcagtgatggtcattcagcatgactggttctgggagaaggtgagagacaaaaatggaaagatcctggcctgtggtagtggtagcagttttctcaaataatgtggtgacagtcactagatcctcacatgctgagaaacagcctctactctctctgccccttttactttttaatctggaatgcattactgtaaacatgatctttcccatgagataccatgttctatgccttcccattctaaaagtgtggacaacgcttgatttgaaaccactccttttctcctcttggctacattaaaattcagttgactacaaatgctttctatcaaattagaaatgtaaccaaaaaaatgttaagtgttcaccagggtattaaaatacagaggagtatggtcaaatctttgacaaaattttcatgatcttctctaacaaaaaaagttgtttattaactgtacagactgtttactaaggagctaaaccactgagaaaacgttattaaaattgtaatacctaggtagttggttgatcacagtttgttaattgtataaaaaaaaattacctagaatatctcttcccacttcctcgtcctcgtgagaacctgtgggcagtattcaagccctgatgacaaaacccagtgttttttgttgttgttttttgttgttgttttttgtttttgtttttgtttttctcagtcttacctgtgatgttgtttaggatcaggcccctctcctgggcctgctgtgcaggagcacaggaactatctgctggcgttgggttccaaatttgcattttatttggaaacagacaagtagaagatgctacagaaaagtattttcaaatttaaacgttttttaatcccctgttttagttaaaaaa

SEQ ID NO: 1583 - DNA, 11123 bp, Homo sapiens
  source 1..11123: mol_type = genomic DNA
gaaattttaatttattattcccccccttttttcctgcatctataggataatattgtaaaatagcaattgaaaccaataattattaaataaatatcaaggaaaatccaagcaaagctttctttttgttggactagtggtgtggtgtttggagacagtctctgaatgtgaacaggaaagcacccatcagcaaaacactatcactctctagggagacagctgggggaatctgactctggcttctgcttttgttttaagggattaacttccctgtcaagtccaagaagacttgcgtatgagaagattacctgatggacttaattctaagattagcttttttcatcaagatggaaaaagatctttaggagcagaaaaggggagtgctaactgggggagcgagaagggagacgagcaaaagaaacaaaatcttgccacgtggctctgttttgtcagcaagaggatttaagactcacccagggcaaacactgggaccactgtaagagcgctggaacattctgcctcttgagtgaaggggccttctttctagcctctatggcactgaggggtgcgccggctggtggaggagcagtccgatggagccctgcgttccccggggacacagggccaagctttgaggtggaaagtttctggttctgaaacaacaaggagagagtctgtttttcttcctaaaatttggactcttgtctgcacaaactctggtctgttttgcacggtttgtgtgcctttttttccctttatgcaatctttttcagctttagcagcagaaatttgtctagttcaggaaacatgctagagggtggcttcagaaggaagatgatcctgtgtattctgtctctgcatccgaacttttgaagagaaaaattcgagctagagggattcttaaagccttaagttacttgaaatctatgtatttgcaaccctttgtctctggaatcatattacactaaactggaatctcaggctgaatgagaataaccaagtggagtaaaaagaagaaaaccgtttcttgatcaccacttaattaacgatgctctttctccaaaggatcagcacgttcttcctctgagaacttgaaaatacaaatggaccccatgtttttttaagcattaccttttcttagaagactgccatcatcttttatagaggaattttttcactatgcattcggtggatctttataaaatactgaccttctaattagattcaggtcagtcttaattaaagggggaaaaaagcaacgcaagccaaccacaaaaacacatataccaatgaaagaaattggtttaaatttcacagcattaacattactttttaagtaaaacagttcattgaagaaagtatgtatgcagcagtggaacatgggcctgtgctttgcagcgattccaacatcctgtgcctgtcctggaaggggcgtgtccccaagagtgagaaggagaagcctgtgtgcaggagacgctactatgaggaaggctggctggccacgggcaacgggcgaggagtggttggggtgactttcacctctagtcactgtcgcagggacaggagtactccacagaggataaatttcaacctccggggccacaatagcgaggttgtgctggtgaggtggaatgagccctaccagaaactggccacgtgcgatgcggacggaggcatattcgtgtggattcagtacgagggcaggtggtctgtggagctggtcaacgaccgcggggcgcaggtgagtgatttcacgtggagccatgatggaactcaagcacttatttcctatcgagatgggtttgtcctggttgggtctgtcagtggacaaagacactggtcatccgaaatcaacttggaaagtcaaattacgtgtggcatatggactcctgacgaccaacaggtgctgtttggcacggccgatgggcaggtgattgtcatggattgccacggcagaatgctggcccacgtcctcttgcacgagtcagacggtgtcctcggcatgtcctggaactacccgatcttcctggtggaggacagcagcgagagcgacacggactcagatgactacgcccctccccaagatggtccggcagcatatcccatcccagtgcagaacatcaagcctctgctcaccgtcagcttcacctcgggagacatcagcttaatgaacaactacgatgacttgtctcccacggtcatccgctcagggctgaaagaggtggtagcccagtggtgcacacagggggacttgctggcagtcgctgggatggaacggcagacccagcttggtgagcttcccaatggtccccttctgaagagtgccatggtcaagttctacaatgttcgtggggagcacatcttcacactggacactctcgtgcagcgccccatcatctccatctgctggggtcaccgggattcgaggctgttgatggcatcaggaccagccctgtacgtggtgcgtgtggagcaccgggtgtccagcctgcagctgctgtgccagcaggccatcgccagcaccttgcgtgaggacaaggacgtcagcaagctgactctgcccccccgcctctgctcctacctctccactgccttcatccccaccatcaagcccccaattccagatccgaacaacatgagagactttgtcagctacccatcagccggcaacgagcggctgcactgcaccatgaagcgcacagaggacgacccggaggtgggcggcccgtgctacacgctctacctggagtacctgggcgggcttgtgcccatcctcaaagggcggcgcatcagcaagctgcggccagagttcgtcatcatggacccgcggacagatagcaaaccagatgaaatctatgggaacagcttgatttctactgtgatcgacagctgcaactgctcagactccagtgacattgagctgagtgatgactgggctgccaagaaatctcccaaaatctccagagctagcaaatcacccaaactcccaaggatcagcattgaggcccgcaagtcacccaagctgccccgggctgctcaggagctctcccggtccccacggttgcccctgcgcaagccctctgtgggctcgcccagcctgactcggagagagtttccttttgaagacatcactcagcacaactatcttgctcaggtcacgtctaatatctggggaaccaaatttaagattgtgggcttggctgctttcctgccaaccaacctcggtgcagtaatctataaaaccagcctcctgcatctccagccgcggcagatgaccatttatctcccagaagttcggaaaatttccatggactatattaatttacctgtcttcaacccaaatgttttcagtgaagatgaagatgatttaccagtgacaggagcatctggtgtccctgagaacagcccaccttgtaccgtgaacatccctattgcaccgatccacagctcggctcaggctatgtcccccacgcagagcatagggctggtgcagtccctactggccaatcagaatgtgcagctagatgtcctgaccaaccagacgacagctgtagggacagcagaacatgcaggtgacagtgccacccagtacccagtctccaaccggtactccaatcctggacaggtgattttcggaagcgtggaaatgggccgcatcattcagaacccccctccactgtccctgcctcccccgccgcaggggcccatgcagctgtccacggtgggccatggagaccgagaccacgaacacctgcagaagtcagccaaggccctgcggccaacaccgcagctggcagctgagggggacgcagtggtctttagtgccccccaggaggtccaggtgacgaagataaaccctccacccccgtacccaggaaccatccccgctgcccccaccacagcagcacccccgccccctctgccgcccccacagcccccagtggatgtgtgcttgaagaagggcgacttctccctctaccccacgtcagtgcactaccagacccccctgggctatgagaggatcaccaccttcgacagcagtggcaacgtggaggaggtgtgccggccccgcacccggatgctgtgctcccagaacacgtacaccctccccggcccgggtagctctgccaccttgaggctcacggccactgagaagaaggtccctcagccctgcagcagtgccaccctgaaccgcctgaccgtccctcgctactccatccccaccggggacccacccccgtatcctgaaattgccagccagctggcccaggggcggggggctgcccagaggtccgacaatagcctcatccacgctaccctgcggaggaacaaccgtgaggctacgctcaagatggcccagctggccgacagcccgcgggcccccctgcagcccctggccaagtccaagggcgggcccgggggggtggtgacacagctcccagcgcggcccccacctgccctgtacacctgcagtcagtgcagtggcacagggcccagctcacagcccggagcctccctggcccataccgccagcgcctccccgttggcctcccagtcctcctacagcctcctgagcccacccgacagcgcccgcgaccgcaccgactacgtcaactcggccttcacggaggacgaggccctgtcccagcactgtcagcttgagaagcccttgaggcaccctcccctgcctgaagctgctgtcaccctgaaacggccacccccttaccagtgggaccccatgctgggtgaggatgtttgggttcctcaagaaaggacagcacagacttcagggcccaaccccttaaaactgtcctctctgatgctgagtcagggccagcacctggacgtgtcccgactgcccttcatctcccccaagtctcctgccagccccactgccactttccaaacaggctatgggatgggagtgccatatccaggaagctataacaacccccctttgcctggagtgcaggctccctgctctcccaaagatgccctgtccccaacgcagtttgcacaacaggagcctgctgtggtccttcagccgctgtacccacccagcctctcctattgcaccctgccccccatgtacccaggaagcagcacgtgctctagtttacagctgccacctgtcgccttgcatccatggagttcctacagcgcctgcccgcccatgcagaacccccagggcactctccccccaaagccacacttggtggtggagaagccccttgtgtccccaccacctgccgacctccaaagccacttgggcacagaggtgatggtagagactgcagacaacttccaggaagtcctctccctgaccgaaagcccagtcccccagcggacagaaaaatttggaaagaagaaccggaagcgcctggacagccgagcagaagaaggcagcgttcaggccatcactgagggcaaagtgaagaaggaggctaggactttgagtgactttaattccctaatctccagcccacacctggggagagagaagaagaaagtgaagagtcagaaagaccaactgaagtcaaagaagttgaataagacaaacgagttccaggacagctccgagagcgagcctgagctgttcatcagcggggatgagctcatgaaccagagccagggcagcagaaagggctggaaaagcaagcgctccccacgggccgccggcgagctggaggaggccaagtgccggcgggccagtgagaaggaggacgggcggctgggcagccaaggcttcgtgtacgtgatggccaacaagcagccgctgtggaacgaggccacccaggtctaccagctggacttcggggggcgggtgacccaggagtccgccaagaacttccagattgagttagaggggcggcaggtgatgcagtttggacggattgatggcagtgcgtacattctagacttccagtatccgttctcagccgtgcaggcctttgcagttgccctggccaacgtgactcagcgcctcaaatgaagagactggtgtggggaggagagagatgcagagagcctttggaagaggtcttcggagatgccagaggagccctctaggggtccgatgcctgggaggaccagaagccaacagcaaaactggaaaagcccggcaggcccaggagagggcgctgacctgtggtcgtcatttatttggttgggttttattaccttttattgtctgttcttcttttcttctttcatttcagtggcatttggaagcaaagagtgctaggcacctgctgttctttcaggaaacagcttggctgtggtaatgctctactgggcccttcagaatgaagacagtctgccttagagcctgctattcttttagacatagggaggatgcattatcctgtattctcctccaacatcaccactagcgtaaaagcaaaaagcttttacaaaacacagccaaaaattctcaagatgcaggttcttggggaatgggatggggacagcatttgatttacactgattatgttactccccaaaaggtgacttaattaataaagggcatttgggcagacacactgtgttggaccaacaaagtaggctctttacaggggtgttctcaccaggtagaaatgcgatttgctcactgaggatgttggggaagggacgaagggtaaagaagaaactgcacgtatacacaggttcacatcactctgcagacagcaatgtgactcagcgtgtgacttgtagcagcagtacgagggctacactcctctgctgaggatgtctacattgaaagcctccactagtttcatcgtttgtcaaagttccgtaggatcagtgatggtcattcagcatgactggttctgggagaaggtgagagacaaaaatggaaagatcctggcctgtggtagtggtagcagttttctcaaataatgtggtgacagtcactagatcctcacatgctgagaaacagcctctactctctctgccccttttactttttaatctggaatgcattactgtaaacatgatctttcccatgagataccatgttctatgccttcccattctaaaagtgtggacaacgcttgatttgaaaccactccttttctcctcttggctacattaaaattcagttgactacaaatgctttctatcaaattagaaatgtaaccaaaaaaatgttaagtgttcaccagggtattaaaatacagaggagtatggtcaaatctttgacaaaattttcatgatcttctctaacaaaaaaagttgtttattaactgtacagactgtttactaaggagctaaaccactgagaaaacgttattaaaattgtaatacctaggtagttggttgatcacagtttgttaattgtataaaaaaaaattacctagaatatctcttcccacttcctcgtcctcgtgagaacctgtgggcagtattcaagccctgatgacaaaacccagtgttttttgttgttgttttttgttgttgttttttgtttttgtttttgtttttctcagtcttacctgtgatgttgtttaggatcaggcccctctcctgggcctgctgtgcaggagcacaggaactatctgctggcgttgggttccaaatttgcattttatttggaaacagacaagtagaagatgctacagaaaagtattttcaaatttaaacgttttttaatcccctgttttagttaaaaaattggaaaagaaaccgacccatttttttcccagatcaagatgacatgacatcactcccaattctctccaaaccccagagaaatactgacgaagttttctgatgtggcaaaggatatttcccatctaataccagtttctcatttatatttaacgtattggacctgatatttttagtgggtgcattcttccagaaagaattcagcaatgttatcagaattaattcttttatatgagtttatgtagcttgatatggtgtttcagtgcttattggttgtgcaataatggttatagcctgttagataatctaaatgcaattcccctgttttgtcgtttaggagataattatttatcttgcttttcatagtgttcttaggaattattttgttgttacgttttggtgagttatacccattttatttatttagaaaaatagtatctttgttaacgacttacatggtcacagtatattttgctgcaagaaataaagaggatatgatagaaggtttttttttttttttttttttttttttgagacggagtcccactcttgtcgcccaactagagtgtagtggcacaatctcggctccccacaacctctgactccagggttcaggtgattattttgcctcagcctcccaagcagctgggattatagacacccgccaacacgccaggctaatgtttttgtatttttaatagagatggggttttgccatgttggccaggctggtcttgaactcctgacctcaggtgatccgcccgcctcggcctcccaaagtgctgggattacagacgtgagccaccactcccggcccatagaaggttttttgctggataatttgtaacttttctaattgggaaaaaattcctattaatcacttaaaaatttttttttgtattttgtgttattgattatatacaaaggagactttttttttgagataacactcaaatagtattctcttcttttgaaaattttatttttatctgaaaataacagttgatctgaaataaaaaggggagacctattagaatgagagtagccaaggaaagagttactaggtaataagcttcactttttgtgttctaattgtttttgagatataaagaccctgaaaaagcccattttagaacctgtttaataagagcaaatataggggaaaatctttgaaatgaaagctacaaatacatgtgagaagaaaaaaatggatttttttagcaaataattaactaagcttctaaatgcctagctccctcccccaaaggcgctttcccccgatggaggcacaggcttctgtctcggatgtttggcgcacgtgagtttgtatgagtttgtaccggagtgaccccggcagccactgcccacctcccctctacccaggggcctgaaaagaggggctgccctcctgcgccaaggcagacacaagctgcgggctgtgcggtcctagtagtgtgacgtttcagttaatagtggtggtcttattttcaactatgctttcattcagtcagtctctgttgactaaatacgacgaaaattcatactttatgcaggagatttctaaaaatttaatgtttattaatagtttatgaatatcaagatacctcattgaatccctaaatttaaaagcagtccagtaaaaggttaactgtataaagaatctatgactttttgagggaagtgtgatatattaacaaatataaccaattctaaatttgttttagctctaacctcatcaaaccaaaggcacagatttgtgtacaatatacccattgaatgtatatcctgagaaaaattggggccaaagaagcaggaaaatctcaaagctctaatggcagcataaatcaaagaatttcacaggctagtgtttttatccatagccattgctcccttgtcaagtgtctcacaaggacatggaagaatgtgttatgttcatcttgtaatcatagcaaaaagtctgcaaaccccagggtcaagcctgctctgccacagggttggatggtgaccttgggcaagtccctggggctggctaggcctccacttgtccatctgtgaaatgaaaggatcagcctggacagccctctaaactcccttacagctctcagcctaagagcgcagcactgaacagcctcatcattccacttttcatgggaaatatatttcacaccattgcctttgtgtagagaaatatttcttttcctgtgttaatgagctatgtactgaatataaaccagtgcatttaaagtaatatcttttgtgcacctctaaatgtgtttggaattgtgtttgttctcatagaatatacaaaagtactgattctaggtaagaaggagtctccacgggtgtgccctgctcagctggatgtccatgagaacagccatgaaataagtcactacttgtccccaaaaccacaggaatatatacctaggtcacctcaaattcctgagtgtgctctgccatgttacacggtcttcaaattgaaaaggtttcttgaaaaggaaagtttggcccagcaactggagaaggagtccatggtgtcgctgtgtgcctgtatcatttggccaagtcaatggttgtaagcaaagttagtggagacaaaaatgtgtccaaaatgtcgtttgagttcctgggatttctgtaatagcacacaactcagaactcttcagcatttgtgtgattccttacctctggctgataaaactctaatgggttgtggcttactttgtttccattttctttggctttgtgcaatttttgtgtaactttacttgtacctatattttctgtttacagttctttttaaggggaggggtagggttctaagatcttgttgtttattgtagataaaaattttttcgtgttgtagaaaagcatgggttatgcgtttgactgaaaaagacactgtattatttaccaaaggggtattgtttttgcatttgtttataaatgcattattttggtactgtaaatttggacataatttctgagtttattactactggcattttctttttcccttttttttttttttaaccgtaagtgcacgatgcaggtgcataggccccagaccaaactagaccaccagcatgttcatgtccagacctcggcagtggcgtgcactgcttgtgcacctcagttcctccagtgttggtttgtttgttttttaattcagcatcctgctggttttactttccaagcaagatctgttgcgactcccaaatgcgttttaatgagctcatccttatttgcctttcttcttacgtattttgtgtattagattgtgcaggagatattctagaaggcattaatggtttgcattcaaaacgatgtggtttgtccaagttattttctgtctttattactgagacggattaatctccttatttttttcttgatgatttgaagttgtaagagttgtccagctattgcttaataaaattttgcagatcaaaaaa

SEQ ID NO: 1584 - DNA, 5988 bp, Homo sapiens
  source 1..5988: mol_type = genomic DNA
ggctctgtgtatgaatgacaaggataccttcagccagctcattctggatgaatgaatgattacactaagtgtcctccacattcctctgtgggctcacttcatggactcactttgcgtgcttgttaaatgtgctgtgttgctcccaagaccatgtaaagcctactgaccactaacctccctcacagcagaaactagacgtcaggttaaaatgggcaactccgacagtcagtacacccttcaaggatctaaaaatcatagcaatactattactggtgctaagcaaattccttgctccctgaaaatacgtggcattcatgcaaaagaggaaaagtcattgcatggatggggtcacggaagcaacggagcaggttacaagtccaggtccctggcccgaagctgcctttctcactttaagagtaaccagccttacgcatcgagactcggtggccccacatgcaaggtctccagaggtgttgcctactccacgcacaggacaaatgccccagggaaggatttccagggcatcagtgctgctttctcaactgagaatggcttccactctgttggccacgagctggcagataaccacatcacctccagagactgcaacggacaccttctcaactgctacgggaggaatgagagcattgcctccaccccaccgggcgaagaccgcaagagcccccgagtgctcatcaaaacgctggggaagctggatgggtgtttaagggtcgagttccacaatggtggcaaccccagcaaagtgcctgcagaggactgcagtgagccggtgcagctgctgaggtactcacctaccttagcatcggaaacctcccctgtgcctgaagccaggagggggtccagcgccgattccctgcccagccatcgcccctctcccacggactctcgcctgcggtccagcaaaggcagctccctgagttctgagtcatcctggtacgactccccttggggcaatgctggagagctgagcgaggctgagggctccttcctggcccccggcatgcctgaccccagtctccatgccagcttcccacctggcgatgccaaaaagcctttcaaccaaagctcttccctctcctccctccgggaactgtacaaagatgccaacctggggagcctctccccctcaggtatccgcctttctgatgaatacatgggcacgcatgccagcctgagcaaccgtgtctcttttgcttccgacattgatgtgccctccagagtggcacacggggaccccatccagtacagttccttcactctcccctgtcggaagcccaaagcctttgttgaggatactgcgaagaaggactccctcaaagccaggatgcgacggatcagtgactggacgggaagcctctcaaggaagaaaaggaaactccaggagccgaggtccaaggagggcagtgactactttgacagtcgctctgatggactgaatacagatgtgcagggatcctcccaggcatctgcttttctgtggtcagggggctctactcagatcctgtctcagagaagtgaatccacacatgcgattggcagcgatcccctccggcagaacatttatgagaatttcatgcgagagttggaaatgagcaggaccaacactgagaacatagaaacatctacagaaaccgccgagtccagcagcgagtcactcagctctctggaacagctggatctgctctttgagaaggaacagggggtggtccggaaggccgggtggctcttcttcaagcccctggtcactgtgcagaaggaaaggaagcttgagctggtggcacgaaggaaatggaaacagtactgggtaacgctgaaaggatgcacgctgctgttttatgagacctatgggaagaattccatggatcagagcagtgcccctcggtgtgctctgtttgcagaagacagcatagtgcagtctgttccagagcatcccaagaaagaaaatgtgttctgcctcagcaactcctttggagatgtctaccttttccaggccaccagccagacagatctagaaaactgggtcactgctgtacactctgcttgtgcatccctttttgcaaagaagcatgggaaagaggacacgctgcggctgctgaagaaccagaccaaaaacctgcttcagaagatagacatggacagcaagatgaagaagatggcagagctgcagctgtccgtggtgagcgacccaaagaacaggaaagccatagagaaccagatccagcaatgggagcagaatcttgagaaatttcacatggatctgttcaggatgcgctgctatctggccagcctacaaggtggggagttaccgaacccaaagagtctccttgcagccgccagccgcccctccaagctggccctcggcaggctgggcatcttgtctgtttcctctttccatgctctggtatgttctagagatgactctgctctccggaaaaggacactgtcactgacccagcgagggagaaacaagaagggaatattttcttcgttaaaagggctggacacactggccagaaaaggcaaggagaagagaccttctataactcagatatttgattcaagtggcagccatggattttctggaactcagctacctcaaaactccagtaactccagtgaggtcgatgaacttctgcatatatatggttcaacagtagacggtgttccccgagacaatgcatgggaaatccagacttatgtccactttcaggacaatcacggagttactgtagggatcaagccagagcacagagtagaagatattttgactttggcatgcaagatgaggcagttggaacccagccattatggcctacagcttcgaaaattagtagatgacaatgttgagtattgcatccctgcaccatatgaatatatgcaacaacaggtttatgatgaaatagaagtctttccactaaatgtttatgacgtgcagctcacgaagactgggagtgtgtgtgactttgggtttgcagttacagcgcaggtggatgagcgtcagcatctcagccggatatttataagcgacgttcttcccgatggcctggcgtatggggaagggctgagaaagggcaatgagatcatgaccttaaatggggaagctgtgtctgatcttgaccttaagcagatggaggccctgttttctgagaagagcgtcggactcactctgattgcccggcctccggacacaaaagcaaccctgtgtacatcctggtcagacagtgacctgttctccagggaccagaagagtctgctgccccctcctaaccagtcccaactgctggaggaattcctggataactttaaaaagaatacagccaatgatttcagcaacgtccctgatatcacaacaggtctgaaaaggagtcagacagatggcactctggatcaggtttcccacagggagaaaatggagcagacattcaggagtgctgagcagatcactgcactgtgcaggagttttaacgacagtcaggccaacggcatggaaggaccgcgggagaatcaggatcctcctccgaggtctctggcccgccacctgtctgatgcagaccgcctccgcaaagtcatccaggagcttgtggacacagagaagtcctacgtgaaggatttgagctgcctctttgaattatacttggagccacttcagaatgagacctttcttacccaagatgagatggagtcactttttggaagtttgccagagatgcttgagtttcagaaggtgtttctggagaccctggaggatgggatttcagcatcatctgactttaacaccctagaaaccccctcacagtttagaaaattactgttttcccttggaggctctttcctttattacgcggaccactttaaactgtacagtggattctgtgctaaccatatcaaagtacagaaggttctggagcgagctaaaactgacaaagccttcaaggcttttctggacgcccggaaccccaccaagcagcattcctccacgctggagtcctacctcatcaagccggttcagagagtgctcaagtacccgctgctgctcaaggagctggtgtccctgacggaccaggagagcgaggagcactaccacctgacggaagcactaaaggcaatggagaaagtagcgagccacatcaatgagatgcagaagatctatgaggattatgggaccgtgtttgaccagctagtagctgagcagagcggaacagagaaggaggtaacagaactttcgatgggagagcttctgatgcactctacggtttcctggttgaatccatttctgtctctaggaaaagctagaaaggaccttgagctcacagtatttgtttttaagagagccgtcatactggtttataaagaaaactgcaaactgaaaaagaaattgccctcgaattcccggcctgcacacaactctactgacttggacccatttaaattccgctggttgatccccatctccgcgcttcaagtcagactggggaatccagcagggacagaaaataattccatatgggaactgatccatacgaagtcagaaatagaaggacggccagaaaccatctttcagttgtgttgcagtgacagtgaaagcaaaaccaacattgttaaggtgattcgttctattctgagggagaacttcaggcgtcacataaagtgtgaattaccactggagaaaacgtgtaaggatcgcctggtacctcttaagaaccgagttcctgtttcggccaaattagcttcatccaggtctttaaaagtcctgaagaattcctccagcaacgagtggaccggtgagactggcaagggaaccttgctggactctgacgagggcagcttgagcagcggcacccagagcagcggctgccccacggctgagggcaggcaggactccaagagcacttctcccgggaaatacccacaccccggcttggcagattttgccgacaatctcatcaaagagagtgacatcctgagcgatgaagatgatgaccaccgtcagactgtgaagcagggcagccctactaaagacatcgaaattcagttccagagactgaggatttccgaggacccagacgttcaccccgaggctgagcagcagcctggcccggagtcgggtgagggtcagaaaggaggagagcagcccaaactggtccgggggcacttctgccccattaaacgaaaagccaacagcaccaagagggacagaggaactttgctcaaggcgcagatccgtcaccagtcccttgacagtcagtctgaaaatgccaccatcgacctaaattctgttctagagcgagaattcagtgtccagagtttaacatctgttgtcagtgaggagtgtttttatgaaacagagagccacggaaaatcatagtatgattcaatccagatatgggttaaattcctcattttacttttaaactggtggtaaagtggaaattgcaaaaaaaaaaaaaaaaaaaaactgttcattcctgggttttgtgcagtatacattttcccacaaaatggttgtaaagatttaagttattttaatttattgtggatcagaaacctagatgaaactggtcagaatctgtaaattacttagtttatatccactttgagcaggtatcaaatgatttaggatccttaaaattacattctaataattaagttatgtggaaaaagtaaggctggggaagtcgtgattaatagttttcaaagggccattttttaaaatcctctgggcattttctttcagctgtttgttagtttttgctttatttaaagcatatttaagttattttaatgtggtttaggggcaaaatgtgcagatacttcatttttgtaagatagattgtaatagatgctgtttatactaaacatgtcataactatctatacagtatatattaaaagaaagcttgtactgtatcttatttgatgatatttattttctctgccaagctgtatagtaaaaggaaaataagtcaca

SEQ ID NO: 1585 - DNA, 3281 bp, Homo sapiens
  source 1..3281: mol_type = genomic DNA
gccagggcggcacgggagggcggcgcaggaggtgggacctgcgccgggaaggctccgggacgccagcgcacgcggagcggggaccccggagagccagcaggcgagaagaccggccgagggagagccgatcgcgcctcgagagatccgaggaagtggtcgcgggccgggaggctcccgtgccgagccgaggccaggggtctggggtcgcagcccggcgtgcctgcagctgccgtcgctcgggagcagcagctgtgcccgggatcccggcggcggcgggggaaggaggagctgcagctggactgtggcagctggagggagagggccgggctcccctggcggagccgcgctgggacgactggctgaccgcggccatgcagtcttgacggagtcgctcgggcgcaggggagcagccgcgggcgcgccctcccgggaaggggcaccggagcgcaggcagcagcactttatctgcgactctccagcccagcgagaggcgaagcggtttaccatggaacccgtgaccaagtggagccccaaacaagtggtggactggactagagggttggatgactgcctgcaacaatatgtccacaagtttgaacgagagaagatcaacggcgagcagctgctgcagatttcccatcaggacctggaggagctgggggtcacacggattggacaccaggagcttgtgttggaggctgtggaccttctctgtgcactgaattatggcctcgaaactgataacatgaagaacttggttctgaaactgagagcatcttcccacaatttacagaattacataagtagccgacggaaaagtcccgcttacgatggcaacacctcccgcaaggcccccaatgagttcctgacctcggtggtggagctcatcggcgccgccaaggccctgctggcgtggctggaccgggctccgtttacagggatcactgatttctcagtcacgaagaacaaaattatccagctttgcttggacctgaccactacagtccagaaggattgctttgtagcggaaatggaggataaagttttaactgtggtcaaggttttaaatggcatctgtgacaaaacaatccgatctaccacagatcctgtgatgagccagtgtgcatgtctggaggaagttcacttaccaaacattaaacctggggaaggcctgggcatgtacatcaaatcaacctatgatgggttacacgtgattactggaaccacagaaaatgtgggatggcagctgaaaaatctggtgaagaaattgagagagaatcccaccggagttgtgttactgcttaagaagcgccccaccgggtctttcaactttactcctgctcccctgaaaaacctacggtggaagccacctcttgtacagacctcacctccacccgcgacaacccagtcccctgaaagcactatggatacctcactgaagaaggagaagtcagccatcctggatctttatattcctcctccgcctgctgttccctactctccccgggatgagaatggcagttttgtttatggagggtccagtaagtgcaaacaaccattgcctggtcctaagggttcagagtccccgaattccttcttggaccaggaaagccggagacgaagattcaccattgcagactcggatcagttgcctgggtactcggtggaaaccaacattctgcccacaaaaatgagagagaaaacaccatcttatggcaagccacggcctttgtccatgcctgctgatgggaactggatggggattgtggacccttttgccagacctcgaggtcatggcaggaaaggggaggatgccctttgccggtatttcagtaacgagcggattcctccgatcattgaagagagctcctctcccccataccggttctccagacccacgaccgagcggcatctggtccggggtgcggactacatccgaggaagcaggtgctacatcaactcagatctccacagcagcgccacgattccattccaggaggaagggaccaaaaagaaatctggctcctcagctacgaagtcctcgtccacagaaccgtccctcctggtcagctggtttacgcgcctcaaactgttgactcactgagagggaccctgctcaggccacctgcctggctcctgccccaagtgccttgcttttacagtggacagcctcttctcgtttcagcctcagtattatgtagggaccttatgcaatttctttttcttttgaaaagttatctactgcccttcttggaagtttgcaggattggatgggaacaaattcagaggatcttaggtgctggcttgtggagacaaaaggagggaaatgggtagagcctgtttgtcttgcttccccagagatagaatgtgaagacacgcgctagaaatcgcagtcctggccagagacgttatggtcattgtgagggactggtggcattgttcctttttgaggggctggggggactcaaattggtggctgttttcacacagatgtgttggtttgtggtccaacttctttatctgaaaaagccagtgagaaaacatttttgatttgatttttctaaactatctaccatattttaagtgtagcagctttgactttgcaataacgtggcaagtatctgatttctcctttgaggcagaggtttaagtgtaggcctgttacacttgtttgatacctttttcatgacagtctcagtatagatcagttggtacagaaatacatgaacacattttgatagggcttatttcacacaaagaagtttatggttatttgtgtggggtggtgttgttatatattattgtctttaagggaaaagaagctataagattcgctgacagccaaagtatcatttagaaaagtgaagcaacaagatttaggttgatgaaagatacatgagtttgcattttgacctgttcagtgtctgtcttccagcacggtgtgtacacttcttcaaaattgtacacagtttgctaattagaaatatcttggaaagcctcatggtcactaattttcaactagcatcaggtattttgaaaacgtgtgtctggatattaactcttgtttaaactgaatgtatgatattttgttagaatggaaaagtactatcttgttaatttaagtattttaaatatagttgtatatttttcttactcttagtcacctgtaattgaaatatttctgttttgcgtcatacacgaagctagtgaaaaagaaagtgcaaggcattttcagatgagcaagtgactatcgtggctgttgccagcagggcagtattgtt

SEQ ID NO: 1586 - DNA, 3268 bp, Homo sapiens
  source 1..3268: mol_type = genomic DNA
aactttgcaacccgagcgcgcacgctctgcgctcggccctgccagggcggcacgggagggcggcgcaggaggtgggacctgcgccgggaaggctccgggacgccagcgcacgcggagcggggaccccggagagccagcaggcgagaagaccggccgagggagagccgatcgcgcctcgagagatccgaggaagtggtcgcgggccgggaggctcccgtgccgagccgaggccaggggtctggggtcgcagcccggcgtgcctgcagctgccgtcgctcgggagcagcagctgtgcccgggatcccggcggcggcgggggaaggaggagctgcagctggactgtggcagctggagggagagggccgggctcccctggcggagccgcgctgggacgactggctgaccgcggccatgcagtcttgacggagtcgctcgggcgcaggggagcagccgcgggcgcgccctcccgggaaggggcaccggagcgcaggcagcagcactttatctgcgactctccagcccagcgagaggcgaagcggtttaccatggaacccgtgaccaagtggagccccaaacaagtggtggactggactagagggttggatgactgcctgcaacaatatgtccacaagtttgaacgagagaagatcaacggcgagcagctgctgcagatttcccatcaggacctggaggagctgggggtcacacggattggacaccaggagcttgtgttggaggctgtggaccttctctgtgcactgaattatggcctcgaaactgataacatgaagaacttggttctgaaactgagagcatcttcccacaatttacagaattacataagtagccgacggaaaagtcccgcttacgatggcaacacctcccgcaaggcccccaatgagttcctgacctcggtggtggagctcatcggcgccgccaaggccctgctggcgtggctggaccgggctccgtttacagggatcactgatttctcagtcacgaagaacaaaattatccagctttgcttggacctgaccactacagtccagaaggattgctttgtagcggaaatggaggataaagttttaactgtggtcaaggttttaaatggcatctgtgacaaaacaatccgatctaccacagatcctgtgatgagccagtgtgcatgtctggaggaagttcacttaccaaacattaaacctggggaaggcctgggcatgtacatcaaatcaacctatgatgggttacacgtgattactggaaccacagaaaattctcctgcagacagatctcagaagattcatgctggtgacgaagtcattcaagttaatcagcaaactgtggtgggatggcagctgaaaaatctggtgaagaaattgagagagaatcccaccggagttgtgttactgcttaagaagcgccccaccgggtctttcaactttactcctgctcccctgaaaaacctacggtggaagccacctcttgtacagacctcacctccacccgcgacaacccagtcccctgaaagcactatggatacctcactgaagaaggagaagtcagccatcctggatctttatattcctcctccgcctgctgttccctactctccccgggatgagaatggcagttttgtttatggagggtccagtaagtgcaaacaaccattgcctggtcctaagggttcagagtccccgaattccttcttggaccaggaaagccggagacgaagattcaccattgcagactcggatcagttgcctgggtactcggtggaaaccaacattctgcccacaaaaatgagagagaaaacaccatcttatggcaagccacggcctttgtccatgcctgctgatgggaactggatggggattgtggacccttttgccagacctcgaggtcatggcaggaaaggggaggatgccctttgccggtatttcagtaacgagcggattcctccgatcattgaagagagctcctctcccccataccggttctccagacccacgaccgagcggcatctggtccggggtgcggactacatccgaggaagcaggtgctacatcaactcagatctccacagcagcgccacgattccattccaggaggaagggaccaaaaagaaatctggctcctcagctacgaagtcctcgtccacagaaccgtccctcctggtcagctggtttacgcgcctcaaactgttgactcactgagagggaccctgctcaggccacctgcctggctcctgccccaagtgccttgcttttacagtggacagcctcttctcgtttcagcctcagtattatgtagggaccttatgcaatttctttttcttttgaaaagttatctactgcccttcttggaagtttgcaggattggatgggaacaaattcagaggatcttaggtgctggcttgtggagacaaaaggagggaaatgggtagagcctgtttgtcttgcttccccagagatagaatgtgaagacacgcgctagaaatcgcagtcctggccagagacgttatggtcattgtgagggactggtggcattgttcctttttgaggggctggggggactcaaattggtggctgttttcacacagatgtgttggtttgtggtccaacttctttatctgaaaaagccagtgagaaaacatttttgatttgatttttctaaactatctaccatattttaagtgtagcagctttgactttgcaataacgtggcaagtatctgatttctcctttgaggcagaggtttaagtgtaggcctgttacacttgtttgatacctttttcatgacagtctcagtatagatcagttggtacagaaatacatgaacacattttgatagggcttatttcacacaaagaagtttatggttatttgtgtggggtggtgttgttatatattattgtctttaagggaaaagaagctataagattcgctgacagccaaagtatcatttagaaaagtgaagcaacaagatttaggttgatgaaagatacatgagtttgcattttgacctgttcagtgtctgtcttccagcacggtgtgtacacttcttcaaaattgtacacagtttgctaattagaaatatcttggaaagcctcatggtcactaattttcaactagcatcaggtattttgaaaacgtgtgtctggatattaactcttgtttaaactgaatgtatgatattttgttagaatggaaaagtactatcttgttaatttaagtattttaaatatagttgtatatttttcttactctta

SEQ ID NO: 1587 - DNA, 3431 bp, Homo sapiens
  source 1..3431: mol_type = genomic DNA
atgcggtcccgggttctgtggggcgctgcccggtggctctggccccgccgggccgttggcccagcccgccggcccctgagctccggtagcccgccgctggaggagctgttcacccggggcgggcccttgcggaccttcctcgagcgccaggcggggtctgaagcccatttgaaggtcaggaggcccgagttgctggcggtgatcaaactgctgaacgagaaggagcgggagctgcgggagactgagcacttgctgcacgatgagaatgaagatttaaggaaacttgcagagaatgaaatcactttgtgtcaaaaagaaataactcagctgaagcatcagattatcttacttttggttccctcagaagaaacagatgaaaatgatttgatcctggaagtaactgcaggagttggaggtggccttagacatgcatctgccagcattgggggttcagaagcctataggcacatgaaatttgaaggaggtgttcacagagtacaaagagtgccaaagacagaaaagcaaggccgcgtccatactagcaccatgactgtagcaatattaccccagcctactgagattaatctggtgattaatccgaaagatttgagaattgacactaagcgagccagtggagctggggggcagcatgtaaataccacggacagtgctgtccggatagttcatcttccaacagattggaagtaaaggaagatcagagaaaataagaacatataattttccacagaaccgggtcacagatcacagaataaacaagacgctgcatgatcttgaaacttttatgcaaggagattatctactggatgaacttgtacagtcattgaaggaatacgccgattatgaatctttagtagaaattatttcccaaaaagtttaagttgatttgttatttatagactttcgtatcttagaaaaattctacagtacatccacatagggtgaaagtacccttactctcttgaaaaacgttgagttaacacagttggaggtaatatgcatattctgaagtcatagataatttacacagatctctctcaatgcattagcaaaaatcatacaatatacagatggtcctcgatttacattgtggttaattcccaataaacccatcataagttaaaaatgcatataacgttagcaacacagcagtctcctaattaatgacagcttgacttaacaattttccaactttaccatggtgtgaaagaggtatgattcctaagccctaaggagctcctcagcttgaaatggggctgcatccctataaacccatcataaagtcaaaaaatcctaaaacataagttggtgaccatctgtaatcatgatgtggtggtaaatcttggacgctaccttacaataactagacaaaggaaaatcatcctttgtcctgttctgtgtaaatatttaatgaatgatcaaaacttcagtttaaatattatgaaaaactttaaacataaagtagtagaaataagacagtaaatactgtatcctaatatccagtcaggatacagaaaccataccattaacttgaacagggataattttaatataaaaactgttaactgataatggtattaacttttaagagggatgaaagagagctatgatgtcctaggactgagagtaccccaggaaagaatacccttgaaagggtctccccttccccatggtgaagtcaggcctaatggagagagtggctacagcctactcagtgattgggaaattccctgtcttgccctgggccagagctggtgtaccgctggtggatcaggtcttacaagcaaagaacctcacactcccaactggtaagccagaagcctcttgctagggtgtgagcaaaacttggacaggaactctcagtagatgtttgtgtttgtcaagattctccagacaaacttccttaaaaggattggcttgtgttgttattattaagtctaacaagtccaaaagctggagtgtgaggcaggaggctggaaacccaggaaagctgatggtgcaaggtccagtccaaaggtatctgttggaggattctcttgttctgggaagaggacggtctttttttctcttcagaccttcacctgactggatcaagcccactaacatcgaggaggacagtctgcattactcagagttcactgattgatttaaatgtcaatctcatataaaacaccctcacagaaacacctagaataatgtttgaccttataattggaaaatcagagcaaaagttaaatctcaaaaaaaaaaaaaaaaaaagtatgacccagtagctaggcacctgtggccccgccaagttgacacataaaattaactgtcacagtatcatcttagaagtgaaagaagcccctttatcctgcagtgcccctctaccaccacctactgacaaagaacatggtgctatctggcatgggagaaatgttcagtttgctatggcttgtatgtgtcccctcaaattcaagtgttgccaatgtgacagcatcaagaggtggggtctttaagagatcactaggccatgagggattctcttaggactgggatgaaggcccataataaaagaggtttcggggagcatcctgctagcttgccttctgtatgtgagaacacagcaagaaagccctagtcaacaagtgccagctccttgatcttagacttcccatcctccagaactgtgagaaatacatttctgttccttacaaattacccagtctcctgtattctgttatagcagcacaaaatgaagataccatacctgaacacctgaacattcttcacaaggtagtaaatgcactgctttattctggtctcagtattgtgtgcttaataaggaaatgagaaagggtggatcagggcataggatgaacaagttactgctagacctctcacaatgccactaatggataagattgtattttcatcattcttgtctcttcggaagctaacaccatgctataataggcactaaatagatgtctaaaaacaccttaagtatttgtctagaaatctggtgcattgttcagaaagaaccaaaattcaaaataatttcaaagggcctaaagcactagttaatcaaaattcattagtttttaatggtactaccactctcaaatttaaaatgtcatcttacgttcctcttcctcgcattggatttattgctaaaacctggtaaacacttttaatccttttcaattccattaccactgctcttgtccagaattacttcgcagactaatagtcacctgacttctcccctgcatccgatttgctgtctaattctggttacaaataagtaactgccaaactaatctttctaaaaagcaagactgatctcgtcactcctttgctcaacaatgtaaaagctcccattgtctcccaaataaaaccagctttccactgtgtatacaatacatcca

SEQ ID NO: 1588 - DNA, 3539 bp, Homo sapiens
  source 1..3539: mol_type = genomic DNA
atgcggtcccgggttctgtggggcgctgcccggtggctctggccccgccgggccgttggcccagcccgccggcccctgagctccggtagcccgccgctggaggagctgttcacccggggcgggcccttgcggaccttcctcgagcgccaggcggggtctgaagcccatttgaaggtcaggaggcccgagttgctggcggtgatcaaactgctgaacgagaaggagcgggagctgcgggagactgagcacttgctgcacgatgagaatgaagatttaaggaaacttgcagagaatgaaatcactttgtgtcaaaaagaaataactcagctgaagcatcagattatcttacttttggttccctcagaagaaacagatgaaaatgatttgatcctggaagtaactgcaggagttggaggtcaggaggcaatgttgtttacatcagagatatttgatatgtatcagcaatatgctgcatttaaaagatggcattttgaaaccctggaatattttccaagtgaactaggtggccttagacatgcatctgccagcattgggggttcagaagcctataggcacatgaaatttgaaggaggtgttcacagagtacaaagagtgccaaagacagaaaagcaaggccgcgtccatactagcaccatgactgtagcaatattaccccagcctactgagattaatctggtgattaatccgaaagatttgagaattgacactaagcgagccagtggagctggggggcagcatgtaaataccacggacagtgctgtccggatagttcatcttccaacagattggaagtaaaggaagatcagagaaaataagaacatataattttccacagaaccgggtcacagatcacagaataaacaagacgctgcatgatcttgaaacttttatgcaaggagattatctactggatgaacttgtacagtcattgaaggaatacgccgattatgaatctttagtagaaattatttcccaaaaagtttaagttgatttgttatttatagactttcgtatcttagaaaaattctacagtacatccacatagggtgaaagtacccttactctcttgaaaaacgttgagttaacacagttggaggtaatatgcatattctgaagtcatagataatttacacagatctctctcaatgcattagcaaaaatcatacaatatacagatggtcctcgatttacattgtggttaattcccaataaacccatcataagttaaaaatgcatataacgttagcaacacagcagtctcctaattaatgacagcttgacttaacaattttccaactttaccatggtgtgaaagaggtatgattcctaagccctaaggagctcctcagcttgaaatggggctgcatccctataaacccatcataaagtcaaaaaatcctaaaacataagttggtgaccatctgtaatcatgatgtggtggtaaatcttggacgctaccttacaataactagacaaaggaaaatcatcctttgtcctgttctgtgtaaatatttaatgaatgatcaaaacttcagtttaaatattatgaaaaactttaaacataaagtagtagaaataagacagtaaatactgtatcctaatatccagtcaggatacagaaaccataccattaacttgaacagggataattttaatataaaaactgttaactgataatggtattaacttttaagagggatgaaagagagctatgatgtcctaggactgagagtaccccaggaaagaatacccttgaaagggtctccccttccccatggtgaagtcaggcctaatggagagagtggctacagcctactcagtgattgggaaattccctgtcttgccctgggccagagctggtgtaccgctggtggatcaggtcttacaagcaaagaacctcacactcccaactggtaagccagaagcctcttgctagggtgtgagcaaaacttggacaggaactctcagtagatgtttgtgtttgtcaagattctccagacaaacttccttaaaaggattggcttgtgttgttattattaagtctaacaagtccaaaagctggagtgtgaggcaggaggctggaaacccaggaaagctgatggtgcaaggtccagtccaaaggtatctgttggaggattctcttgttctgggaagaggacggtctttttttctcttcagaccttcacctgactggatcaagcccactaacatcgaggaggacagtctgcattactcagagttcactgattgatttaaatgtcaatctcatataaaacaccctcacagaaacacctagaataatgtttgaccttataattggaaaatcagagcaaaagttaaatctcaaaaaaaaaaaaaaaaaaagtatgacccagtagctaggcacctgtggccccgccaagttgacacataaaattaactgtcacagtatcatcttagaagtgaaagaagcccctttatcctgcagtgcccctctaccaccacctactgacaaagaacatggtgctatctggcatgggagaaatgttcagtttgctatggcttgtatgtgtcccctcaaattcaagtgttgccaatgtgacagcatcaagaggtggggtctttaagagatcactaggccatgagggattctcttaggactgggatgaaggcccataataaaagaggtttcggggagcatcctgctagcttgccttctgtatgtgagaacacagcaagaaagccctagtcaacaagtgccagctccttgatcttagacttcccatcctccagaactgtgagaaatacatttctgttccttacaaattacccagtctcctgtattctgttatagcagcacaaaatgaagataccatacctgaacacctgaacattcttcacaaggtagtaaatgcactgctttattctggtctcagtattgtgtgcttaataaggaaatgagaaagggtggatcagggcataggatgaacaagttactgctagacctctcacaatgccactaatggataagattgtattttcatcattcttgtctcttcggaagctaacaccatgctataataggcactaaatagatgtctaaaaacaccttaagtatttgtctagaaatctggtgcattgttcagaaagaaccaaaattcaaaataatttcaaagggcctaaagcactagttaatcaaaattcattagtttttaatggtactaccactctcaaatttaaaatgtcatcttacgttcctcttcctcgcattggatttattgctaaaacctggtaaacacttttaatccttttcaattccattaccactgctcttgtccagaattacttcgcagactaatagtcacctgacttctcccctgcatccgatttgctgtctaattctggttacaaataagtaactgccaaactaatctttctaaaaagcaagactgatctcgtcactcctttgctcaacaatgtaaaagctcccattgtctcccaaataaaaccagctttccactgtgtatacaatacatcca

SEQ ID NO: 1589 - DNA, 3676 bp, Homo sapiens
  source 1..3676: mol_type = genomic DNA
atgcggtcccgggttctgtggggcgctgcccggtggctctggccccgccgggccgttggcccagcccgccggcccctgagctccggtagcccgccgctggaggagctgttcacccggggcgggcccttgcggaccttcctcgagcgccaggcggggtctgaagcccatttgaaggtcaggaggcccgagttgctggcggtgatcaaactgctgaacgagaaggagcgggagctgcgggagactgagcacttgctgcacgatgagaatgaagatttaaggaaacttgcagagaatgaaatcactttgtgtcaaaaagaaataactcagctgaagcatcagattatcttacttttggttccctcagaagaaacagatgaaaatgatttgatcctggaagtaactgcaggagttggaggtcaggaggcaatgttgtttacatcagagatatttgatatgtatcagcaatatgctgcatttaaaagatggcattttgaaaccctggaatattttccaagtgaactaggtggccttagacatgcatctgccagcattgggggttcagaagcctataggcacatgaaatttgaaggaggtgttcacagagtacaaagagtgccaaagacagaaaagcaaggccgcgtccatactagcaccatgactgtagcaatattaccccagcctactgagattaatctggtgattaatccgaaagatttgagaattgacactaagcgagccagtggagctggggggcagcatgtaaataccacggacagtgctgtccggatagttcatcttccaacaggtgttgtttctgaatgtcaacaagagagatctcagctgaaaaataaagagctggctatgacaaagttacgtgcaaaactgtacagcatgcatctagaagaagaaataaataaaagacagaatgctagaaaaattcagattggaagtaaaggaagatcagagaaaataagaacatataattttccacagaaccgggtcacagatcacagaataaacaagacgctgcatgatcttgaaacttttatgcaaggagattatctactggatgaacttgtacagtcattgaaggaatacgccgattatgaatctttagtagaaattatttcccaaaaagtttaagttgatttgttatttatagactttcgtatcttagaaaaattctacagtacatccacatagggtgaaagtacccttactctcttgaaaaacgttgagttaacacagttggaggtaatatgcatattctgaagtcatagataatttacacagatctctctcaatgcattagcaaaaatcatacaatatacagatggtcctcgatttacattgtggttaattcccaataaacccatcataagttaaaaatgcatataacgttagcaacacagcagtctcctaattaatgacagcttgacttaacaattttccaactttaccatggtgtgaaagaggtatgattcctaagccctaaggagctcctcagcttgaaatggggctgcatccctataaacccatcataaagtcaaaaaatcctaaaacataagttggtgaccatctgtaatcatgatgtggtggtaaatcttggacgctaccttacaataactagacaaaggaaaatcatcctttgtcctgttctgtgtaaatatttaatgaatgatcaaaacttcagtttaaatattatgaaaaactttaaacataaagtagtagaaataagacagtaaatactgtatcctaatatccagtcaggatacagaaaccataccattaacttgaacagggataattttaatataaaaactgttaactgataatggtattaacttttaagagggatgaaagagagctatgatgtcctaggactgagagtaccccaggaaagaatacccttgaaagggtctccccttccccatggtgaagtcaggcctaatggagagagtggctacagcctactcagtgattgggaaattccctgtcttgccctgggccagagctggtgtaccgctggtggatcaggtcttacaagcaaagaacctcacactcccaactggtaagccagaagcctcttgctagggtgtgagcaaaacttggacaggaactctcagtagatgtttgtgtttgtcaagattctccagacaaacttccttaaaaggattggcttgtgttgttattattaagtctaacaagtccaaaagctggagtgtgaggcaggaggctggaaacccaggaaagctgatggtgcaaggtccagtccaaaggtatctgttggaggattctcttgttctgggaagaggacggtctttttttctcttcagaccttcacctgactggatcaagcccactaacatcgaggaggacagtctgcattactcagagttcactgattgatttaaatgtcaatctcatataaaacaccctcacagaaacacctagaataatgtttgaccttataattggaaaatcagagcaaaagttaaatctcaaaaaaaaaaaaaaaaaaagtatgacccagtagctaggcacctgtggccccgccaagttgacacataaaattaactgtcacagtatcatcttagaagtgaaagaagcccctttatcctgcagtgcccctctaccaccacctactgacaaagaacatggtgctatctggcatgggagaaatgttcagtttgctatggcttgtatgtgtcccctcaaattcaagtgttgccaatgtgacagcatcaagaggtggggtctttaagagatcactaggccatgagggattctcttaggactgggatgaaggcccataataaaagaggtttcggggagcatcctgctagcttgccttctgtatgtgagaacacagcaagaaagccctagtcaacaagtgccagctccttgatcttagacttcccatcctccagaactgtgagaaatacatttctgttccttacaaattacccagtctcctgtattctgttatagcagcacaaaatgaagataccatacctgaacacctgaacattcttcacaaggtagtaaatgcactgctttattctggtctcagtattgtgtgcttaataaggaaatgagaaagggtggatcagggcataggatgaacaagttactgctagacctctcacaatgccactaatggataagattgtattttcatcattcttgtctcttcggaagctaacaccatgctataataggcactaaatagatgtctaaaaacaccttaagtatttgtctagaaatctggtgcattgttcagaaagaaccaaaattcaaaataatttcaaagggcctaaagcactagttaatcaaaattcattagtttttaatggtactaccactctcaaatttaaaatgtcatcttacgttcctcttcctcgcattggatttattgctaaaacctggtaaacacttttaatccttttcaattccattaccactgctcttgtccagaattacttcgcagactaatagtcacctgacttctcccctgcatccgatttgctgtctaattctggttacaaataagtaactgccaaactaatctttctaaaaagcaagactgatctcgtcactcctttgctcaacaatgtaaaagctcccattgtctcccaaataaaaccagctttccactgtgtatacaatacatcca

SEQ ID NO: 1590 - DNA, 6434 bp, Homo sapiens
  source 1..6434: mol_type = genomic DNA
cgcgcttgggcggcggaggctgcagctacctcggcgccggctcggctctaggacgtgtcgggctgcacgggtcgggggcggctccctgctgcttccgagcctagccgcctggccttcggcatttgcagacacactgccctccagaaacgatgggtgtcgctagatccagctgggactctgccagcctccggcactcagtctaagagaagggccatcttccagccctgctgtccctgcctgtcatggccacattcggctgctgtctgcatgtctggggacacagggcacccagccccagccctgagaagttaagccaggccttctggctcagttccacaggggcactccagaccccaggcccctttcagagcaaaagcaactgatgctatgggagaagcccctgcccacctgtccactcgcctggcactgcccactctgagacccatgcactgggttcccctggaggtgccaaccctgtgagtccctccctgtcccctgacgctgagaaggccctgccaacccccaccatgtgtgaggtgatgcccacaatcaatgagggggaccgcctgggtccccctcatggcgccgatgctgacgccaacttcgagcagctgatggtgaacatgctggacgagcgggagaagttgctggagtctcttcgggagagtcaggagaccttggcggccacacagagccggctccaggatgccatacacgagcgggaccagctccagcgccaccttaactccgccctcccccaggaatttgccaccttaacccgggagctgagcatgtgtcgggagcagcttctagagcgggaggaagagatatcagaactgaaagcagaacggaataacacacggctgcttctggaacatctggagtgcctggtgtcccgccatgaacggtcactgcggatgactgtggtgaagcgccaggcccagtcaccttcgggggtctccagtgaggtggaggtgctgaaggccctcaagtcactgtttgagcaccacaaggccctggatgagaaggtgcgagagcggctccgggcagcgctggagcgagtcaccaccttggaggagcagctggcaggtgcccaccagcaggtgtctgccctgcagcagggggcaggggtgcgggatggagcggcagaagaggaggggactgtggagctggggccgaaacgcctgtggaaggaggatacgggccgggtagaggagctgcaggagctcctggagaagcagaactttgagttgagccaggcccgggagcgactggtcaccctaacaacaaccgtgactgaactcgaggaggacctgggcacggcccgccgggacctcatcaagtcggaggagctgagcagcaagcatcagcgggacctccgggaggctctggcccagaaggaggacatggaagagcggattactacactggagaagcgctacctggctgctcagcgtgaggcaacatccatccatgacctcaatgacaagctggagaatgagctggccaacaaggagtccctgcaccgccagtgtgaggagaaggcccgacacctgcaggagctgctggaggtggcagagcagaagctgcagcagacgatgcgcaaggcagagacgctgccagaggtggaggctgagctggcccagagaattgcagccctcaccaaggctgaagaacggcatggcaacattgaggagcacctgcggcagctggagggacagctggaggagaagaaccaggagctggcacgggtgcgccagcgggaaaagatgaatgaggaccacaacaagcggctgtcggacacagtggaccggctgctcagcgagtccaacgagcgtctgcagctccacctgaaggagcgcatggctgccctggaggagaagggccgcctgtctgaagagattgagaagctgcgccaagaggtggaccagctgaagggccgaggggggccgtttgtggatggcgtccactccaggtcgcacatgggcagtgcagcagacgtgcggttctccctgggcacaaccacacacgcacccccaggcgtgcatcgccgctactcggcattgagggaagagtctgccaaggactgggagacttctccactgcctgggatgctggccccggcagctggccctgcctttgacagtgaccctgagatctccgacgtggatgaggatgagccagggggtctggtgggctctgcggatgttgtctcccccagcggccactcagatgcccagaccctggccatgatgctgcaggagcagctggatgccatcaatgaggaaatcaggatgattcaggaagagaaggagtccacggagctccgcgcggaggagattgagacgcgtgtaaccagtggcagcatggaagccctaaacctgaagcagctgcgcaagcgtggttccatccccacctctctgacggccctgtccctggccagcgcgtccccaccactcagcggccgctccacacctaagctcacctcccgcagtgctgcccaggacctggaccgaatgggggtcatgaccctgcccagtgacttaagaaagcataggaggaagctgctgtcgccagtgtctcgggaagagaaccgagaggataaagccaccataaaatgtgagacttctcctccttcctcacccaggacgctgcggctagagaagcttggccacccagccctgagccaggaagaaggcaagagtgccttggaggatcagggcagcaaccccagcagcagcaacagcagccaggactccctgcacaagggcgccaagcgcaagggcatcaagtcgtccattggccgcctgtttgggaagaaggagaagggcaggctgatccagctgagtcgggatggagccacaggccatgttctgctaacagactccgaattcagtatgcaggagcctatggtgcctgccaagctggggacccaggcagagaaggaccggcggctaaagaagaaacaccagctgcttgaagatgcccgcaggaaaggaatgccctttgcccagtgggatggtcctactgtggtctcctggttggagctctgggtggggatgcctgcctggtatgtggcagcctgccgggccaacgtcaagagtggtgccatcatgtccgctctgtcggacacagagatccagcgggagatcggcatcagcaatgccctgcaccggctcaagctccgcctggccattcaggagatggtgtcattgaccagcccctctgccccacccacctccaggacttcttctgggaatgtctgggtcacccatgaagagatggaaactctggaaacatctactaaaacagacagtgaggagggcagctgggctcagaccctggcctatggggacatgaaccatgagtggattgggaatgaatggctacccagcctggggctcccgcagtaccgcagctacttcatggagtgcctggtggacgcccgcatgctggaccacctcaccaagaaggacctgcgggtccacctgaagatggtggacagcttccatcgaaccagtcttcagtatggcatcatgtgtctgaagaggctgaattatgaccggaaggagctggagaagaggcgagaggagagccagcatgagatcaaggatgtgttagtctggaccaacgaccaggtggttcattgggtccagtctattgggctccgggactacgcaggaaacctgcatgagagtggtgtgcatggagccttgctggccctggacgagaacttcgaccacaacacactggccctgatcctccagatccccacacagaacacccaggcacgccaagtgatggaaagagagttcaataacctgttggccttgggcacagaccggaagctggatgacggggatgacaaggtgtttcgccgcgcgccctcctggaggaagcgcttccggccgcgggagcaccacggtcgcggcggcatgctcagcgcttccgcggagaccctcccggcgggcttccgtgtgtccaccctggggaccctgcagcccccaccggccccgccaaagaagatcatgcctgaagctcactcccactatctctacggacacatgctctccgccttccgggactagccatggcccccagggctggcttcctccttctgggtttcacaggctcctctggccctgacccctcttgctcgttccccttccttccgcagctcctagtctcgtccgtgactttccggttgccctggatctcagaatatattcgtccaccccctcggcaccccattaccccgagtcccaccgtgtgtccgttgtaagtccggtggatgtggctggggtttcctggtattgtggaggcacccaggttgtccatgcttgggattctgggggaaggagagaagggcagctcagggtggatgtgaagccacccttcctcttctggacccagcctggtctgcactgcaacctccaccaggaccaggatcctgggccacaggctgggatggtccttccaagaaagggtcatttcagacgcagccctgcttgggctattcaatcttagggtgtctatccacgtctggctgtgccaaatggtctggcagctggttttggcatccccagcatcaccactctcccaacccatcaccgtgactgcagttcctgcccccattctcttggggtcagggaggggctgggaagggctactgaaggccccattctcccacaggatggtgaggctgggaggaggaagactgaggtagagattccaggccctggcataagctgaatcccaaatttgagtttgggaagaaccagagagaaatggatccctgagctctgagccaagggtgaggatggggaaactctaagctcccacctaataagaagcataggcagaccagccagagggagagccaatggcctctggtagccttaagcccaaagggcagtgggaatgtcccctgccccaaccatcgggtggagctcctgctgggctatggggaagggaggttgtgcggatcttgactctagggcagaacagatctaaccatgcattgctagctctgctcccagcatcccttccccttctctcctcctctgcctcacttctttagtaatcccaaccctataaaaatgaacctaatgggtggattgaatatacattgagcccaaagtcaagtttggggaaaaggcagactaaggcctcctttctctgacctcccaggaagaaaatagcttctcctacagtgattcatgtcccaggtccaggaaatccaatgttggtgaaggcagccactctcttgcttgtccccaaatcacctaaccctcatccagggctattttggtgggcagggactgcctcctcccggaattcctaagatccgcccagctgccaccattttcattgctttccccagcagcatgatgggaacccaagctgagggatacaggtcctgatttggtaggaatattattcccaagaaatacccgctcctcacctactccctcatcctaccaaggtgcctgaaaatgttcaagacttatgttcagggtgggatgatggaaccgagggcttcatcaaagtgagaggaaaggaaaagcatctggcatgtgtttcttggataggggccagtgcagtgccatcctacaggtggctggagcagctgctttgcaacctgatcaccttgagttctgagcagggactaggcttgcaggtgagataatgggccagggcacccagtccagaaggagcaatggcacctgggcagtgccagggcttaaagcccgctgctccttttcggtagaggagaggcccatcactggtgtggtggggtgggctctcccttaggcttgggcaaggcagccacctgcccttgctctcccttagtgttccctggcctccctgccatcaggttgctgggagtggagatggagggattattgagcagaaaatgagttggatggagataaacagctcccatccctgggtaatggatggtaagatgatggagattcctaagattggtggagttgggcaatgcatagccatctgactccttcagggtgctcttgatgggctggctgtaagggagactcagtcccagcctctcccctctacaactcctgccactgttggccatgtcgtaaggcagcagctgtgccaggatagctgggtccattcagagcaccttgagaagtgttgcagggaggtgttaagaagagaactctgtgcaaacagtgatggaaggctgttgtcttggtgtatcccttgcctcatagtcaatatattttttttttggcgagtcaccagtgacccgagccctccacaccagcctcctgtatctcatcaggtcccttctcagtactgtatttgctcagtgcatcaggaatgggtgtatgggtgtgtgtgggtgggtgtgagtgtgggtgtgtacgtaccaataaacaacctggttttaagacaatgta

SEQ ID NO: 1591 - DNA, 3970 bp, Homo sapiens
  source 1..3970: mol_type = genomic DNA
gttgtcgggtcttattggccgctgattagaccagccggggtccactagccctgggcttcagggaggctgctgcgtccagtgaacacttcagcacctgtagcacagaagggccaaggagctgcagtcctcgaccagcaggaggtttgctcctcagcccactcgctgcatccagatcagctcacccctctcccttccctgcccaccaggactctgatagcccctggcagccacagcccattttgccaagatgtctagagtagccaaatatcgccggcaggtgagtgaagaccccgacatcgacagcctgctggagaccctgtctcccgaggagatggaggagctggagaaggagctggacgtggtggacccagacgggagtgttcccgtggggctgcggcagagaaaccagacggagaaacagtccacgggtgtgtacaaccgggaggccatgctcaacttctgtgaaaaggagaccaagaaacttatgcagagggagatgtccatggatgaaagcaagcaagtggagaccaagacagatgccaagaatggagaggaaaggggcagagatgccagcaaaaaagccctgggccccagacgggactcagatctggggaaggagccaaagaggggtggtttaaagaaaagcttctctagagacagagatgaagctggtggcaagagtggcgagaagcccaaggaggagaagatcatccggggcattgacaagggccgggtcagggctgcagtggataagaaggaggcagggaaggatgggagaggagaggagagggcagtggccaccaagaaggaagaggagaagaaagggagtgacaggaacacaggcttgagcagggacaaggataaaaagagagaggagatgaaggaggtggccaagaaagaggatgatgagaaggtaaaaggggagcgtaggaacacagacaccagaaaagagggtgagaagatgaaaagagcaggtgggaacacagacatgaaaaaggaggatgagaaggtaaaaagaggaactgggaacacagacaccaaaaaggacgatgaaaaagtcaagaagaatgaacccttacatgaaaaggaagccaaggatgacagcaagaccaaaacacccgagaaacagacgcccagtggccccaccaagccctctgaaggaccggccaaggtggaggaggaggcagctcccagcatatttgatgagcctctggagagagtgaagaacaatgaccccgagatgactgaggtgaacgtcaacaactcagactgcatcacaaatgagatcttggtccggtttactgaggctctggagttcaacactgtggttaagctgttcgccttggccaacacgcgagccgatgaccacgtggcctttgccattgccatcatgctcaaggccaacaagaccatcaccagcctcaacctggactccaaccacatcacaggcaaaggcatcctggccatcttccgggccctcctccagaacaacacgctgaccgagctccgcttccacaaccagcgacacatctgtggaggcaagacggagatggagatcgccaagctgctgaaggagaatactaccctgctcaagctgggctaccattttgagctggccgggccccgaatgactgtcaccaatctgctcagccgcaacatggacaagcagagacaaaagcggctgcaggagcaaaggcaggcacaggaagccaagggagagaagaaggatctgctggaggtacccaaggccggggccgtggctaagggctccccaaaaccttcacctcaaccatctccaaagccctctccaaagaactcacccaaaaaagggggtgctccagctgccccaccaccccctccccctcccttggctccaccccttatcatggagaacctgaagaattcactctcaccagctacccagaggaagatgggagacaaagtcctccctgcccaggagaagaactcccgtgaccagctattggctgccatccgctccagcaacctcaagcagctcaagaaggtggaagtgcccaaactgcttcagtaggaccaggctgccaggcaccatctgccaatgccatgactgctcaggcctcacctcccagggctacacagaccctgcccaccccatccctggctgacctgctgtggatgtccctattctgccatgggagagtccaggcctgggtcacgctcaaggaaggatgccttatctcttctcactttccttttcttgtctctgaggctctccaaattttgctttagtacatggagctcaggtttctggacaagaagagtccttttagcacatcactgagaagatggcactgtccagggcccatgtagctggcaagctgcaaaaggcctgtgatccaggaaagatgtcccacagggaccacatccaccccagccccactgccctccagggccaggattcaggcctctgaggagcccacggggcaaagctgctgggccagtggcactctgtgtgggaaaatggcagaaagatggagaggcatgggggcccaaaggggagcgtggggaggggctgaggataccccaaagtccaggctaattagaggatgtggcaggggcagtggcctggatgcacagtgcctgatgggagtaggctccagacaggaggagtgggacagacagcagctggacttgaaggtttgatgccaaagcagacattttcctcacacccacctgctgctgtatgaatagctgtgtatctgtttttccataagattttgataatatatacaaacctttagctgtgaatggctgtgccccacctgttgtcctgaactgtgagtcctgatcctaaccctgggctccctggaggactctagaagctcaggttccctgccacactatttgagttggccaagaaataaattcacatcctcagaaagtgcagcatggaggaaaatctgaactctaagcagaagactctccactgacctggttgtccaggtctagaaggccaggcctctactaggtctgctcctgaaccagtcctgctgcctggagtcagtagccagagttgttctcaggggtgctggggcagagtggagcccagggtgctgggatggctatattaggcatgttcagggatgctcattccatgactctgcctaaccatgggctcagggccaggtcctcacagcagtcacaggcccaggaaggcggcaggcagagaagtggagtgactatttggagaatagcacccatatctgtgtgccctagggctcagaggggcctcatcttccccagccctccccacctgctcaccaattccacttcctgccccaactgcaggaatgctgacaatgctgccatgcccaccatcgggtgtaggtgaaaggcatctttctgaatttcattctcttgaaggtgctgccaccccttggcactgtggaactgccaccttgggtctgtgtcacttgtaggtttctctgcctccaggttgcctcaacagcaggaggcacagcagtttcaccatctttgaggtgagggtggggtgccccagctaggaagcaagatcgctgtgctaggtctgaccaaaaccagagggcagtctagtcctgggggtaaagccctcagatcccagggtacactcttctccattccctccacccacttgcctgtcaccccagtcacctaagcaatcactgggcccagaggagaggagacagacacacactggctcctggacctaaagggtatgagctggagctaaggccagctagagcttccactgtcagccctcactgtcagtcccactgcacccccctgtgcctgctgggcactgggcactagctagatgctttaggttgcttcagctgatccttcaactctgtgaggtggataccaatattctattttgcagatagaatttggcccagagaggttaactaatatatccatgatcacacagctaataaaagtcagagctcaggtc

SEQ ID NO: 1592 - DNA, 1096 bp, Homo sapiens
  source 1..1096: mol_type = genomic DNA
ccactccgcaccccaccctctgtctggtacagcttaccaaaccaaagtgcccaaagccgtgacatcccggccggcggctcgcaggcccccgccctccgcacgtcacggccgccgggtgcagtgccccctaggggcccctgggacgaggaggaagcgccaggtccttcccgccgccgccgccgccgccgccgcctgctcccctggcacgcgccccgccgccctcggcagccgcagctccgtgtcccctgagaaccagccgtcccgcgccatgggcacgcgtctgccgctcgtcctgcgccagctccgccgcccgccccagcccccgggccctccgcgccgcctccgtgtgccctgtcgcgctagcagcggcggcggcggaggcggcggcggtggccgggagggcctgcttggacagcggcggccgcaggatggccaggcccggagcagctgcagccccggcggccgaacgcccgcggcgcgggactccatcgtcagagaagtcattcagaattcaaaagaagttctaagtttattgcaagaaaaaaaccctgccttcaagccggttcttgcaattatccaggcaggtgacgacaacttgatgcaggaaatcaaccagaatttggctgaggaggctggtctgaacatcactcacatttgcctccctccagatagcagtgaagccgagattatagatgaaatcttaaagatcaatgaagataccagagtacatggccttgcccttcagatctctgagaacttgtttagcaacaaagtcctcaatgccttgaaaccagaaaaagatgtggatggagtaacagacataaacctggggaagctggtgcgaggggatgcccatgaatgttttgtttcacctgttgccaaagctgtaattgaacttcttgaaaaatcaggtgtcaacctagatggaaagaagattttggtagtgggggcccatgggtctttggaagctgctctacaatgcctgttccagagaaaagggtccatgacaatgagcatccagtggaaaacacgccagcttcaaagcaagacggagtctcgttctgtcaccaggctggagtgcaggcgcgtgatctag

SEQ ID NO: 1593 - DNA, 996 bp, Homo sapiens
  source 1..996: mol_type = genomic DNA
gtggccgggagggcctgcttggacagcggcggccgcaggatggccaggcccggagcagctgcagccccggcggccgaacgcccgcggcgcgggactccatcgtcagagaagtcattcagaattcaaaagaagttctaagtttattgcaagaaaaaaaccctgccttcaagccggttcttgcaattatccaggcaggtgacgacaacttgatgcaggaaatcaaccagaatttggctgaggaggctggtctgaacatcactcacatttgcctccctccagatagcagtgaagccgagattatagatgaaatcttaaagatcaatgaagataccagagtacatggccttgcccttcagatctctgagaacttgtttagcaacaaagtcctcaatgccttgaaaccagaaaaagatgtggatggagtaacagacataaacctggggaagctggtgcgaggggatgcccatgaatgttttgtttcacctgttgccaaagctgtaattgaacttcttgaaaaatcagtaggtgtcaacctagatggaaagaagattttggtagtgggggcccatgggtctttggaagctgctctacaatgcctgttccagagaaaagggtccatgacaatgagcatccagtggaaaacacgccagcttcaaagcaagcttcacgaggctgacattgtggtcctaggctcacctaagccagaagagattccccttacttggatacaaccaggaactactgttctcaactgctcccatgacttcctgtcagggaaggttgggtgtggctctccaagaatacattttggtggactcattgaggaagatgatgtgattctccttgctgcagctctgcgaattcagaacatggtcagtagtggaaggagatggcttcgtgaacagcagcacaggcggtggagacttcactgcttgaaacttcagcctctctcccctgtgccaagtgacattgagatttcaagaggacaaactccaa

SEQ ID NO: 1594 - DNA, 3604 bp, Homo sapiens
  source 1..3604: mol_type = genomic DNA
tgagtcccactccgcaccccaccctctgtctggtacagcttaccaaaccaaagtgcccaaagccgtgacatcccggccggcggctcgcaggcccccgccctccgcacgtcacggccgccgggtgcagtgccccctaggggcccctgggacgaggaggaagcgccaggtccttcccgccgccgccgccgccgccgccgcctgctcccctggcacgcgccccgccgccctcggcagccgcagctccgtgtcccctgagaaccagccgtcccgcgccatgggcacgcgtctgccgctcgtcctgcgccagctccgccgcccgccccagcccccgggccctccgcgccgcctccgtgtgccctgtcgcgctagcagcggcggcggcggaggcggcggcggtggccgggagggcctgcttggacagcggcggccgcaggatggccaggcccggagcagctgcagccccggcggccgaacgcccgcggcgcgggactccatcgtcagagaagtcattcagaattcaaaagaagttctaagtttattgcaagaaaaaaaccctgccttcaagccggttcttgcaattatccaggcaggtgacgacaacttgatgcaggaaatcaaccagaatttggctgaggaggctggtctgaacatcactcacatttgcctccctccagatagcagtgaagccgagattatagatgaaatcttaaagatcaatgaagataccagagtacatggccttgcccttcagatctctgagaacttgtttagcaacaaagtcctcaatgccttgaaaccagaaaaagatgtggatggagtaacagacataaacctggggaagctggtgcgaggggatgcccatgaatgttttgtttcacctgttgccaaagctgtaattgaacttcttgaaaaatcaggtgtcaacctagatggaaagaagattttggtagtgggggcccatgggtctttggaagctgctctacaatgcctgttccagagaaaagggtccatgacaatgagcatccagtggaaaacacgccagcttcaaagcaagcttcacgaggctgacattgtggtcctaggctcacctaagccagaagagattccccttacttggatacaaccaggaactactgttctcaactgctcccatgacttcctgtcagggaaggttgggtgtggctctccaagaatacattttggtggactcattgaggaagatgatgtgattctccttgctgcagctctgcgaattcagaacatggtcagtagtggaaggagatggcttcgtgaacagcagcacaggcggtggagacttcactgcttgaaacttcagcctctctcccctgtgccaagtgacattgagatttcaagaggacaaactccaaaagctgtggatgtccttgccaaggagattggattgcttgcagatgaaattgaaatctatggcaaaagcaaagccaaagtacgtttgtccgtgctagaaaggttaaaggatcaagcagatggaaaatacgtcttagttgctgggatcacacccacccctcttggagaagggaagagcacagtcaccatcgggcttgtgcaggctctgaccgcacacctgaatgtcaactcctttgcctgcttgaggcagccttcccaaggaccgacgtttggagtgaaaggaggagccgcgggtggtggatatgcccaggtcatccccatggaggagttcaaccttcacttgactggagacatccacgccatcaccgctgccaataacttgctggctgccgccatcgacacgaggattcttcatgaaaacacgcaaacagataaggctctgtataatcggctggttcctttagtgaatggtgtcagagaattttcagaaattcagcttgctcggctaaaaaaactgggaataaataagactgatccgagcacactgacagaagaggaagtgagtaaatttgcccgtctcgacatcgacccatctaccatcacgtggcagagagtattggatacaaatgaccgatttctacgaaaaataaccatcgggcagggaaacacagagaagggccattaccggcaggcgcagtttgacatcgcagtggccagcgagatcatggcggtgctggccctgacggacagcctcgcagacatgaaggcacggctgggaaggatggtggtggccagtgacaaaagcgggcagcctgtgacagcagatgatttgggggtgacaggtgctttgacagttttgatgaaagatgcaataaaaccaaacctgatgcagaccctggaagggacacctgtgttcgtgcatgcgggcccttttgctaacattgctcacggcaactcttcagtgttggctgataaaattgccctgaaactggttggtgaagaaggatttgtagtgaccgaagctggctttggtgctgacatcggaatggagaaattcttcaacatcaagtgccgagcttccggcttggtgcccaacgtggttgtgttagtggcaacggtgcgagctctgaagatgcatggaggcgggccaagtgtaacggctggtgttcctcttaagaaagaatatacagaggagaacatccagctggtggcagacggctgctgtaacctccagaagcaaattcagatcactcagctctttggggttcccgttgtggtggctctgaatgtcttcaagaccgacacccgcgctgagattgacttggtgtgtgagcttgcaaagcgggctggtgcctttgatgcagtcccctgctatcactggtccgttggtggaaaaggatcggtggacttggctcgggctgtgagagaggctgcgagtaaaagaagccgattccagttcctgtatgatgttcaggttccaattgtggacaagataaggaccattgctcaggctgtctatggagccaaagatattgaactctctcctgaggcacaagccaaaatagatcgttacactcaacagggttttggaaatttgcccatctgcatggcaaagacccacctttctctatctcaccaacctgacaaaaaaggtgtgccaagggacttcatcttacctatcagtgacgtccgggccagcataggcgctgggttcatttaccctttggtcggaacgatgagcaccatgccaggactgcccacccggccctgcttttatgacatagatcttgataccgaaacagaacaagttaaaggcttgttctaagtggacaaggctctcacaggacccgatgcagactcctgaaacagactactctttgcctttttgctgcagttggagaagaaactgaatttgaaaaatgtctgttatgcaatgctggagacatggtgaaataggccaaagatttcttcttcgttcaagatgaattctgttcacagtggagtatggtgttcggcaaaaggacctccaccaagactgaaagaaactaatttatttctgtttctgtggagtttccattatttctactgcttacactttagaatgtttattttatggggactaagggattaggagtgtgaactaaaaggtaacattttccactctcaagttttctactttgtctttgaactgaaaataaacatggatctagaaaaccaa

SEQ ID NO: 1595 - DNA, 746 bp, Homo sapiens
  source 1..746: mol_type = genomic DNA
ttcccagaaatacatttgccaccaacagagtagccaaatttataaggaaaaatgattcccaatggatatttgatgtttgaggatgaaaattttattgagtcttctgttgccaaattaaatgccctgaggaaaagtggccagttctgtgatgttcgacttcaggtctgtggccatgaaatgttagcacacagagcagtgctagcttgctgcagtccctatttatttgaaatctttaatagtgatagtgatcctcatggaatttctcacgttaaatttgatgatctcaatccagaagctgttgaagtcttgttgaattatgcctacactgctcagttgaaagcagataaggaattggtaaaagatgtttattctgcagcaaaaaagctgaagatggatcgagtaaagcagcatcttctctacttctgtctgcattcaacatcaacatcatctctcctgtagagcccagttcagatactgcgtttcatgaagccttaccaaattattctacttgaaaatacttatgtgaacttacatagcatttcaatttgttgtacctctccttaaactaaaacttacatatctgtatggcataattagatgtttatcatttgtatacgtgttattaccactattaacatttgttgtattaagacagtgatttttgattctttgtatcttcacatagtctttaccacactgaacattaaatatttgttgaataaaagatatgtaagtgttggcactca

SEQ ID NO: 1596 - DNA, 4199 bp, Homo sapiens
  source 1..4199: mol_type = genomic DNA
gaagcgggctgggaggcgtcggcggcggcagcgcacgtggtgacgtgcgagggggtgcggcgcgagcggtcggcggcggcggaggcagtgtctcccggtcgcgcgtggaggtcggtcgctcagagctgctgggcgcagtttctccgcctgctgcttcggcgcggctgtatcggcgagcgagcgagttcccgcgagttctcggtggcgctcccccttcctttcagtctccacggactggcccctcgtccttctacttgaccgctcccgtcttccgccgccttctggcgctttccgttgggccgattcccgcccgcttcctcctgcttcccatcgaagctctagaaatgaatgtttccatctcttcagagatgaaccagattatgatgcatcattatcacagaagaaattcgtgtctatagcttttaaggacttgattacatcattttcaagcctgatagttttggaatcaccattagagcttaagacacacctgccttcatttcaaccacctgtcttcataccctgacgaagtgcaccttttaacactcctttgtccttggattacttaagagttcccagaaatacatttgccaccaacagagtagccaaatttataaggaaaaatgattcccaatggatatttgatgtttgaggatgaaaattttattgagtcttctgttgccaaattaaatgccctgaggaaaagtggccagttctgtgatgttcgacttcaggtctgtggccatgaaatgttagcacacagagcagtgctagcttgctgcagtccctatttatttgaaatctttaatagtgatagtgatcctcatggaatttctcacgttaaatttgatgatctcaatccagaagctgttgaagtcttgttgaattatgcctacactgctcagttgaaagcagataaggaattggtaaaagatgtttattctgcagcaaaaaagctgaagatggatcgagtaaagcaggtttgtggtgattatttactgtctagaatggatgttaccagctgcatctcttaccgaaattttgcaagttgtatgggagactcccgtttgttgaataaggttgatgcttatattcaggagcatttgttacaaatttctgaagaggaggagtttcttaagcttccaaggctaaagttggaggtaatgcttgaagataatgtttgcttgcccagcaatggcaaattatatacaaaggtaatcaactgggtgcagcgtagcatctgggagaatggagacagtctggaagagctgatggaagaggttcaaaccttgtactactcagctgatcacaagctgcttgatgggaacctactagatggacaggctgaggtgtttggcagtgatgatgaccacattcagtttgtgcagaaaaagccaccacgtgagaatggccataagcagataagtagcagttcaactggatgtctctcttctccaaatgctacagtacaaagccctaagcatgagtggaaaatcgttgcttcagaaaagacttcaaataacacttacttgtgcctggctgtgctggatggtatattctgtgtcatttttcttcatgggagaaacagcccacagagctcaccaacaagtactccaaaactaagtaagagtttaagctttgagatgcaacaagatgagctaatcgaaaagcccatgtctcctatgcagtacgcacgatctggtctgggaacagcagagatgaatggcaaactcatagctgcaggtggctataacagagaggaatgtcttcgaacagtcgaatgctataatccacatacagatcactggtcctttcttgctcccatgagaacaccaagagcccgatttcaaatggctgtactcatgggccagctctatgtggtaggtggatcaaatggccactcagatgacctgagttgtggagagatgtatgattcaaacatagatgactggattcctgttccagaattgagaactaaccgttgtaatgcaggagtgtgtgctctgaatggaaagttatacatcgttggtggctctgatccatatggtcaaaaaggactgaaaaattgtgatgtatttgatcctgtaacaaagttgtggacaagctgtgcccctcttaacattcggagacaccagtctgcagtctgtgagcttggtggttatttgtacataatcggaggtgcagaatcttggaattgtctgaacacagtagaacgatacaatcctgaaaataatacctggactttaattgcacccatgaatgtggctaggcgaggagctggagtggctgttcttaatggaaaactgtttgtatgtggtggctttgatggttctcatgccatcagttgtgtggaaatgtatgatccaactagaaatgaatggaagatgatgggaaatatgacttcaccaaggagcaatgctgggattgcaactgtagggaacaccatttatgcagtgggaggattcgatggcaatgaatttctgaatacggtggaagtctataaccttgagtcaaatgaatggagcccctatacaaagattttccagttttaacaaatttaagaccctctcaaactaacaggcttagtgatgtaattatggttagtagaggtacacttgtgaataaagagggtgggtgggtatagatgttgctaacagcaacacaaagcttttgcatattgcatactattaaacatgctgtacatactttttgggtttatttggaaaggaatgcaaagatgaaggtctgttttgtgtacttttaagactttggttattttactttttggaaaagaataaaccaagaattgattgggcacatcatttcaagaagtcccctctcctccacatttgttttgccaatttgcacattaaatgactcttccctcaaatgtgtactatggggtaaaaggggtagggtttaaagatgtagacagttgggttttttaagggccctttttcaataactggaacactctataacaaaggatacttatttaaatagatgacattgactatttttgtttttattaaaaggaagcttacatgcctaccaatatttaatcttttatgattgcctttttataactttttatattctcagcagagtgctttaccaattgaagtaaaatgtggcaggctggagttattgaagcagagtggcagtcttcagtttgcagagtaggggtctgtcttttaaactctgagtgcaaacttcagagttcttgccttggctgcagtttttttccttcaagaatgcagtactaacatttatttgagtggagttactgaacagtaacatagctgtgatttttggtatttgaaacactggttttaaatattttgacttgttgagggtatgttttatatagcaagacattatatagcagtaaaaaatggtgttttatcttctatataattcctgtttttattattaacaaaacagtcctaaatagcagccctcaattgtgaaaaaatttactttaaactacattaggttgtgaatgcaggttttatcagaactatgtttttgttcagtttatctgttcatatggataaatattggttgggatgacttggtgtctaatgtgtagtgctacacacctaacttatggggccaaaatagcatgtcctaatgcttgctgctgatttaaacacattaaaggtactttgcaggaaatccttgcaccatgggattaatatccaattgctgcttgtacactcattcattactaaaagttttgagaaatttttttttccagtaatgagcttaagaaatttgtggaaaataactcacctggcatcttacatctgaaataaggaatgatataaggtttttttttctcacagaagatgaagcacacaggaacctaatgggccaactgggatgaggtgactattctgagatgactattcagtggctaacttgggttaggaagaaaataattaggtattttctccaaatgttcactggtactctgccactttatttctctcatctgttacacaaagaaccaccaggaaagcaaatcagtttggttggtaactctgtaattcctaactatcactggtttggttctggactaaaactacattgacagattgaatttgcctaatatgatgactgtttttaatatggatctgtatgtgttctattcagcacaaggaaataaaattttagttgaggattcagcactaaaa

SEQ ID NO: 1597 - DNA, 622 bp, Homo sapiens
  source 1..622: mol_type = genomic DNA
ctttgccgctggtcgggattgggatgtcgaagaacacagtgtcgtcggcccgcttccggaaggtggacgtggatgaatatgacgagaacaagttcgtggacgaagaagatgggggcgacggccaggccgggcccgacgagggcgaggtggactcctgcctgcggcaaggaaacatgacagctgccctacaggcagctctgaagaacccccctatcaacaccaagagtcaggcagtgaaggaccgggcaggcagcattgtcttgaaggtgctcatctcttttaaagctaatgatatagaaaaggcagttcaatctctggacaagaatggtgtggatctcctaatgaagtatatttataaaggatttgagagcccgtctgacaatagcagtgctatgttactgcaatggcatgaaaaggtgcctcttgtatgattccagatatggaggaggcccgggaagcccacagaggtacagcatgtcatctgcctcaaggtggtgctacttcaccacattgatgatccaaccacaagcaacatgggacacagcattcactttaacatttctattttcctttatcatttctgttacttgagtgtgtaagagtaatcaacataaataatcta

SEQ ID NO: 1598 - DNA, 1670 bp, Homo sapiens
  source 1..1670: mol_type = genomic DNA
gggctgtttggaggcgcttggggcgcacaatctggggcaggcggaaccttagtcctcagcctcgcgtttcccgcgactccgctctcaccgctacactaccacacaaacggcctccttcccccacccccgggggcccatcccggtggcgggctccggagctcgggactgctaatttcagcgaaacgattaaaagacgcccctacagctgacggcactttctctcctccggcagggaaggacgtccagcgtagcgtcgcccgcgcttccccgccggcgcagagcaggcctcacagaatcgcacgccgctggcacgcacgccgccccgcccccacggcccagcgccagccgcgccccgcgctcgcacgcatcccggcctcactgcccctcgactcctgttccgttggaggggcctgaggcgagcctgagcgcgctgttggccggagggaagccggaggagaccgggtcgactgggcagagcggcagagggtcgaggagcctgctctgcacgcccagggagtagaagtgggcagggagcagggtcacgtgagggagcgcgccgcgactgagcttgggtccgactggagctcaggctcgcgacccagactggtgggccaggcctccaagccggccttacacccaatccaaggaggacagaccggacacagagggacggagcgagcaaggagacatggcttcatcattcctgcccgcgggggccatcaccggcgacagcggtggagagctgagctcaggggacgactccggggaggtggagttcccccatagccctgagatcgaggagaccagttgcctggccgagctgtttgagaaggctgccgcgcacctgcaaggcctgattcaggtggccagcagggagcagctcttgtacctgtatgccaggtacaaacaggtcaaagttggaaattgtaatactcctaaaccaagcttctttgattttgaaggaaagcaaaaatgggaagcttggaaagcacttggtgattcaagccccagccaagcaatgcaggaatatatcgcagtagttaaaaaactagatccaggttggaatcctcagataccagagaagaaaggaaaagaagcaaatacaggttttggtgggccagttattagttctctatatcatgaagaaaccatcagggaagaagacaaaaatatatttgattactgcagggaaaacaacattgaccatataaccaaagccatcaaatcgaaaaatgtggatgtgaatgtgaaagatgaagagggtagggctctacttcactgggcctgtgatcgaggacataaggaactagtcacagtgttgctgcaacatagagctgacattaactgtcaggacaatgaaggccaaacagctctacattatgcctctgcctgtgagtttctggatattgtagagctgctgctccagtctggtgctgaccccactctccgagaccaggatggctgcctgccagaggaggtgacaggctgcaaaacagtttctttggtgctgcagcggcacacaactggcaaggcttaatcaaaagactggaaaactgcagtctgtaatagcataaggcttccattatgaaagaaaactacaaaaataatacttcttttccacccgtctttggtatgtattggctaataaaatcagttctgtggaactggga

SEQ ID NO: 1599 - DNA, 13491 bp, Homo sapiens
  source 1..13491: mol_type = genomic DNA
gcccgactgctcccgccctgcctcgcgccgccgccacagccgctgccgctggcgccgctcctcctccgtgtcagttgttgggctgtaatggcgactgggccgcccctgacgaagtgactcccgggccggggagcggggccagacctgcgccagagagaactgcagggagccgcagctcggggggtggcttgccctgagggaggggaggcagcctttccgccttgtcttccttcccagcggaccggcggatccccggagccggtgcgaggagggcacccggtgcgtccccggagcggggaggccaggccgggcagccctggggccggtcggggcggcgtcactgcaccctccgccaggctccgcgggatgcaccgtggtagccgagggcggaggcgacactctcaggtaaattggcaggatgaggagcagcaaatcaaaagaggtgcctttaccaaatccaaggaactctcaaagcaaggatactgttcaagcagatataaccacatcgtgggatgcactttctcaaaccaaggctgctctgagacacattgaaaataaattagaagtagcccctacaagtacagctgtgtgtgattctgtcatggataccaagaagtcttctacaagtgctactcgaaaaataagtagaaaagatggtagatacctggatgattcttgggttaatgctccaatctccaaatccactaaatcacgaaaagagaaatctcgtagtcctctcagggccaccaccctggagagtaatgtgaagaaaaataatcgtgtggaatttcgtgaacctttggtttcttatagggaaatccatggtgcaccttccaatttcagttccagccatctggaatcaaagcacgtatactgtgtagatgttaatgaagaaaagactgagagcggtaactggatgataggcagtcgagaagaacggaatatacggagctgtgattttgagagctcccaatcatctgtcatcaatgatacagttgttaggtttttaaatgatcgaccagcaattgatgcattgcaaaattctgaatgtttgattaggatgggagcttctatgagaactgaggaagaaatgcctaacagaacaaaaggaagtgagaataatttgaagctttctgtgaataacatggcccatgatactgatccaaaagcgttacgactaactgactcttctccatcctctactagtacttctaattcccaaagattagatattctaaagcggcgacaacatgatgtcaaactggaaaaacttaaggaacggattagaaaacagtgggaacactcagaagaaacaaatggccggggccagaagctgggtcatattgaccatccagtaatggttgttaatgttgataactcagtaacagcaaaagtcagaaaagtggcaacagcaccacctgctccagcatataaaggtttcaacccttcagagaccaagattcgaacacctgatgggaaagtgtggcaggaggctgagtttcaaaacatgagtagagaactgtatcgagatttagcacttcactttgcagatgatatttctataaaggagaaacctgctgaaaaaagtaaagagaagaaagtagtcaagccagtacgaaaagtccaaaaagtagcacagttatcaagtacagaatgcagaacaggtagtagtcatcttataagtacatcttcttggcgagatggacaaaaattagtaaagaagattctgggacctgctcccagaatggagccaaaagagcaaagaacagcatcaagtgacagaggtggaagagaaagaactgctaaatctgggggtcacattggaagagcagaatctgatcccaggttggacgttttacatagacatcttcaaagaaactcagaacgttcgagaagtaaatctcggtctgaaaataatataaagaaactagcttcatctcttccagataataagcaggaggaaaatactgccttaaataaggactttttacctattgaaattcgtggcattcttgatgacctacagctggattctacagctcacactgcaaagcaagatactgtagagttacagaaccagaagtcatcagcaccagtacatgctcctaggagtcacagcccagtaaaaagaaaacctgacaaaataacagctaatgaagatccccctgttatttccaaaaggcgccactatgacacagatgaggtacgacagtacattgttaggcagcaggaggaaaggaagagaaagcaaaatgaagagaagaaggctcaaaaggaggctacagaacagaaaaacaaacgattacaagagctctaccggaagcagaaggaagcctttactaaagtaaaaaatgtccctccttctgagccatcagcaactaggcgactacaggaaacttactccaaattgctactagaaaagaccttgcttgaagagccatctcatcaacatgttacgcaggaaacacaggccaaaccagggtatcagccatctggagaatctgacaaagaaaacaaagtacaggaacgtcccccaagtgcatcttccagtagtgacatgtctctctcagaacctccacagcctcttgcaagaaaagacttgatggaatctacatggatgcagcctgaaagattgagcccacaagttcaccattctcaaccacagccttttgctggaacagctggaagtttactctcccatctcttgagtttagagcatgtaggaattttgcataaggattttgaatctattttaccaaccaggaagaatcataatatggcttcaaggccattaacttttacacctcaaccatatgtgacctcaccagctgcttatacagatgccttgttaaaacctagtgccagccaatataagagtaaactggatcgtattgaagccttgaaagcaacagctgcttctttgtccagcagaattgaaagtgaagccaagaaattagctggggccagcattaactatgggtcagcatggaacactgagtatgatgtgcagcaggcacctcaagaagatggaccttggaccaaggctgtaactccacctgtgaaagatgataatgaagatgttttctctgccagaattcagaagatgctgggaagctgtgtatctcatgcaacttttgatgatgatcttcctggtgtaggcaatcttagtgaatttaaaaagcttcctgagatgataagaccacagagtgccatatcaagctttagagtgagatcccctggtcccaaaccagaagggctactggcacagttatgtaaaaggcagactgactcttctagctctgatatgcaagcctgttctcaagacaaagccaaaatatctcttggttccagcatagattcagtcagtgaagggcctcttcttagtgaggggagtctctctgaagaagagggagaccaggatggacagccccttttgaaagtagcagaaattttaaaagaaaaggaattttgtcctggagaaagaaatagttatgaacccatcaaagagtttcagaaagaagctgaaaaattcttgccactttttgggcacataggtggtacacaaagcaaaggaccatgggaagaattggcaaagggaagtccacatagcgtcattaatatttttacaaaatcctatcagttatatggaaaagggtttgaagacaagttggacagaggaacatcaacatcacggcctttgaatgccaccgcaactcctctaagtggtgtttcatatgaagatgattttgtctcctctccagggactgggacttcgacagaaaaaaaatcaactcttgaacctcatagcactttaagccctcaggaggaccattctaacagaaagtctgcctatgatccttcctctgtggatgttacctcccagcattcatcaggagcccagtctgctgcatcgtctcgttcatctacttcttctaaaggaaagaaaggaaaaaaggaaaagacagaatggttggattcattcactggaaatgttcagaactcacttcttgatgaggaaaaagcagaacgtggctcccatcaaggaaagaaatctgggaccagcagcaaactttctgttaaagattttgagcagactcttgatacagatagcactttggaggatctttctggacattctgtgagtgtctcatcagataagggaagatctcagaaaactccaacttctcccctgtcaccaagttcccagaaatcattgcagtttgacgttgcaggaacttcttcagaaagatctaagtcgtcagtaatgcctccaactataacaggatttaagcctaatgcacctctcactgatctgaacccggcagccagcagaacaacgacagagaacatggctccaataccaggttctaagcgcttttctcctgctggcctccatcatcgtatggcagcagaactcagttatctgaacgccattgaggagtcggtgcgccaactgtcagatgtagaaagagttagaggcatttcacttgctcagcaggagagtgtgtctctagctcagataataaaggcacaacagcaacgccatgaaagagacttggccctcttgaaactaaaggctgaacaagaggctctggagagtcagagacaattagaagaaacccgaaacaaagcagctcaggtccatgcagaatcattacagcaggtggttcaatcacaacgggaagtaactgaagtcctgcaggaagcaacgtgtaaaatagcagctcagcagtcagaaactgctcgcctcaccacagacgcagcacgtcaaatctgtgagatggcagagttgactagaactcatatctcagatgctgtcgtggcttcaggagctccccttgcaatactgtatgaccaccaacggcagcaccttccagactttgtgaaacagctgaggaccagaactgaaacagataggaaaagtccatctgtttcactctctcagagtaaagaagggacccttgactcaaagcatcagaagtattctgcttcatatgatagttattctgagtcttcaggatacaagaatcatgatagaagaagtagcagtggtagcagccgccaagaaagtccttcagttccatcttgtaaggaaaatgagaagaaacttaatggtgaaaagatagagagttccattgatgaacaggttcagactgctgcagatgattctctacgaagtgatagtgttccatctcttcctgatgaaaaagactcaacgtctattgcaacagaatattctctgaaatttgatgaatccatgacagaagatgaaatagaagaacaatcatttcgatcattactaccttcagagagtcaccgcagatttaacatggaaaagagaagaggtcatcatgatgactctgatgaagaagcttctccagaaaaaactacactgtctactgccaaggaactgaacatgccattctcaggaggacaagatagcttttctaaatttactatggagatggttcgacagtatatgaaagaggaagaaatgagggcagctcaccagtcttcactcctgcgtctccgtgaaaaggccttgaaggagaagactaaggctgaattggcctggttagagcatcaaaaaaaacatctacgagacaaaggagaggatgataaaatgcccccgctccggaagaaacagcgtggtttgcttttaaggttgcagcaagaaaaggcagaaataaaacgtcttcaagaagccaataaggcagctcggaaggaaagacagctgattcttaaacagcaggaggagatagaaaagatccgacagaccaccataaaactacaggagaaattgaagtctgcaggggagagtaaattggactctcatagtgatgatgatacaaaggataataaggcaaccagtcctggtccaactgacttggagacccgcagtccttctcccatttcaatctccagcagtgaaactagcagcattatgcagaaactgaagaaaatgagaagccgcatggatgaaaagtttctgacaaagcgggagcaaaaattaatgcaacggcgacaacatgcagaggagctcctagagtggaagcgacgtttagatgcagaagaagcagaaattcgtcaaatggaaaaacaagctttggctgcctgggacaaagaattaataaaacccaaaactcctaagaaagaactggaggaccagagaacagaacagaaagaaatagcaagtgaagaggaatctccagtacctctgtactctcatctaaacagtgaaagctccattccagaagaattaggcagccctgctgttgaatatgtaccatccgagtctataggacaggagcagccagggagtccagatcacagtatacttactgaagaaatgatttgttcacaggaactagaatcttctacctctcctagtaaacattcacttcccaaaagctgcacatctgtgtcaaagcaggagtctagcaaaggaagtcataggactggaggacaatgtcacctgcctatcaagtcccatcagcactgttatagttggtcagatgagtcattatctatgacacagtcagaaactacatctgaccagagtgatattgaaggtaggatcagagctctgaaggatgagttgcggaaaagaaaatcagttgtgaaccagctgaagaaggaacagaaaaaaaggcaaaaggaaagactgaaagcccaagaagccagtctgatcaagcagttagagtcatatgatgaatttattaagaaaactgaagccgagcttagccaagatttggaaacatcaccaacagccaagcctcagattaaaacgctctcctcagcttctgaaaaacccaagatcaaacccctcacaccactacacagatctgaaacggcaaagaattggaaatcactaacagagtcagaacgttccagaggatccctggagtctattgctgaacatgttgatgcttcactgtctggttctgagagatcagtatcagaaaggtctttatctgcatatgcaaagagagtaaatgaatgggacagtcgaacagaagattttcagaccccatctccagttctcagatcatcaaggaaaatcagagaagaatctggagattctctagaaaatgtacctgcattacatcttctcaaagaattaaatgccactagtagaattcttgatatgtcagatggcaaggttggagaatctagtaaaaaatcagaaataaaagaaatagagtatacaaaattgaagaagagtaagattgaagatgccttttctaaagaaggtaaatctgatgtcttactgaaattagtcctagaacagggagattcatctgaaattctttcaaagaaagatcttcctttagattctgaaaatgttcagaaagacctagttggattagctattgaaaatctccataaaagtgaggaaatgttgaaagagagacagtcagatcaagatatgaatcatagtccaaacatccaatcaggaaaagacattcacgaacaaaagaacacaaaggaaaaagatttgtcttggtcagaacatctttttgctcctaaagagataccatactctgaagattttgaagtgtcttctttcaagaaagaaatttcagctgaattgtacaaagatgattttgaggtgtcatctttgctgtcactcaggaaagactctcagtcttgcagagataagccacagccaatgaggagctctacaagtggagccactagctttggtagtaatgaggaaatcagtgagtgcctaagtgagaaaagcctttctatccatagcaatgttcattctgacaggctgttggaactcaagtcccctactgagctgatgaaaagtaaggagcgcagtgatgtggagcatgaacagcaagttactgaatccccttccttggcttcagttcctactgcagacgagttatttgatttccacattggtgatagggtgttgattggaaatgttcagccaggaattcttcgattcaaaggtgagactagttttgctaaaggattttgggccggagtggagttagataaacctgaaggaaataacaatggaacatatgatggtattgcatattttgagtgcaaagaaaagcatggtatttttgctcctcctcaaaaaatatctcacattccagaaaactttgatgactatgtagacattaatgaagatgaagactgttactcagatgaacgatatcagtgctataatcaagagcaaaatgatacagagggtccaaaagacagagaaaaggatgtcagtgaatatttttatgagaaatccctacctagtgtgaatgatatagaagcctcagttaatagaagtagaagccttaaaatagaaacagacaatgtacaggacatttctggggtacttgaagcccatgttcaccagcagtcttcagtggattcacagatttcttcaaaggaaaacaaagacctcatttctgatgccacagaaaaggtttccatcgctgcagaagatgacactttagacaataccttttccgaagaattggagaagcaacagcagtttacagaagaggaagacaacctatatgctgaagcttcagaaaagctttgtacaccacttctggatcttttaacaagagaaaaaaaccaactggaagcccagctgaagtcatcactaaatgaggaaaaaaagtcaaaacaacaactggaaaaaatcagcttactgacagacagtttactaaaagtctttgtaaaggacacagtcaatcaactacaacaaatcaaaaaaaccagggatgagaaaatccagcttagcaatcaggagcttcttggtgatgaccaaaagaaagtaacaccccaagacctatcccaaaatgttgaggaacagtcgccaagtatttcaggttgcttcttaagttctgaattggaagatgaaaaagaagagatttcctctccagatatgtgtcccagaccggagagcccagtatttggtgccagtgggcaggaagaacttgctaagagacttgctgaacttgaactcagccgggagttcctgagcgcgttaggagatgatcaagactggtttgatgaagactttggtttgagctcttctcacaagatccaaaaaaataaggcagaagaaaccattgtacctctaatggcagaacctaaaagagtaacccaacaaccatgtgaaacattattggcagtcccccatactgcagaagaagtagagattcttgtacataatgcagcagaagaactttggaaatggaaagaattaggccacgatcttcatagcatcagtattcctacaaaactgcttggctgtgccagtaaaggtctagatatagaaagcactagtaaaagggtctacaaacaggcggtttttgatttaacaaaagagatttttgaggaaatatttgctgaggatcccaacttaaatcaacctgtctggatgaagccatgtagaatcaactctagttatttccgacgagtgaaaaatccaaataaccttgatgaaatcaagagcttcatagcaagtgaagtactcaagttgttcagtcttaaaaaggagccaaaccacaaaacagattggcagaaaatgatgaaatttggaagaaagaaaagagaccgagtggatcatatcctggttcaggagctccatgaggaggaggcacagtgggtgaactatgatgaggatgagttgtgtgtgaaaatgcagctagccgacgggatctttgagaccctgatcaaagatactattgatgttctgaatcagatcagtgaaaagcaggggagaatgctacttgtgtgacatcttgcaaataaatcgaacgctgagtgctaatgtgagtcctgggcctttctgcctcctgatgtacacccatcgccatcatagcaagagtgcttctggaccttgtacttattcttaaagactaccagtatggagttcataggacaatgtggtacacctggtattacagcctttgcctttcgagactatccactggattaatgggttattttcagtgggcagggttgcacagtgtaatcctacaccttttgctaacacccctactaggtcccagagggccagaaacacctgacttacctctgagtttagactagggtatcacttctttgagtctgaagtcaagtgagagaggtatagataaatgcatcacatcacttttgaaatgtaattctggtctataccatggaagtcataaatggacattatagtctctaaacagtattaaacccttaaccacttctaaaataggcaagctcaataatgtctgccaacttcacattctggagtttatttcatttctttttgaagaccattttcttccattattgtagttgagcagcaccaagtggactgtcaggctaacaggaataagtggtagccttgctttctgagcaccatctaaagaattttaaacctctgcattatgtttagtgttctctgtgtgggcatgaaaacaaagaaatgcccctactgaagactgggctcaaaggaccaatgcagggctggttcttttaccccttggtttactcctgcacttgtcttactcattctgaatctctaccagctgctcccagaatcacagatactcaggaccatctcaggcatccaggcatggcaaagtggaaataattcattttggcctgcaaaccttcaactcccatctttccccaagaagtcagagatgctgttacttgaatgatttaggaaatgagtgtgtgcaccaaagacaaaaagatattgtctattgtttgtgtgcttgttttgcgctatggaacattttttaatttattttaagataaattattaagttgaaaatgtgtgtccctattcagaagtgaaagattcatcttgtaatagttaaacctccatcttgaagcttctatggttcatagtctttgcacaggaacctgtggttttaacaaaccaatacacatattgaagaagtcattttaattcagtgaaacgaagatgggcttttccagatcacctgcaatagcagcagtgggataaaatgatttaaaaacactgtacaatttaactctgcctctcttgcagcattgcttctcacaactattacctgcatctgaaaaaaaatctatagactccagctgctacattagagcataagagatgctctcctgggacctcagtaccctgccttcttgactggtttccgttcatcagtcctgtccctcttcaagtaatctagaagaatgtggatactcttaggcgtgaatgtaaatgccttaatattgaaggtcctggttagaagcatgatacaagacatctactggattcatatttacaaatatcctggaatgttatagcttcaaagtatattagaaaaaccccaaagatggtataatctttaagtgtgcacgttcgtttatttctgcatcttccctccaaacttgcctttgcatcttaaatatttcactatgcacactcccattcctcttgggtttcatcttgtcgtttaagaaatgtactgaaataatcattggaatatttgcattttgcacaatgactggtatgatagctcttgacaaataaggaaagcactgaaatgttgtgattgggtctcgggaaatgctcagattgatgtcttaccagcatttcttctgggcttgtgatgttgagctgtagtcttgtagccataatgagcaaattgactaagagaagcaaaggtttcttggggttattaaccagtagtgtggaaatactagttttatgtggccaaggaaaagcaaaggcttttcttttcagtttgtgttatttggaagacagaaaaacatcttgtctacatcctttggctgtttgtaggatcacgttgtccttacgatactgaaactttacagctgctgtaaattttttataaatgaatttcaaaatgttataatgggactgtaggttgtttttctacatcttcattatttggacctaaaaccagtttttaataagaaagtttatctttactctttctgaaattatgactccagaaaaagaaaaaaaaaatacaagtcatggaatcagcaatctggtaagaaatgctgccaagaatgtggcagtagctgtcctgacagactccaactgtctttactatctgaagaatcctaggctccacatgagaggcagaaatggatcagtcttattcttttctagaaatggttatctgtagtttggtagcaaaaaaaaagaaaaaagaatccataattagcagatttcttattaactatttggatctaattgaaatggctttattcttaggattaagaaagatagatgtggatacccagccactcgttccatattggtatctttttaaatcagctctgcctcttaatcaagaacctaaatattccctctttctaatctttgttccttctccctacaccctcatcctctttcactcttccttcataattcctctaagaaaaatatctttgcatcagcagtaatatcttttagaatagcactatcagaatttagcagtaaaccaacatacaggcttcagatttacttctgagtccaaaacaatttgtgctatccagggtagttaactctgggttaaacaagtacagggtatagattccctcttcaggtctacacaggaatttttaccatagggaaaagtggggagagctcaaacgtagttaataaggaaggtaatttgtttttcttttacctaaaagaaaagaaaattccttctgtgactacaggtctctgagaaattatctttcaaaagagatttcattgctcataagagtgttgtggcctattgataaaaacaattttgttcagtttcttgtcttgaaaaaaaagtggccttagctttttgcaatacttgaataaagtgtgtactcgcaaaagaatttctgtagcacagcattagagactcataacttttctgcaagaaatacaaacttacatcttccttttactaccttaagaatactagtgaataaaacattaattcaaagagcaaattatagaaactacaatgacatttaatgcaaattgtaggaatttacatgtttacaaatcatcttcaactggttgtgcagcaattcaataaaatatctttgtattataaaaatgtgaagaaaaaatgtaaactgatgtaaaggaggtactgtcattttaattaacctatgtttaatagcttttccttctggactttgcaaagccttcttggcaaacacattgcaaagcattctctgggaggttcagcctccttgtgtgtactgtactgtgcagacatgaaaaaataaacccgtttactgtgtgcgtgtaaatagcctggtcatcaggccattttcagccaatagtcacatccagtgcaattttgcaccgaacacttaagggtgtggtttgtaagtacgatctgtaaaataactgggatgaattcccatgtatacctgtgtaaatagatttgttaactgaaatatactttaagaaagataaaatctgtaaataaactgatttataaattaatttca

SEQ ID NO: 1600 - DNA, 3632 bp, Homo sapiens
  source 1..3632: mol_type = genomic DNA
acctcgcgtcttcccaccgcgtcggaggacgtaggcgcctgggatcctggaaggcttcggatgggaagtttgcgttggagtccaacacccgacaggaaccccagttaacgcctccgcatggccaggggcagagttcttgacacctgtagcttaatcaacgcaggtggagattcagggcttgaatcgcccggccacgcgcaagccgcagggcaccctcatactactacttctgccttattacccttaaaactggagtctcagttatttgtatcccactattggtttttttttaaatcttttttcgtgggtttgcccccttttcctcagctgcgtttctgtcttcagtcctgtagggcacaatgtctgaacaagagcgtatacaggaatgtctgcggaaggaaataaggtcacttctcatttccaccaaagatggtttgagcccacaggagttggagaaggagtaccttttgatggttggcaaccatctaccactccgaatccttgggtatcggtccactatggagctggtattggacatgcctgatgttgttcgtgtctgccccggtgcaggtggtactgtaatactgaaagccattccagatgaatctaccaaaggaatagcaagcttagttgcaaaacagaggagcagccataagcttcgaaactcaatgcataagggaagacctagtatttattctggaccgagatctcatcggcgagtaccttaccgaggaagggttgcccctattcttccagctgttgtgaagagtgagttgaaggacctgttggcgttatctcctgttcttctttctgattttgaaaaggcatttgccaaaagatttggacgatcattccaatacatgcaatatggatttctctctatgtttgaagtgcttaatgcggcttcagatgtcatttctgtagagcagaccagagcaggttctttgttgatgctaaagaagagtgtaacagaggaaaagccgagaggatgtccagcaggtaaaatttttacccagccatttagaatgaaacaagggtcatactccacaggctttccggtagcaaagccatgcttttcacaacccacttcaaacatggaaccaccgaagcaaataatgagcatggaaaagacttccaagttaaatgtagtggagacttcaagactgaatcacactgaaaaattaaaccagctggagaacacattcaaatcagttattgcacagattggacctggaggaactatcagttcagaactaaaacataagataaaatttgttgtatctaagttcccagagggtttgtttatttctaaactgcttggagagtatgaggtaatttttaaagagcaactatcaccaaaaaaattaggcttcttaaatgtgacagaacttgttggagctcttagtgacattctccatgttgagttcaggaaaggacaccaagacttactagtgtttgatgcggataagaagcctctaccacctgttcagtcagataagaaaatagaagccaaagcttgtgtctccagtccacctagaaattcattgtctactgctgctgtcaaagagactgtatggaattgcccttcaaaaaaacaaaaagagccacaacagaagatttgcaagaagcctaatctggtggtaaagcctttacagctgcaagtagaaacaaacaaatcagagctcaacttggcaatggcaaatcatgacatcccgccagacgctgtgccgaacaagaaattatgcagactcccaccattagacaccagttccctcataggggtctttgtggagtatatcatctctcctagtcaattctacatccggatctatagcagggattcgtcagagttactcgaagacatgatgattgaaatgcggcgctgttattctaatcagctggtttctgatcgatatgtcatgccagaatgttttattcagccgggacatctctgttgtgtaaggatttctgaggataagtggtggtatcgggtcattatccatcgagtccttgagaaacaggaagttgaagtgttctacccagactttggaaatattggaattgttcagaagtcctccctgaggttcctcaagtgctgctacacaaagcttccagctcaggctatcccttgttctttggcttgggtgagaccagtagaggaacactggacatcgaaagctattttgcagttccagaagttgtgcggtttgaagccattagtgggggtagtggatgaatatgtagatggaatccttaacatttttttgtgtgacacatcctcaaacgaagatgtctatttccatcatgtcttgagaacagagggccatgctattgtatgccgagaaaatatctcttctaagggtttcagtgagctcaaccctttagctttatacacgacatccagtggagggccagaggacattgtcttgacagaactgggttatccttcccagcagcactattttaatgaagaccgaaagataagtccacagtcaaaagagagtgagttacgtatcttggatgagatccccactggaatgccatgcctggagtcagtgaccataggtgatgatatttgggatgagaactggttacctctacaggctaagatgggaaaaggaggtgatgctgcctcccatctatttactgcaagccttggtggaaagaatcagtattcatcatgtaaagaaatgccacagaaggactggtgtttttctacccctaaagatacatgggatgattcttggcagccttcaggccttgtaaatggaacgaaagtagaagttcataagccagaagtactgggtgctcaggaaaaaaatactggcacaaacaggactcaaaagcaactagacataaatggttcttcagattcttccacactgcccaaattggaagaattctgtacctctcttacccagtcagagcagtcagcagacgggagccagtctgaacccaacaacagtcagactcagccaaagcaaattcagctttccacagcagcaccctgttcaacaactgcagtggatgattccgcagaaaagccctctggttctgtggaaagctcaccagagatcctaaagaatgaagatttttctagcagccgtgctattacattgtacaaagacaagcgtcaagaatctgtagaccagctgtctttgattttgtcttatgagtgccagatttctcagaagctctacattcctcgaagtacagccactgctgccttaggtgctgccgcacggttagctacatccaggagcctcctacactggtaccccagtgtgaaaaggatggaagcatgagggagggagggaggagggagaaaaacagaatccagccgcttaggctttgatgaactcccaggccaaaatgaggagttattgaagcaaaatagtatcttgatcattgatacttttgtctttctgtgactatatgttagctttattatgctaacagtctactttgatgtgtaagtaagtattgatatttactgttaatcttgatttttcttgattttattctgtgtcattttgttcacctttgtttttaatgtagtttaaaggaatttgtttttttgtgtttgtttttcttgtacattatcatgactgataaatgaaaattgaaaaact

SEQ ID NO: 1601 - DNA, 785 bp, Homo sapiens
  source 1..785: mol_type = genomic DNA
aggggctgttgtggggagttgaagaacaccctggcctcctccatcatgtcggccaagagggcagaattgaagaaaacacatctggtaaaagagagacattgctggacaagcaagaactacaaggcagtttgcctggaattgaagccagagccgaccaaaacatttgattacaaagcagttaaacaagaagggcggtttaccaaagcaggagtgacacaggacctaaagaatgaactcagggaagtgagagaagagctcaaggagaaaatggaggagataaaacagataaaggatctaatggacaaggattttgataaacttcacgaatttgtggaaattatgaaggaaatgcagaaagatatggatgagaagatggacattttaataaatacacagaagaactataagcttccccttagaagagcaccaaaggagcagcaggaactcaggctgatgggaaagactcacagagaaccacagctcaggcccaagaaaatggatggagccagtggagtcaatggagcaccctgtgctcttcacaagaagacgatggcaccacaaaaaacaaaacagggctcactggatccccttcatcactgtgggacctgctgcgagaaatgtttgttgtgtgctctaaagaacaactacaatcggggtatatacgctgcagtgggactgctggatctatggtagctcaatttttagttttttgaggaacaacctccaaactgttctccatagtggctgtactaatttacattcccaccaacagtgtacaaagattc

SEQ ID NO: 1602 - DNA, 2377 bp, Homo sapiens
  source 1..2377: mol_type = genomic DNA
agtggcctggtcccaggggctgttgtggggagttgaagaacaccctggcctcctccatcatgtcggccaagagggcagaattgaagaaaacacatctgagcaagaactacaaggcagtttgcctggaattgaagccagagccgaccaaaacatttgattacaaagcagttaaacaagaagggcggtttaccaaagcaggagtgacacaggacctaaagaatgaactcagggaagtgagagaagagctcaaggagaaaatggaggagataaaacagataaaggatctaatggacaaggattttgataaacttcacgaatttgtggaaattatgaaggaaatgcagaaagatatggatgagaagatggacattttaataaatacacagaagaactataagcttccccttagaagagcaccaaaggagcagcaggaactcaggctgatgggaaagactcacagagaaccacagctcaggcccaagaaaatggatggagccagtggagtcaatggagcaccctgtgctcttcacaagaagacgatggcaccacaaaaaacaaaacagggctcactggatccccttcatcactgtgggacctgctgcgtaagtgaaaccctgcccgagcccagcactggtgccagacccctggctccggctccctggtgacttccccgagcttgtgctgtatcatagtgaagggacaggtccgcccgctgctgacttctgggtgccgcccgagcctgcgccctccctgacctgccttgccttctaggcctgtggagcctccttagctgtgaccatgcaggacttgaccctggatgggcctacccgccagctccaccctcttattctgtccttccctttagcaagggcagataaggtgcctagcaggctgcccttcttggaccaggggaaattgatctttcttgtgccgtttctgtcctctgcaggagaaatgtttgttgtgtgctctaaagaacaactacaatcggggtaggtagattcatacaagatgtgccttttctcgatcaggtgccttgttgtccccaaggccatgtgctcccagccgcattcacatcacacccctcctgaggttgtgccaggagtagggactgttagcagatgctgccacccagcatgctcagtcatacaggatgtggcaccaggaaggaggacttgggtcacccagcctagaggctgctgcctggggctcccatggtggggagggtgcaccactagtggcggaactgaccttgcctcaggtcctgccctttctccccatccagtgggaaatattcacaccaggtctgggcacccttttcacccttggcttctggagctgccttctgatttatctgtacctcaaccccggtgacatcgaatatgtgtttccaacctagcgcagctgcagaacctaccagcagttccgattcatcacctccaagctccttaagatgcacagtcagggcttcttgtcctgttaaataccaccccaaccccaggcctccactggagattaaaaaccttcattcaaagccaaaggggatgtcatggttttgagtaccagtccaaaacttgagtgtgtggaggttgattatttttggttctatatcagtgtatttcagactccaacccttccccctgcttcctgatggattggtgggaaattacatcttagtcatcttagggtcctcccaaccaccacctccctccattccacctgggtctgcaaacgtcccaggtcatagcatggggagggcccctgatgatagcggacgccagtctgtgtggtctcaggagagaccctgctgcctggcccatccgctccctccacataatcagcctccacctgtgcatggggccagggtgtcttgggtgatgcagggaacccctcagcctcgagttctgcctgcaccacacccctctgaggtcttgtcaccaagcaggactcaggtccctgctgctcataggaactgggtagctttcttgggttctggggatccacccttctcacccccttgaaggtttcctctccctccctccacccccaaagggaacattccttcagaggcctcaggcctttacaaaggtggagaggagccagtgaccacccaaccttctgtgggccacgctgtgcctgccccaaagtcccagactgagggaaggtgaagcttaactgccagcttgaaatgagagtaaagaagatacagagcaaacagtgtttcagaaactgtcctgccctgggtgtgattctttggcttcaatttgaaggacgaggaatgatgggatttcatattttatttcacaccagttcctccttgtttcatctctttgctaagctggctgcttctaccatctaataaataattggccaagtt

SEQ ID NO: 1603 - DNA, 2452 bp, Homo sapiens
  source 1..2452: mol_type = genomic DNA
gttgcctaggacagtggcctggtcccaggggctgttgtggggagttgaagaacaccctggcctcctccatcatgtcggccaagagggcagaattgaagaaaacacatctgagcaagaactacaaggcagtttgcctggaattgaagccagagccgaccaaagtaagaagcccttttgaggccatgcaggcagccaggcctgagatccatggggaagtgaccaggagtcaggggtcatttgctgatcctagtggccaagatttgtcccagacatttgattacaaagcagttaaacaagaagggcggtttaccaaagcaggaaggacacccagactcttggaggagttgtctttgctcctactgcccctgtgacttggagtcaaggccttccatggccacccgtgtactggttatctccttgtcatgctgcaaaatgtctccccaactctctgcccctccctggccctcctcccccagtccccttagaagagcaccaaaggagcagcaggaactcaggctgatgggaaagactcacagagaaccacagctcaggcccaagaaaatggatggagccagtggagtcaatggagcaccctgtgctcttcacaagaagacgatggcaccacaaaaaacaaaacagggctcactggatccccttcatcactgtgggacctgctgcgtaagtgaaaccctgcccgagcccagcactggtgccagacccctggctccggctccctggtgacttccccgagcttgtgctgtatcatagtgaagggacaggtccgcccgctgctgacttctgggtgccgcccgagcctgcgccctccctgacctgccttgccttctaggcctgtggagcctccttagctgtgaccatgcaggacttgaccctggatgggcctacccgccagctccaccctcttattctgtccttccctttagcaagggcagataaggtgcctagcaggctgcccttcttggaccaggggaaattgatctttcttgtgccgtttctgtcctctgcaggagaaatgtttgttgtgtgctctaaagaacaactacaatcggggtaggtagattcatacaagatgtgccttttctcgatcaggtgccttgttgtccccaaggccatgtgctcccagccgcattcacatcacacccctcctgaggttgtgccaggagtagggactgttagcagatgctgccacccagcatgctcagtcatacaggatgtggcaccaggaaggaggacttgggtcacccagcctagaggctgctgcctggggctcccatggtggggagggtgcaccactagtggcggaactgaccttgcctcaggtcctgccctttctccccatccagtgggaaatattcacaccaggtctgggcacccttttcacccttggcttctggagctgccttctgatttatctgtacctcaaccccggtgacatcgaatatgtgtttccaacctagcgcagctgcagaacctaccagcagttccgattcatcacctccaagctccttaagatgcacagtcagggcttcttgtcctgttaaataccaccccaaccccaggcctccactggagattaaaaaccttcattcaaagccaaaggggatgtcatggttttgagtaccagtccaaaacttgagtgtgtggaggttgattatttttggttctatatcagtgtatttcagactccaacccttccccctgcttcctgatggattggtgggaaattacatcttagtcatcttagggtcctcccaaccaccacctccctccattccacctgggtctgcaaacgtcccaggtcatagcatggggagggcccctgatgatagcggacgccagtctgtgtggtctcaggagagaccctgctgcctggcccatccgctccctccacataatcagcctccacctgtgcatggggccagggtgtcttgggtgatgcagggaacccctcagcctcgagttctgcctgcaccacacccctctgaggtcttgtcaccaagcaggactcaggtccctgctgctcataggaactgggtagctttcttgggttctggggatccacccttctcacccccttgaaggtttcctctccctccctccacccccaaagggaacattccttcagaggcctcaggcctttacaaaggtggagaggagccagtgaccacccaaccttctgtgggccacgctgtgcctgccccaaagtcccagactgagggaaggtgaagcttaactgccagcttgaaatgagagtaaagaagatacagagcaaacagtgtttcagaaactgtcctgccctgggtgtgattctttggcttcaatttgaaggacgaggaatgatgggatttcatattttatttcacaccagttcctccttgtttcatctctttgctaagctggctgcttctaccatctaataaataattggccaagt

SEQ ID NO: 1604 - DNA, 802 bp, Homo sapiens
  source 1..802: mol_type = genomic DNA
ctgtaagttgcctaggacagtggcctggtcccaggggctgttgtggggagttgaagaacaccctggcctcctccatcatgtcggccaagagggcagaattgaagaaaacacatctgagcaagaactacaaggcagtttgcctggaattgaagccagagccgaccaaaacatttgattacaaagcagttaaacaagaagggcggtttaccaaagcaggagtgacacaggacctaaagaatgaactcagggaagtgagagaagagctcaaggagaaaatggaggagataaaacagataaaggatctaatggacaaggattttgataaacttcacgaatttgtggaaattatgaaggaaatgcagaaagatatggatgagaagatggacattttaataaatacacagaagaactataagcttccccttagaagagcaccaaaggagcagcaggaactcaggctgatgggaaagactcacagagaaccacagctcaggcccaagaaaatggatggagccagtggagtcaatggagcaccctgtgctcttcacaagaagacgatggcaccacaaaaaacaaaacagggctcactggatccccttcatcactgtgggacctgctgcgagaaatgtttgttgtgtgctctaaagaacaactacaatcgggcgcagctgcagaacctaccagcagttccgattcatcacctccaagctccttaagatgcacagtcagggcttcttgtcctgttaaataccaccccaaccccaggcctccactggagattaaaaaccttcattcaaagcca

SEQ ID NO: 1605 - DNA, 398 bp, Homo sapiens
  source 1..398: mol_type = genomic DNA
gtatgagctcagagaggagcatctggacaaaatatttaaacacagagaactgcagcagaagctggtggatgcaaagcttgagcaggcccaagaaatgatgaaggaagcggaggagcgacacaaacgagaaaaggaatatttgctgaaccaggcagcagagtggaaacttcaggcgaaagtgctgaaggagcaagagacagtcctgcaggctcaggtgaggccaggtggacgaggcatgggggtgctgtcctcactgtccccagataaaaaggctggggccaaaggtgggcagcagaagtcctcctatgtggcaggggatggggggatgggaattggaaatgaagaacaacttcacatttattcatattttcaagtaaaaataaaagcacaatattata

SEQ ID NO: 1606 - DNA, 2766 bp, Homo sapiens
  source 1..2766: mol_type = genomic DNA
gcgactgcgcagcgtggcccagcgcggtcaaattataatacataaaagttgtcagggcggagagcaagacattactcttctcggattgccggttcgctcgcgagacttgagcgttgctaggagattcggcaggcgggcggagccagactcggcggggcggggaggggtggggctaggctcggcgaggcgaggaagggtgggtggagccaggcttggcgggctgtgcgtgctcgcggtgggcggtggcggcggctgcctcgcgaaggttcgagatccgtcgcgtgcgggaggcgggccgcgatcttgcgcagggtcggtgtgggcgcaggctgcagcgccgcgactcgtgcgggtaggcgtctgcgctcggtttgagggctcggcgcggggtttcctgttcctccttctgcgcggctgcagctcgggacttcggcctgacccagcccccatggcttcagaagagctacagaaagatctagaagaggtaaaggtgttgctggaaaaggctactaggaaaagagtacgtgatgcccttacagctgaaaaatccaagattgagacagaaatcaagaacaagatgcaacagaaatcacagaagaaagcagaacttcttgataatgaaaaaccagctgctgtggttgctcccattacaacgggctatacggtgaaaatcagtaattatggatgggatcagtcagataagtttgtgaaaatctacattaccttaactggagttcatcaagttcccactgagaatgtgcaggtgcatttcacagagaggtcatttgatcttttggtaaagaatctaaatgggaagagttactccatgattgtgaacaatctcttgaaacccatctctgtggaaggcagttcaaaaaaagtcaagactgatacagttcttatattgtgtagaaagaaagtggaaaacacaaggtgggattacctgacccaggttgaaaaggagtgcaaagaaaaagagaagccctcctatgacactgaaacagatcctagtgagggattgatgaatgttctaaagaaaatttatgaagatggagacgatgatatgaagcgaaccattaataaagcctgggtggaatcaagagagaagcaagccaaaggagacacggaattttgagactttaaagtcgttttgggaactgtgatgtgatgtggaaatactgatgtttccagtaagggaatattggtgagctgcatatataaatttgacagatagctatttacatagccttctaagtaaaggcaatgaattctccatttcctactggaggatttatttaaataaaatatgcttattaaacactcctgcaaagatggttttattagtaccctggtcattttgttcaaggaagggttatattgcattctcacgtgaaatataaaaagcaagtcttgcccaataaaaacgctacattgtgtgtattttttgttcagctaagaattggaaaagtatttgcttgccttttaagttactgacatcagcttccaccagtgtaaaaattgagtaaaacctgaagttttgcataaaatgcaaatcggtgcctgtgcttgaaggttgctgtagagcatctgaccccttattaccaccttaagcaatgtatatgccatgcattaccatgcactaattcaatcacaggtgtttctatctagatttaaatatatttgtcaatgaatgtggaatagaaaatctaaacatgacaataatagacatatctttgtatggtaccagttagttttgccgtggatcagatggtttataaaagtaataaccataaagcaaaaaataatttgaaagcccgtctattcctatgctcaataaagttaagtttttcttcattagaacagttttatgatttatttgtctaggagtatgtcagaaaaatcaggcttttagtaggaattactcctattccccctgaagtcaggaccagtgcctgtgatctccattactttattttcctggaggtattagccaacacagttagatcagagaaagcaattgaagccaggcatgaaggctggcgcccgtaatcccagctactaaggctggaggatcacttcagcccaggagtttaaggctgcagtgagctatgatgatgccactgtactgcagcttgggtaacagattgagaacctgtctcattaaaaaaaaaaaaaaaaaaaaagccgttagacacacaggaaaaatccagaagggtaaactaaactaaagctacaattaatatgggaatttggaagaagtggtaggatttaaaatacagaaacagtttatgtataggatagctataagtaaatactgaaacacattatgcctctgtaattggggttgacacatgaacagaatagcagacacaatgcatatgaaagttacagaatatggtaaaagtggggtaaagatgggtttttaatgatactaagataactgaaaataggcatatagatatattccaagccgcctgacgatctaattgtaaaaagtaaagcatacaaatactagaagaaaatggaggaaaacgacattatatgtgacttaaaacctagaagaaataaataaaactattgatcaattttaactacataaaaatgtttataggacaagaaaaaccccaccataacccaaggcaaacaatgtattgacaggattccaataattaagaatacttcatacaaaaagaaatgtaaatgacctttaacatgtaaagatgctcaccttgttcagaagagaataaaccagtgtttttacctttc

SEQ ID NO: 1607 - DNA, 2834 bp, Homo sapiens
  source 1..2834: mol_type = genomic DNA
cattttctttgatggtaaacaggctcacttataccgaatccaaacccaggcgagaactacggactcttgaaatggtcggtgaaaggggcgaaagcaccaggaaatcgtgcttcaacagtccatgactgaaaggagggcctgaaactgtggccataggcgggcccttttgttagggccttgacctgggcttccgctacagggcccggtcacgaggccaacgtagctccacctctacggcggccagtgatgacgccaccacgtcggaactgttagaccgcggtgacgtctccaccgcgccaaactcactgaaaatcaaaccgctaccattaggagccctccacgcttaacatatccgttctttctcgtttgaaagtaaccaggctgctcctccccatttttcgccttcttctcgcggaggctgagagactaaccttacacaacatggcggcctggtgtgtctggtgtcctagagcggacgaaagcaggtgactctctagtcaacttccgacttggactccgaagatcgctacagaaagatctagaagaggtaaaggtgttgctggaaaaggctactaggaaaagagtacgtgatgcccttacagctgaaaaatccaagattgagacagaaatcaagaacaagatgcaacagaaatcacagaagaaagcagaacttcttgataatgaaaaaccagctgctgtggttgctcccattacaacgggctatacggtgaaaatcagtaattatggatgggatcagtcagataagtttgtgaaaatctacattaccttaactggagttcatcaagttcccactgagaatgtgcaggtgcatttcacagagaggtcatttgatcttttggtaaagaatctaaatgggaagagttactccatgattgtgaacaatctcttgaaacccatctctgtggaaggcagttcaaaaaaagtcaagactgatacagttcttatattgtgtagaaagaaagtggaaaacacaaggtgggattacctgacccaggttgaaaaggagtgcaaagaaaaagagaagccctcctatgacactgaaacagatcctagtgagggattgatgaatgttctaaagaaaatttatgaagatggagacgatgatatgaagcgaaccattaataaagcctgggtggaatcaagagagaagcaagccaaaggagacacggaattttgagactttaaagtcgttttgggaactgtgatgtgatgtggaaatactgatgtttccagtaagggaatattggtgagctgcatatataaatttgacagatagctatttacatagccttctaagtaaaggcaatgaattctccatttcctactggaggatttatttaaataaaatatgcttattaaacactcctgcaaagatggttttattagtaccctggtcattttgttcaaggaagggttatattgcattctcacgtgaaatataaaaagcaagtcttgcccaataaaaacgctacattgtgtgtattttttgttcagctaagaattggaaaagtatttgcttgccttttaagttactgacatcagcttccaccagtgtaaaaattgagtaaaacctgaagttttgcataaaatgcaaatcggtgcctgtgcttgaaggttgctgtagagcatctgaccccttattaccaccttaagcaatgtatatgccatgcattaccatgcactaattcaatcacaggtgtttctatctagatttaaatatatttgtcaatgaatgtggaatagaaaatctaaacatgacaataatagacatatctttgtatggtaccagttagttttgccgtggatcagatggtttataaaagtaataaccataaagcaaaaaataatttgaaagcccgtctattcctatgctcaataaagttaagtttttcttcattagaacagttttatgatttatttgtctaggagtatgtcagaaaaatcaggcttttagtaggaattactcctattccccctgaagtcaggaccagtgcctgtgatctccattactttattttcctggaggtattagccaacacagttagatcagagaaagcaattgaagccaggcatgaaggctggcgcccgtaatcccagctactaaggctggaggatcacttcagcccaggagtttaaggctgcagtgagctatgatgatgccactgtactgcagcttgggtaacagattgagaacctgtctcattaaaaaaaaaaaaaaaaaaaaagccgttagacacacaggaaaaatccagaagggtaaactaaactaaagctacaattaatatgggaatttggaagaagtggtaggatttaaaatacagaaacagtttatgtataggatagctataagtaaatactgaaacacattatgcctctgtaattggggttgacacatgaacagaatagcagacacaatgcatatgaaagttacagaatatggtaaaagtggggtaaagatgggtttttaatgatactaagataactgaaaataggcatatagatatattccaagccgcctgacgatctaattgtaaaaagtaaagcatacaaatactagaagaaaatggaggaaaacgacattatatgtgacttaaaacctagaagaaataaataaaactattgatcaattttaactacataaaaatgtttataggacaagaaaaaccccaccataacccaaggcaaacaatgtattgacaggattccaataattaagaatacttcatacaaaaagaaatgtaaatgacctttaacatgtaaagatgctcaccttgttcagaagagaataaaccagtgtttttacctttcacttg

SEQ ID NO: 1608 - DNA, 1849 bp, Homo sapiens
  source 1..1849: mol_type = genomic DNA
gggcacatttggctatttttcaaagagagcatgtagttcaagaaatggcttattttgttttttattcttctttttgtggtctatttaggaaaacaaaatgaaggtggcctttgtctttcagttatggaacagctaccggacctgcatagccatttttctgatctgaacctggaagctcatatgtatgcatcccagtggtttctcactctttttactgccaagttcccactctgcatggtgttccacatcattgacttactgctttgtgagggtttgaacataatctttcatgtagctttggctctcctaaagacctcaaaggaagaccttctgcaggctgattttgaaggtgctttaaagttctttagagttcagcttccaaagagatacagggcagaggaaaatgcaagaagactgatggagcaggcttgcaatattaaagtaccaaccaagaagctgaagaaatatgagaaagaatatcagacaatgcgagagagtcagctgcaacaggaagacccaatggatagatacaagagggagaaccgaagattacaggaggccagcatgaggttggaacaagagaatgatgaccttgcccatgaactagtaacaagcaaaattgctctacggaatgacttggatcaggcagaagacaaggcagatgtgttgaataaagagctccttttgaccaaacagaggctggtggagactgaagaggagaagaggaagcaagaggaagagactgcccagctaaaagaagtcttcaggaaacagctagagaaggcagaatatgaaataaagaagactacagctatcattgctgagtataaacagatctgttcgcagttgagtaccaggctggagaaacagcaagcagccagcaaggaggagctggaagtggtaaagggtaagatgatggcatgcaaacactgcagtgacattttcagcaaggagggtgctttgaaactagcagccacaggcagagaggaccagggaattgaaacagatgatgagaaggactcacttaagaagcagctgagagagatggaactggaactggcacaaaccaaactgcagttggtggaggccaagtgtaaaattcaggaacttgaacatcagagaggagcccttatgaatgaaatccaagctgcgaaaaactcttggtttagcaaaaccctgaactctatcaaaacggccacgggcacccagccattgcagccagcaccggtcacccagccacccaaggagagcacatagttccagccttacccaagcacaagagcacaatgttcaaaccaatggaaatctgggaggattcttcctggtgtccctttgaaggaaagtcaaggaggccagaaaacaagccagaatttttcagtagctctcactctttcttgtatgacacttttcaaagggatgctatttaaactgacctgttctatgttgaatacctattttccagcttctggaaggccatgttcagatccatcatagtattacacattattttgtttgcctgatgtttagttggaaataagtaattcagaactaaatgcttttttatttagaattattcataattatttttatcttacataaaaatggagacatctgttattccaaggttgaagtgataagaagatctttgtcacaggaaaaaaaaaattgaaacctaaacatcttaagttttcaggatttattcagataaagcacactgtggggccaggcatgaccactctcaggtttcctcctgagcctgattcccagggaagtgttaatcctgtccaaaggaaagaaccaatcagcgatcattggtttactttcattttctgttcggtacatctggaaa

SEQ ID NO: 1609 - DNA, 1425 bp, Homo sapiens
  source 1..1425: mol_type = genomic DNA
aagtatctttgttccattgaatgtttgcggtcacagagagaacttagagttatatgacactcaaaggaaaagcaaaagagcattaagaagtgtctgtttttgttattgccatttcataaatattttagtaggtgttcaatttcattggatattctttttttttaattgtctttgtacctatgattgaaaacagtagttggtctatgacttttgaggagagggagaaccgaagattacaggaggccagcatgaggttggaacaagagaatgatgaccttgcccatgaactagtaacaagcaaaattgctctacggaatgacttggatcaggcagaagacaaggcagatgtgttgaataaagagctccttttgaccaaacagaggctggtggagactgaagaggagaagaggaagcaagaggaagagactgcccagctaaaagaagtcttcaggaaacagctagagaaggcagaatatgaaataaagaagactacagctatcattgctgagtataaacagatctgttcgcagttgagtaccaggctggagaaacagcaagcagccagcaaggaggagctggaagtggtaaagggtaagatgatggcatgcaaacactgcagtgacattttcagcaaggagggtgctttgaaactagcagccacaggcagagaggaccagggaattgaaacagatgatgagaaggactcacttaagaagcagctgagagagatggaactggaactggcacaaaccaaactgcagttggtggaggccaagtgtaaaattcaggaacttgaacatcagagaggagcccttatgaatgaaatccaagctgcgaaaaactcttggtttagcaaaaccctgaactctatcaaaacggccacgggcacccagccattgcagccagcaccggtcacccagccacccaaggagagcacatagttccagccttacccaagcacaagagcacaatgttcaaaccaatggaaatctgggaggattcttcctggtgtccctttgaaggaaagtcaaggaggccagaaaacaagccagaatttttcagtagctctcactctttcttgtatgacacttttcaaagggatgctatttaaactgacctgttctatgttgaatacctattttccagcttctggaaggccatgttcagatccatcatagtattacacattattttgtttgcctgatgtttagttggaaataagtaattcagaactaaatgcttttttatttagaattattcataattatttttatcttacataaaaatggagacatctgttattccaaggttgaagtgataagaagatctttgtcacaggaaaaaaaaaattgaaacctaaacatcttaagttttcaggatttattcagataaagcacactgtggggccaggcatgaccactctca

SEQ ID NO: 1610 - DNA, 1988 bp, Homo sapiens
  source 1..1988: mol_type = genomic DNA
ggcctggacgagcgcgcttccgacccgccgccaccgcctcctcccctccttctcggcccgccccctccctcgcctcttcctgccaggcggcccttctcccctcccctctcagttccctccgccctcctcgggctccagcggtggcggagcgaacgggaccggcccggcttcagagcgcgaggtggagggtggaacgcgggcgcctgaaggagttgttgtctcggcagcgcccgcggagacgtgaagaggtggttgtgggaagagaagtttgcagaactgaaatggaggtcagagcttcattacagaagatagtttctaatggtgatgaacaattggaaaaagccatggaagagattttgagagattccgagaaaaggccaagcagtcttcttgttgattgtcaaagttccagtgagatttcagaccattcgtttggagatattccagccagccaaacaaataagccatctcttcagttaattttggatccgtctaacacagaaatttctacacccagaccatcttctccaggtggactacctgaagaagatagtgttttatttaataaactgacctacttaggatgtatgaaggtttcttccccacgtaatgaagtagaggctttacgggcaatggcaaccatgaaatcttccagtcaatacccctttcctgttaccctgtatgtaccaaatgttccagaaggttctgtgagaattatagaccaatccagcaatgtggagatagcatcttttccaatctataaggtgttattctgtgcacgtggacatgacggaacaacagagagcaattgctttgcatttacagagagttcccatggttcggaagaatttcagatacatgttttctcctgtgaaattaaagaggcagtaagcagaattttgtacagtttctgtacagcattcaaacgttcttccagacaagtgtctgatgttaaagactcagttattcctacccccgacagtgatgtgtttaccttcagtgtctccttggaggtaaaagaagacgatggaaaaggaaactttagccctgtgcctaaggatagagataaattttatttcaaattaaagcaaggaatagagaagaaggttgtgattacagtgcagcaactttctaacaaagaattagctattgaaagatgttttggaatgttattaagcccaggtcgaaacgtgaagaacagtgacatgcatttactggatatggaatccatgggaaagagctatgatgggagagcttatgtcatcactggcatgtggaaccccaatgcaccagtatttctggcacttaacgaggaaaccccaaaagataagcaagtatacatgactgtggcagtggatatggtagtcacagaggtggtggagcctgttcgctttctcctggagacagtagtccgtgtgtaccctgcaaatgagcgattttggtatttcagcagaaagactttcacagagactttcttcatgagattgaaacagtctgagggaaaaggccataccaatgctggagatgcaatatatgaggtggtgagtctacagcgagagtctgacaaggaggaaccagtcactcctactagtggagggggtccaatgtcaccccaggatgatgaagcagaagaggagagtgataatgaactctcaagtggaacaggtgatgtgtctaaggattgtcctgagaagatcctgtattcttggggagagttgctaggaaaatggcacagtaaccttggtgcacgaccgaaagggctgtctactctggtgaagagtggtgtccctgaagcattgagggcagaggtatggcagttattggcaggctgccatgacaaccaggcaatgctggatagataccgaattcttatcacaaaggtctgttggagtttgctggaggtccactccagaccctgtttgcctgggtatcaccagtggaagctgcagaacagcaaatattgcagaatggcaaatgttgctgcctga

SEQ ID NO: 1611 - DNA, 2481 bp, Homo sapiens
  source 1..2481: mol_type = genomic DNA
atggaggtcagagcttcattacagaaggttagtggatcatctgattctgtggctacaatgaacagtgaagaatttgttttggttcctcagtatgcagatgataattctacaaaacatgaagaaaaacctcaactgaagatagtttctaatggtgatgaacaattggaaaaagccatggaagagattttgagagattccgagaaaaggccaagcagtcttcttgttgattgtcaaagttccagtgagatttcagaccattcgtttggagatattccagccagccaaacaaataagccatctcttcagttaattttggatccgtctaacacagaaatttctacacccagaccatcttctccaggtggactacctgaagaagatagtgttttatttaataaactgacctacttaggatgtatgaaggtttcttccccacgtaatgaagtagaggctttacgggcaatggcaaccatgaaatcttccagtcaatacccctttcctgttaccctgtatgtaccaaatgttccagaaggttctgtgagaattatagaccaatccagcaatgtggagatagcatcttttccaatctataaggtgttattctgtgcacgtggacatgacggaacaacagagagcaattgctttgcatttacagagagttcccatggttcggaagaatttcagatacatgttttctcctgtgaaattaaagaggcagtaagcagaattttgtacagtttctgtacagcattcaaacgttcttccagacaagtgtctgatgttaaagactcagttattcctacccccgacagtgatgtgtttaccttcagtgtctccttggaggtaaaagaagacgatggaaaaggaaactttagattattggtaattcctattccttttgaatatttcagccctgtgcctaaggatagagataaattttatttcaaattaaagcaaggaatagagaagaaggttgtgattacagtgcagcaactttctaacaaagaattagctattgaaagatgttttggaatgttattaagcccaggtcgaaacgtgaagaacagtgacatgcatttactggatatggaatccatgggaaagagctatgatgggagagcttatgtcatcactggcatgtggaaccccaatgcaccagtatttctggcacttaacgaggaaaccccaaaagataagcaagtatacatgactgtggcagtggatatggtagtcacagaggtggtggagcctgttcgctttctcctggagacagtagtccgtgtgtaccctgcaaatgagcgattttggtatttcagcagaaagactttcacagagactttcttcatgagattgaaacagtctgagggaaaaggccataccaatgctggagatgcaatatatgaggtggtgagtctacagcgagagtctgacaaggaggaaccagtcactcctactagtggagggggtccaatgtcaccccaggatgatgaagcagaagaggagagtgataatgaactctcaagtggaacaggtgatgtgtctaaggattgtcctgagaagatcctgtattcttggggagagttgctaggaaaatggcacagtaaccttggtgcacgaccgaaagggctgtctactctggtgaagagtggtgtccctgaagcattgagggcagaggtatggcagttattggcaggctgccatgacaaccaggcaatgctggatagataccgaattcttatcacaaaggactcagcccaggagagtgttattactcgagatattcatcgtacatttcccgcacatgattactttaaagatactggaggagatggtcaagaatcgctctataagatctgcaaggcctactctgtgtatgatgaagacattgggtactgtcaagggcagtcttttcttgctgctgtattactgctgcatatgccagaggaacaagcattctgtgttttggtgaaaatcatgtacgactatggtttgagagacctctacagaaacaacttcgaagatcttcattgcaaattctaccagttggagagactaatgcaggaacagctaccggacctgcatagccatttttctgatctgaacctggaagctcatatgtatgcatcccagtggtttctcactctttttactgccaagttcccactctgcatggtgttccacatcattgacttactgctttgtgagggtttgaacataatctttcatgtagctttggctctcctaaagacctcaaaggaagaccttctgcaggctgattttgaaggtgctttaaagttctttagagttcagcttccaaagagatacagggcagaggaaaatgcaagaagactgatggagcaggcttgcaatattaaagtaccaaccaagaagctgaagaaatatgagaaagaatatcagacaatgcgagagagtcagctgcaacaggaagacccaatggatagatacaagtttttttttctt

SEQ ID NO: 1612 - DNA, 7613 bp, Homo sapiens
  source 1..7613: mol_type = genomic DNA
agccaagcggcgggctggcggcgggctccgacgtctgcgccaggacctggctggctgagcccggcgcagcagcagcagccagggcagcgcggcccctactccctgtcaggtcgtagaggcgagcagggaccagctggtcgccggcccctcgggcaagatggggaaccgggagatggaggagctgatcccgctggtgaaccgtctgcaggacgcgttttcggcgctgggacagagctgcctgctggagctgccgcagatcgccgtggtgggcggccagagcgccggcaagagctcggtgctcgagaacttcgtgggcagggactttctccctcgagggtcgggcattgtaacaagacgacctcttgtgctgcagcttgttacttctaaagcagaatatgccgagtttctacattgcaaaggaaagaaatttacagattttgatgaagttcgccttgagattgaagcagaaacagatcgcgtgactggaatgaataaaggcatttcctccatacccattaatttacgagtctattccccacacgtgttaaatctaacccttattgatctacctggaataactaaagtgcctgtgggagatcagccaccagatatcgagtatcagatcagagaaatgattatgcagttcatcacgagggagaactgtctgattttagctgttactccagccaacactgatcttgcaaactcagatgcgctgaagctagctaaagaagttgatcctcaaggtctgagaaccattggagttatcaccaaactggaccttatggatgaaggaacggatgccagggatgttctagagaacaaactgttgcctcttcgcaggggttacgtgggggtggtaaacagaagccagaaggacatagatgggaagaaggacataaaggcagccatgctggcagagaggaagtttttcctttcccacccggcttacagacatatcgctgaccgaatgggaaccccacacctgcagaaggtccttaatcagcaacttaccaaccacattcgggataccctaccaaacttcaggaacaaactacagggacagttgctctccatagaacatgaagtagaagcctacaaaaatttcaaaccagaagacccaacaaggaagaccaaagcattgctgcagatggttcagcaatttgctgtggactttgagaagagaattgaagggtcaggggatcaagtagataccctggaactctcaggtggtgctaaaatcaatcgtatttttcatgaacgctttccttttgagatagtaaagatggagttcaatgagaaagaattgcgaagagaaataagctatgcaatcaaaaacatacatggtatcaggacagggttgtttactccagacatggcatttgaagcgatagtcaagaaacagattgtaaagttgaaagggccttccttgaagagtgtggatctggtaatacaagaattaatcaacactgtgaagaagtgtaccaaaaaactggcaaacttccccagactctgcgaggaaacggaaaggattgttgctaaccacattcgtgagcgagaagggaagacaaaggaccaggtattgctattgattgacattcaagtctcttacatcaacaccaaccatgaagacttcattggcttcgcaaatgctcagcagaggagcagtcaggttcacaagaaaaccacagttggaaatcaggtgattcgcaaggggtggctcaccatcagcaacattggcatcatgaaaggcggctcgaagggatactggttcgtccttactgcggaaagcttgtcctggtataaagatgatgaggaaaaagaaaagaagtacatgcttcccttggacaacctgaaagttcgggatgtggaaaagagctttatgtctagcaagcacatctttgcactctttaatacagagcaaaggaatgtatacaaagactatcgcttccttgagctggcatgtgattcccaggaggatgtcgacagctggaaggcatctctactaagagctggggtctatcctgacaaatctgtagctgaaaatgatgagaatggacaagcagaaaacttttccatggacccacaattggagaggcaagtggagaccattcgcaacctcgtagactcctacatgtccattatcaacaaatgtatccgagatctaattccaaaaacaataatgcaccttatgatcaataacgttaaagatttcataaattccgagctcctagcacagttgtattcttcagaggaccaaaataccctgatggaggaatctgctgagcaggctcagcgccgggatgagatgcttcgaatgtatcaagcactgaaagaagcccttgggataattggggacatcagcacagccaccgtgtccactccggcaccccctccagtggatgactcctggatacagcactctcgcaggtcacctcctccaagccccacaacccaaaggaggccaacactaagtgctcccctcgcaaggcccacatccggccgaggaccagctcctgccattccctctcctggcccccactctggggctcctccagtcccattccgtccaggcccattacctcctttccccagcagcagtgactccttcggagcccctccacaagttccatctaggcctacgagggccccgcccagtgtcccaagccggagaccacccccatcaccaactcgtcccactataatccgcccactagaatcctccctgttagactaaacgaagtgtctggcatggcaattaatcactaatgaattatgcgaaagcaacatatttgataaccgttgcagtaaatcatgagtagtcgcatgtgtggacatcagtaggcaagtaaccagttttactaatgcattcatcgctcatcttcattgctcatggtatgtcaaacctttggggtttgactcagaaactgctaaccttttagaggctttatatgttgtactgaccaaggtaggtttgtatagcagccctatactttggggatcatttgcctaccatggcatatatttgaaattgctttggacaagttttctaggctatctaccaggtagctcattaaacgtaattcttcagatatgagatagtgggcttagacctaagccatacatatttcttttcccacattctgtttaggatgacagtaattctgttgtctaccattaatgctactacctactccataattgcctatttagctcctcttttcttcctttttatttcataagactgctaggaagtgattttttaaaattaggactccttaagaataaacttttccagaagcacgaggtagtttgcaaaggaaaagtctgcactgtttgctctaaagagcttctcctcattccaatgtgttttgcttcatgctagaagcatatgcaacagtgaataaaagcttctttttttgttaatcagtcaataaatttggctaattagtttcagagttcaaggaagaagcaaaatatcacatctctagaagtgttgggaaaaatataatttctttctttacttatattcacctcatggtaggttatattgaaggctgacatggagaatgtttacttttctatttggcatagctaactacactttgatactaactccagttttactattattattttggttggaaaaaaaattcactctttacgtgctaatttgtaatcttgttttgtaagaatttatcctacccttgaaacaggctcagtgtaactgtatatccattctaggctttcttaataaatcttgaggctatgggataatcacatttaaagaatggttcctgaaatgaagtcagtagaaatggcatgggataagagcagagctcacacttttacagttgcagtatttcaaagtccctatccaggtcactccagaaaagggtattgaaacgttgaaatctaaagcaaatttgcaatttcttaagatttctaaaatttaccagaacagtttagcctgggggttaatagttaagtcttgaggctaagttttggactaccaaggaccagatgattcacatgtaggaaacagccagaagccaactggaattttgtgtgctaactgttcccagacagcagagcaagtattcactgagtaggggtgtcccatgacactatttcatattctacagaagtaaatcaggtttcaccaactgaaatgtctccctttgaaagtagcaaacatgatttgtatgttaacttaactttaatttcctgtgtagtttacacccagagcagatactcataaagtataaagtaaaaacttttaaccattattaaacagagaacttgccatgttgagtgccattgtattgaacttattctaaaggcttatgctaacccatttataattggtaaaaatcagaaaatacaagatttacataaaggtcatttcaacttttaaggttaccagtgattgtataaaaacatcacaatcctaaatcctctcgtatctcaccccaaaccccaaactgggggaaaaaaagttaactctttgtgaatggaaccaatgtgcaagatacatactgcatttttaaaatagtgtctcagctaaatggaaaactgttaagcaaacatccatagtaaaacaaataatcttcagtgagatctttttataaaacttcttgtttttaggattccctttgcttcttcctttgaattctctaaaataggcagctaacggattatatacttcagggtttggctttgtgctaaatgtggttttgtgttttgctgtatttcaaaattttccttctgttaaaggaaaatattgtgaataaccactggtgtgttcttagatcagcacaaaccatgtcaaaaaaaattggagatttttttccaattttccttccactgatcttaggcagtaataaacaatggcatttgtcatctttggcacttgcttttagattatagtcccacagttgcactgccccaattgtctacctttgtgggtacatttttgttctttactcctaagttatttctcatagaacccagcctactctagaatttcagcagtgacattggagaatatttttaatttgctgcagtactatgtcatattattagtatgaatctcatttcccaaagggtttgtattctgctaaaaggagatgccaatgttgaatgaagtctgaaactctagtatgtgcatagtttgacgtgcagcatgcacaccaggccttaagatgggaatgtagcttaatgattttctgtttcccataccatttctaatcttttgtgtaattttctcttaactgattgctctgatattgtaaacacaatagatgtagctctatcatgtctagcataatttaaaaaatcagtgtttttaggatttgggaaaataaactgtaaatgtttatttgataggtaaatatagttttattgtcacatgctaaatattgcatgcatattgactaattggaataaccatttactcaattatggacagcttattgaaatagtattgatttagaaaaagtatattgcatttctaaaaaacatctaccaaggttactcgtctgaatattgcttttagccgtgttttataacatagacgagcagtagggtctgtttattagcaaatttcctatttgttccaatacaaactcactttattctaaagtatattaatgaaaccagttcctgtgatgtaactgtaagccttctcgacttagacttaaaaagtggtcacatagattaattttgtgactttttagtatagactgtagccataattctcaaatatgaaatgggacctaataccagtatgtgataaatgttgatgttttctgtgtacaaacacattttctatgcatgtgtctctgtgtatatggcatatacctagtaagtatgtttctgtaagtatgtgtattttatgtccatttgagtaggtaggtaggttttaaaaatactagttaaaatgccacaagcatgagtgtgattgtatgtgcactgtgtgtatatatataaatatatgtatatgtatggttgtaaatatctatgtatacatgtacttagtatgtgtggtatcaggatattttttaaactgtgataatacaacagatagctttgaatgatctgccataacatgtggtaacaatagttcatttctcataacatatatgaggtatacaaaattttctaactccagattgtagtcattttgagaggtacaaagctcataattaccatgacaacatggtaatgtccatagacatttgtatctgaatccacaagaagatctgaatctaagaaggaattacctttgacaatatttttcggtaagaagtaaaacctctggagacctatctttaagatctctaattggaattataaattatttttggattgctgagctgaatcttaaaaagccaagttgatatacatagtcatttttcctctatggtagaagtaaaaaaaaaaaaaaaggacatagcaacattaaagtagtggatttttctgagtaaatttgctgaaaatataagagagaagctatctaataccttggaggtaggtcatccactttttcaggtaaacatttttcatttggcaaatggcataattatttgaaagtgacaggaatctcctcagaatgaagaataaagcctactaggtctctaactgttgaactcatgaaagaagatagtgtatgagacttaagccatgagttttgtatcatttcaattagaagactactagctgtgagctcagagtttaatgtaaatgaatctagatgattttgaagaaatgattattcgttcaccagatcactcattgtacattctaaaaagctcaaatgagtcttctagatactcttactcatcctgtctggttgctatgtttaaaattatgtggtgctgtgtaggtgaaactttaagaatatttttgaagcatatgtaatatatgcactgctatttgtgtgtgtgtgtgtgtctttgtatatatgtaagaatgtgtgtatgtgtgagagcaagagagaggaaactcaaagaggagtgtttgtcttaagacctgttcatactggtatattggtgagacttctcacttctggttggaggtttcacatatggctcaactcaagtcattaatctctttttaatttttactcttgaattccttaaacttcgctcattatgaaatgttttaaaattatgacaaaaattactctgtctaaccacttgccttgtctgctaccagtttgttaaaaattattccccccaaccagtaattccaccagtactacttgatttgtgttatatttcctatgtacatgtacagcctttgttttgcttgcttgtctatttttactttcccttttttgggtcaaatttttcttttgctttgtttgaagaaggaatatacagaagtaaaatcttgtcttctctgctgattctttaattaatatgagccggatactttccactgtcttcttggcactttcaggatttcttaatgctgatatatggactcttagaatggaatttttgaagaaaaatctcaaagcctgtatcgttcttgaaggtcacatgtacctattgtgaaaatgtgaagctgtatttctgaagctgaaataaattataacatttgaagga

SEQ ID NO: 1613 - DNA, 5492 bp, Homo sapiens
  source 1..5492: mol_type = genomic DNA
agtgaatcgctctcgtcggcagtgtttgtggagggcctgaagagacagggaggttgtgccaggctggaggaggcttgtctttccgaagctggagaggatcttacgggggttcgcttttccctgcctgggaagaatttcccctgtggtagcagcagcagcagcagcagaagcagaaacagcagcagcagcaacagcagcagcagcagcagcaccaccaccaccactacctcctcttctggggcacaagacagaatgcctgtgctagagcgatatttccacccagcagagctaggcaggaggtggacaggcccagaaggtgtgctgccctcctccccgggaagccggccggggtgccagcaggggccgctgccctgggacttgccagagatgatcaggatggtaaagctggtttggaaatccaaaagtgagctgcaggcgaccaaacagagaggcattctggacaatgaagatgctctccgcagctttccaggagatatacgactaaggggtcagacgggggttcgtgctgaacgccgtggctcctacccattcattgacttccgcctacttaacagtacaacatactcaggggagattggcaccaagaaaaaggtgaaaagactattaagctttcaaagatacttccatgcatcaaggctgcttcgtggaattataccacaagcccctctgcacctgctggatgaagactaccttggacaagcaaggcatatgctctccaaagtgggaatgtgggattttgacattttcttgtttgatcgcttgacaaatggaaacagcctggtaacactgttgtgccacctcttcaatacccatggactcattcaccatttcaagttagatatggtgaccttacaccgatttttagtcatggttcaagaagattaccacagccaaaacccgtatcacaatgctgttcacgcagccgacgtcacccaggccatgcactgctacctgaaagagccaaagcttgccagcttcctcacgcctctggacatcatgcttggactgctggctgcagcagcacacgatgtggaccacccaggggtgaaccagccatttttgataaaaactaaccaccatcttgcaaacctatatcagaatatgtctgtgctggagaatcatcactggcgatctacaattggcatgcttcgagaatcaaggcttcttgctcatttgccaaaggaaatgacacaggatattgaacagcagctgggctccttgatcttggcaacagacatcaacaggcagaatgaatttttgaccagattgaaagctcacctccacaataaagacttaagactggaggatgcacaggacaggcactttatgcttcagatcgccttgaagtgtgctgacatttgcaatccttgtagaatctgggagatgagcaagcagtggagtgaaagggtctgtgaagaattctacaggcaaggtgaacttgaacagaaatttgaactggaaatcagtcctctttgtaatcaacagaaagattccatccctagtatacaaattggtttcatgagctacatcgtggagccgctcttccgggaatgggcccatttcacgggtaacagcaccctgtcggagaacatgctgggccacctcgcacacaacaaggcccagtggaagagcctgttgcccaggcagcacagaagcaggggcagcagtggcagcgggcctgaccacgaccacgcaggccaagggactgagagcgaggagcaggaaggcgacagcccctaggggccggcccaacttagacgcggctctcctccggcagggcccccagagggcagaagcagcgtggaggggccctcacgcagcagcccagccactttctgagtgttgtcctggggctctttggaacgccatcttcctcccacttacctgcctcccctccttttcgcaaatgtacagaagccatttgtcacctcagcattcgctgccgaaatgagcaactccattcagtaacgtgggagctgatcccacgggcaggctctccctgctccaggagaagactaggaggaagaatgaggtgctcctgccgtgtccgccttgttccgggtcgcactggaacaggcagcaattcctaagtccggagcgtttgagcgtttgctatctgactgctgatctgcgtgacagaaacaccagcatatttgcaacgccaaggatattggtcttaagtgcaagagcacaaatgagagtgtgagagaaagtaccttctattttaataataatattattataaaaataataaatctttttaacttttatattttatgcactagacaatggatctgcaactttggactaaggtcattcaatgtacccaaacttgaacagggggttcattgttttgctattgactttattatgccactttggggcagagacttggcatcttcgcagtttaagaaaccacgtttcctatccaatccgaagggaaggtgctgtacagttcattcctttgcaccattagccaatctgtcttttatggattctgtgacatgtttatattcacccatgtacattttctgtaaataccaaacgctactgattcccatgccaaaatacatgagtattatgggattgctacctgtataaacaatggcactgtgaaaatactgttagttttaatacaagagaatgcatttgtaaatatggtatagagtttattaatatactattgtttgcagataaaggccttaactttaaacatctttcatcttctgaaagctgcccaacttaaatcctcatagatgtctttctcaactgccttcccatgttcatctgtatgttttccagctaaggtcacaaaccaaaactgaataaagtctttgaggaaacattttggaaacttcacatgcattccgcttgagaccatagtgtttaatctatggcaccaagcatcgtttcctcagattaatgagacccttcaacaagcctgaatcagtcacttttcaacacagcgatgttttaacaagccagctgctaagcttgtgtttatgtgactcttgttacagatcatggcggtgcgtcagcctcacaggagacatagcaggtctcagaaaccttctatgaccctgtcatctaaccatcagggaattccctgctcccatgccacacatttgtctattatggctatagtaccaaagtacttttggtgtttggttggtgtgcatttctttagtgtcgatagtaactggatttttctttttccttaatctcatgtgaacaactacccaactgtttagctgaagttcatattatttaagtaaagaaaatatttcagttttataacagactttaccttcctggcaggtcattgtagttaattatgtctctagcttggagtgtcaccttggaatttcgttgccattttttctcagacacctggccgtaaaatcagtttgttacagcattcttctctaggctgctaaacgctgtgcattgaaccttttctttagaagtttcagcgtaactaatgttagatgaaaattgttgatgcccctttctttttactttaaacaatgtggtagtgggagaatgactgtttctgccactatcaacctgatcctcatgctgatagaatgacagctagcacttatttcctaagtgcaactgttttagagatttttctcctaacatgcaaaggaaatactgattggcctataataagttcctatagggagactgaggcttgcagaattaaggttcaggggaaattttggaaagttggttgtattttcattgaagtaggagagattatcagatggtgctaaagaaagtgtgaagatcttatgaaataggtggatggtaagttgaaattattgatgtgggtaagaagggaggttgtggaaagttaacactagctttgtatttttttttctgtaaaactgtgaactgatatattttcctttatcactttagtattctgcagttctcagcttggtgaggctccaaaagagaatatgtcagatgtattcctacttccaaacctgtcttactttggtttgatggtacacatagggcttttgaacagtctatttttaatgtatatgaggtcaaatcaaggaaggcaattgctggggacaagaaaagtagaggtaggaaagaagacactattttagctaatggggtttcttgggactaaaaaatggctttgtttaaattataattatataataatttaaataaatgagattggaggtattcttagtagttctgagttgatagtttacattacaattaggtcttgaagaagagctcacagagaaaaaactaccaaatatccaatgggtaagcccatgatgtagccactagtacaataaaaatctgaagtaaaatgaggcataaacttgatgcagctgcctccctcattcaactggggagttcttgagttcctcatttgttggtaaaaagaaaaagaatgtgaaaatgtctctttttttcttggctattagtggctgtcttgcaatatttcaataggagtccaattactagttaaaacactggcggggtgcggtggctcacgcctgtaatcctagcactttgggaggccaagttgggcagatcacaagttcaagagatcgagaccattctggccaacatggtgaaaccccgtctctactaaaaatacaaaaattagctgggcatggcagtgcgtgcctgcaatcccagctactcaggaagctgaggcaggagaatcgcttgaacctgggaggtggaagttgtagtgaactgagatcgcaccactgcactccagcctggcaacagagctagaatccgtctcaaacaaacaaacaaaaaatcccacagctattggatcatccacagattttttctttacaatcttgttctccttgtccatggaccatcaatagttgacttgccaggtttaattctttcattgcttgagaagaaaggaatcaaaggactgtgtgtagtaagctgacggtaaagttaagattaaattaagacagagagagaatacatatcactgccaggcctgataggaaaaatctgctcttccttttaataacagtgatgaattgtcaggaccttatttaggaaaccctgacctacccataactccctgctaggctaagtagaaaccaggttatttctccctgcttatggctccccgcaaagggacttgcagcgtgtcctgcaactttgtcttcagatagtgcttcctacaaaactaggtcttgttttgtaatcttttctcgtgttgaatcagatctgcttacttatttaggtttggttatgagcttgtatctcactgtatttctcatgctttgttcttttaaacaaatcctttaaactgtgtcattttgtatacacatgtgaggtttgaaaaaaaaaaaaaaaaaaaaaagaactaccttgtgagttttgctcaaaatgtggcctaagtagccattggcatgtctagatgaacaaataaaaataaagataatttctttaaaata

SEQ ID NO: 1614 - DNA, 1295 bp, Homo sapiens
  source 1..1295: mol_type = genomic DNA
ttgtttaacagctggcccggaagtttaagtgaatatgcggcttgggctccaaaagttgctgtacggtattttattttaaagtagaaatctgtccgcttttcacttacggaggccttacagtgtgtgttctgtgttacttgagtttatacgcactgcagaatttgtttaccctgctcttttggaaacgtattccggaagcgaaaccctgagtaatcggaagtggttaggagtgagagagctgctggatatgcggagggactgggcgggtcggcttccgaatggaagaggtctgtgagaagttaacctggtgataccgatccgaagagcctatcaagtgaagccccctgaaatacggagaataagaatcttagaggttgttcagcagaagtcttggagtgcattttcagtggttaaggtgaaaaaatgactactaaaaatttagaaaccaaagtcaccgttacttcatccccaatccgaggagcaggagatggaatggaaactgaggaaccacctaaatctgttgaagttacctccggagtccaatctagaaagcatcatagtcttcagagtccatggaagaaagcagttccatcagagagcccaggagttcttcagctagggaaaatgctcactgaaaaagcaatggaagttaaagctgtaagaatattagttcccaaagctgctataactcatgatatccccaacaaaaatacaaaggttaagtctctgggacatcataaaggagaattccttggtcagtcagagggagttatagaacctaataaggaactctcagaggtaaagaatgtattggaaaagctcaagaattctgaaagaaggttactacaggacaaagaaggtctttcaaaccagctccgtgtacagacagaggtaagaagagccttaatcgataaaatgagtactactctttacgtctggaccttttaaacgtgcatgttagaaaactacatttctttatgggaatgtcattcatcctagcttgtcagttctctaaaatgcttcctcttaaatttctcattctttctcagttctctagggatactttatattgggaacttatactctaaacctcattgaagatggaggtgtgaggtgctttggacaagaccaccaataagttgtaaaagtaggttacaattataaactgccagaccaaagattgaccaagtcaggcatagtaattgaccagcagtccttgttttaaggatccgtaaattccaagtagttttgcttgtgtatacgggatacttggaataaagagaatggcgatataa

SEQ ID NO: 1615 - DNA, 2749 bp, Homo sapiens
  source 1..2749: mol_type = genomic DNA
ttgtttaacagctggcccggaagtttaagtgaatatgcggcttgggctccaaaagttgctgtacggtattttattttaaagtagaaatctgtccgcttttcacttacggaggccttacagtgtgtgttctgtgttacttgagtttatacgcactgcagaatttgtttaccctgctcttttggaaacgtattccggaagcgaaaccctgagtaatcggaagtggttaggagtgagagagctgctggatatgcggagggactgggcgggtcggcttccgaatggaagaggtctgtgagaagttaacctggtgataccgatccgaagagcctatcaagtgaagccccctgaaatacggagaataagaatcttagaggttgttcagcagaagtcttggagtgcattttcagtggttaaggtgaaaaaatgactactaaaaatttagaaaccaaagtcaccgttacttcatccccaatccgaggagcaggagatggaatggaaactgaggaaccacctaaatctgttgaagttacctccggagtccaatctagaaagcatcatagtcttcagagtccatggaagaaagcagttccatcagagagcccaggagttcttcagctagggaaaatgctcactgaaaaagcaatggaagttaaagctgtaagaatattagttcccaaagctgctataactcatgatatccccaacaaaaatacaaaggttaagtctctgggacatcataaaggagaattccttggtcagtcagagggagttatagaacctaataaggaactctcagaggtaaagaatgtattggaaaagctcaagaattctgaaagaaggttactacaggacaaagaaggtctttcaaaccagctccgtgtacagacagaggtaaatcgtgagttaaaaaagttactggtggcttctgttggggatgatcttcagtatcactttgaacgtctagcccgtgagaaaaatcagcttattttagaaaatgaagccctaggtcgaaacacagctcagctttctgaacagttagaacgtatgtcaatacagtgtgatgtatggcgaagtaaattccttgcaagcagggtaatggcagatgagttaaccaactcaagagcagctttacagcgtcaaaaccgtgatgcacacggggctatacaagatctcctaagtgaacgggaacagtttcgtcaagaaatgatagctacccagaaattattggaggagctcttagtttccttgcaatggggaagagagcaaacttactcccctagtgtacaaccccacagcacagcagagctagcattaacaaatcacaagttggcaaaagcagtaaattctcatcttctgggaaatgttggcattaacaatcaaaaaaagattccatcaacagttgaattctgcagcaccccagctgagaaaatggctgaaacggttctaagaattttagatccagttacctgcaaagagagttcacctgataatccattttttgagtcttcaccaaccaccttacttgctacaaagaaaaatattggacgatttcatccctatactagatatgaaaatataactttcaattgctgcaatcactgccggggagaactgattgccctttaacagtcaatatgttggaggcatgctaaggtacttccttattacccaagagtcattattatttgggagctggggttcttacaatgctagaaataatatcacttcctatttacataatgtatacacccaaagatattttatgtactagactccagattaccctttcttaataaatatctcagggtaaggaaagaaagaaactgtatagatatatttaaaatagagaatactttccaagcaatacatgatacttttcctaaaagactctaaaagaaaaagattctgtaactctcttttagcaccaaattattgtttatcttgctggatattttatatgaacagtgttaatttagatgcactaaagcaaaggtaggcaaactacaaccatgagtcaaacatggccacacccattcatgtgctattgtctaagctggttttgcactacaactgcagagttgaatagatgcagcagatcctttacagaaaaagttttctgacctcaattctaaagtaattgtagtagggagctggaggactttctttccctttatggtaattttttgagctacaaaagagccttgcagaaatgggtgaagggattaatcttttaaaaataaatgctatatattaggaaaataaaaaatattttagagccaagttaacaagtacttcagcaaaacatgctagttttatgcaggggattctgtattccaaatggatacaatccgacatatataaaagaaacagattcttaactattgactcttatttagcaaatgcaacagacaagaatatccaacttgatatttataaaaggtagactttttccaaaagtgtataagctcaaagaaaaaatgcaacctgtcaattaatatatactatgtaatatatattattgtgtatttatgattagccatcataaatgcccattgcttggcctttaagaataatcacaaaatatttatattaaattatacaaatttgttgcagaagtgcctgtgagagaaatcttcaaaagacaaacctggtcaaataataataattttaatgtcaatgattttttttgtctgactcatctgagttatatttagttttcaagtggcaataaatttatctaccttcttta

SEQ ID NO: 1616 - DNA, 623 bp, Homo sapiens
  source 1..623: mol_type = genomic DNA
ctcgcacccggaacaacaaagcaaggaagacggagtccgagcctcgggggctcctagcaacgggccggggcgggagttccatggagactggggagcgcgcccgtctcatcctcatccttgtcctccagcttctccttcgcatccgacgcaaccggcagcagcgctgccgccgcgtcctcagccaccgctccctcttcccacggagcgaggtttcaccaggctggtctccaactcctgacctcaaatgatccacccatcttggcctcccagagtgctgagattacaggcgtgaggcaccactcctggatgtgatcttcgtggtggaaagctaaattttaaaaccaccccaatggatgcagacagtgatgttgcattggacattctaattacaaatgtagtctgtgtttttagaacaagatgtcatttaaacttaaggaagattgctttggaaggagcaaatgtaatttataaacgtgatgttggaaaagtattaatgaagcttagaaaacctagaattacagctacaatttggtcctcaggaaaaattatttgcactggagcaacaagtgaagaagaagctaaatttggtgccagacgcttagcccgtagtctgcagaaactag

SEQ ID NO: 1617 - DNA, 808 bp, Homo sapiens
  source 1..808: mol_type = genomic DNA
atttattgtcgcggggaagctgcggccgcctcgcacccggaacaacaaagcaaggaagacggagtccgagcctcgggggctcctagcaacgggccggggcgggagttccatggagactggggagcgcgcccgtctcatcctcatccttgtcctccagcttctccttcgcatccgacgcaaccggcagcagcgctgccgccgcgtcctcagccaccgctccctcttcccacggatgtgatcttcgtggtggaaagctaaattttaaaaccaccccaatggatgcagacagtgatgttgcattggacattctaattacaaatgtagtctgtgtttttagaacaagatgtcatttaaacttaaggaagattgctttggaaggagcaaatgtaatttataaacgtgatgttggaaaagtattaatgaagcttagaaaacctagaattacagctacaatttggtcctcaggaaaaattatttgcactggagcaacaagtgaagaagaagctaaatttggtgccagacgcttagcccgtagtctgcagaaactaggttttcaggtaatatttacagattttaaggttgttaacgttctggcagtgtgtaacatgccatttgaaatccgtttgccagaattcacaaagaacaatagacctcatgccagttacgaacctgaacttcatcctgctgtgtgctatcggataaaatctctaagagctacattacagattttttcaacaggaagtatcacagtaacaggtattctatgatattgaaaccacacttatcaattatggattgaatgatacaa

SEQ ID NO: 1618 - DNA, 1270 bp, Homo sapiens
  source 1..1270: mol_type = genomic DNA
ggcaggaagccgccttgtctctgggcgcggccatgttggaggctccgggcccgagtgatggctgcgagctcagcaaccccagcgccagcagagtcagctgtgccgggcagatgctggaagtgcagccaggattgtatttcggtggggccgcggccgtcgcggagccagatcacctgagggaagcgggcatcacggccgtgctaacagtggactcggaggagcccagcttcaaggcggggcctggggtcgaggatctatggcgcctcttcgtgccagcgctggacaaacccgagacggacctactcagccatctggaccggtgcgtggccttcatcggtcaggcccgcgctgagggccgtgcggtgttggtgcactgtcatgcaggagtcagtcgaagtgtggccataataactgcttttctcatgaagactgaccaacttccctttgaaaaagcctatgaaaagctccagattctcaaaccagaggctaagatgaatgaggggtttgagtggcaactgaaattataccaggcaatgggatacgaagtggatacctctagtgcaatttataagcaatatcgtttacaaaaggttacagagaagtatccagaattgcagaatttacctcaagaactctttgctgttgacccaactaccgtttcacaaggattgaaagatgaggttctctacaagtgtagaaagtgcaggcgatcattatttcgaagttctagtattctggatcaccgtgaaggaagtggacctatagcctttgcccacaagagaatgacaccatcttccatgcttaccacagggaggcaagctcaatgtacatcttatttcattgaacctgtacagtggatggaatctgctttgttgggagtgatggatggacagcttctttgcccaaaatgcagtgccaagttgggttccttcaactggtatggtgaacagtgctcttgtggtaggtggataacacctgcttttcaaatacataagaatagagtggatgaaatgaaaatattgcctgttttgggatcacaaacaggaaaaatatgaacatgatattttatagcttgggaagaaacttgcagatgatatgtgctgcctttgcttcttatcattcatggcagattgtttgtgctttcaacatttcatttgaaatgggagaagataaaatcacttgatgtaacctggaaactatgctttacatggcaatcaaagccttttgatcatgtacattttatttgatattaaaatcttttataaccaga

SEQ ID NO: 1619 - DNA, 1172 bp, Homo sapiens
  source 1..1172: mol_type = genomic DNA
cagtcagatccatcatgtggccactgacagcccttctgctcctggctactctggagaagcccatattgtctctacatccaccttggaccaccatcttcaaaggggagcgggtaactttgaagtgtgatggataccacccactgctcctggagctccagcccatcagcactctctggtatttgggccacctacttctgccctctcacaagaagagcattgaggtgcagacaccaggggtgtatcgatgccagacacggggagcacccgtcagtgaccccatccacctctctgtatccaatgattggctgattctgcaagtgccctatgcgccagtgttcgagggtgagccgctagtcctgcgctgccgcggctggtacgacaaggtggtctacaagcttcactactaccacgacggccaggccgtgcgctacttccactccagcgccaactacactgtgttacaggcgcgtgccagcgacagcgggcgctaccagtgctcgggcaccatgcgcatcccggtggagagcgcgcccatgttctccgctaaggtggctgtgacagtgcaagaagcgcgacacgccgctgcagttcgcgttttacaagtacagccgcgcggtgcgccgcttcgactggggcgccgagtacacagtcccggagcccgaggtcgaggagctcgaatcgtactggtgcgaggcggctaccgccacccgcagtgtccggaaacgcagtccgtggctgcagctcccggggccgggttctcccctggacccggcctccaccaccgccccagctccatgggccgcagccttggctcctggtaataggccgctttccttcagaaagcccccggtgtccagatcggtcccgttggtcacctccgtccggaacaccacctccaccgggctgcagttcccggcgagcggcgccccgactgcggggccacccgcctgcgctccgccgacgcccttggaacaatcggctggagccctgaaacccgacgtggaccttctgctccgagaaatgcagctgctcaaaggccttctgagccgggtggtcctggaattaaaggagccacaggccctccgggagctcaggggaacgcccgagacccccacctctcactttgctgtgagcccgggaaccccagagaccactcctgtggagagctgagg

SEQ ID NO: 1620 - DNA, 1131 bp, Homo sapiens
  source 1..1131: mol_type = genomic DNA
cagtcagatccatcatgtggccactgacagcccttctgctcctggctactctggagaagcccatattgtctctacatccaccttggaccaccatcttcaaaggggagcgggtaactttgaagtgtgatggataccacccactgctcctggagctccagcccatcagcactctctggtatttgggccacctacttctgccctctcacaagaagagcattgaggtgcagacaccaggggtgtatcgatgccagacacggggagcacccgtcagtgaccccatccacctctctgtatccaatgattggctgattctgcaagtgccctatgcgccagtgttcgagggtgagccgctagtcctgcgctgccgcggctggtacgacaaggtggtctacaagcttcactactaccacgacggccaggccgtgcgctacttccactccagcgccaactacactgtgttacaggcgcgtgccagcgacagcgggcgctaccagtgctcgggcaccatgcgcatcccggtggagagcgcgcccatgttctccgctaaggtggctgtgacagtgcaagccgcgcggtgcgccgcttcgactggggcgccgagtacacagtcccggagcccgaggtcgaggagctcgaatcgtactggtgcgaggcggctaccgccacccgcagtgtccggaaacgcagtccgtggctgcagctcccggggccgggttctcccctggacccggcctccaccaccgccccagctccatgggccgcagccttggctcctggtaataggccgctttccttcagaaagcccccggtgtccagatcggtcccgttggtcacctccgtccggaacaccacctccaccgggctgcagttcccggcgagcggcgccccgactgcggggccacccgcctgcgctccgccgacgcccttggaacaatcggctggagccctgaaacccgacgtggaccttctgctccgagaaatgcagctgctcaaaggccttctgagccgggtggtcctggaattaaaggagccacaggccctccgggagctcaggggaacgcccgagacccccacctctcactttgctgtgagcccgggaaccccagagaccactcctgtggagagctgagg

SEQ ID NO: 1621 - DNA, 1152 bp, Homo sapiens
  source 1..1152: mol_type = genomic DNA
cagtcagatccatcatgtggccactgacagcccttctgctcctggttccaagcagtgggcaagctgctactctggagaagcccatattgtctctacatccaccttggaccaccatcttcaaaggggagcgggtaactttgaagtgtgatggataccacccactgctcctggagctccagcccatcagcactctctggtatttgggccacctacttctgccctctcacaagaagagcattgaggtgcagacaccaggggtgtatcgatgccagacacggggagcacccgtcagtgaccccatccacctctctgtatccaatgattggctgattctgcaagtgccctatgcgccagtgttcgagggtgagccgctagtcctgcgctgccgcggctggtacgacaaggtggtctacaagcttcactactaccacgacggccaggccgtgcgctacttccactccagcgccaactacactgtgttacaggcgcgtgccagcgacagcgggcgctaccagtgctcgggcaccatgcgcatcccggtggagagcgcgcccatgttctccgctaaggtggctgtgacagtgcaagccgcgcggtgcgccgcttcgactggggcgccgagtacacagtcccggagcccgaggtcgaggagctcgaatcgtactggtgcgaggcggctaccgccacccgcagtgtccggaaacgcagtccgtggctgcagctcccggggccgggttctcccctggacccggcctccaccaccgccccagctccatgggccgcagccttggctcctggtaataggccgctttccttcagaaagcccccggtgtccagatcggtcccgttggtcacctccgtccggaacaccacctccaccgggctgcagttcccggcgagcggcgccccgactgcggggccacccgcctgcgctccgccgacgcccttggaacaatcggctggagccctgaaacccgacgtggaccttctgctccgagaaatgcagctgctcaaaggccttctgagccgggtggtcctggaattaaaggagccacaggccctccgggagctcaggggaacgcccgagacccccacctctcactttgctgtgagcccgggaaccccagagaccactcctgtggagagctgagg

SEQ ID NO: 1622 - DNA, 1977 bp, Homo sapiens
  source 1..1977: mol_type = genomic DNA
aagatactatcttcctgggagttgacagtacctgataattgatctccttcccatcagatttccaagggatcaaggtgccccggttctaaacaaccacaggtacggtcacatggctcagaaagcacaagaagtagagccccgaggtcagatctgagaggcttctgaggggccgatgcagtgacttctctgctgcagctgctgcagtcagatccatcatgtggccactgacagcccttctgctcctggttccaagcagtgggcaagctgctactctggagaagcccatattgtctctacatccaccttggaccaccatcttcaaaggggagcgggtaactttgaagtgtgatggataccacccactgctcctggagctccagcccatcagcactctctggtatttgggccacctacttctgccctctcacaagaagagcattgaggtgcagacaccaggggtgtatcgatgccagacacggggagcacccgtcagtgaccccatccacctctctgtatccaatgattggctgattctgcaagtgccctatgcgccagtgttcgagggtgagccgctagtcctgcgctgccgcggctggtacgacaaggtggtctacaagcttcactactaccacgacggccaggccgtgcgctacttccactccagcgccaactacactgtgttacaggcgcgtgccagcgacagcgggcgctaccagtgctcgggcaccatgcgcatcccggtggagagcgcgcccatgttctccgctaaggtggctgtgacagtgcaagagctgttccgggcgccggtgctgagggtgatgggtccgcgggaggcccgcggcgcggcgctgggtggggtggtgctgcgctgcgacacgcgcctgcacccgcagaagcgcgacacgccgctgcagttcgcgttttacaagtacagccgcgcggtgcgccgcttcgactggggcgccgagtacacagtcccggagcccgaggtcgaggagctcgaatcgtactggtgcgaggcggctaccgccacccgcagtgtccggaaacgcagtccgtggctgcagctcccggggccgggttctcccctggacccggcctccaccaccgccccagctccatgggccgcagccttggctcctggtaataggccgctttccttcagaaagcccccggtgtccagatcggtcccgttggtcacctccgtccggaacaccacctccaccgggctgcagttcccggcgagcggcgccccgactgcggggccacccgcctgcgctccgccgacgcccttggaacaatcggctggagccctgaaacccgacgtggaccttctgctccgagaaatgcagctgctcaaaggccttctgagccgggtggtcctggaattaaaggagccacaggccctccgggagctcaggggaacgcccgagacccccacctctcactttgctgtgagcccgggaaccccagagaccactcctgtggagagctgagggggcggctaccgtcccctctgcaggctcattcctccttggtctcctgcttcccctcacgcgaatttctttcaaagccatctgtttgcatccttgtgttttgctgtggtttttaaaggagcgcccacgaagtgtagtggctgacgatttcaacctcacacagcagtttgtaaccgcaagcattctctttgaattctcacagaattcagcaagaagtagaaacctgttatttactacattgtgatttaactttggatgtgaatttagtcacccttagcccttcagataagcctagccagtacatatttcagcacaggcagtttttttggtatttaagtacattgaggtaactgagcacttgagaatattttagggtcaaagtgtaattattcataatgaatttactctgttgatattaaaaagacgttcagtcctattactgatgagtttacatcttcaaataaatcctgggttctattta

SEQ ID NO: 1623 - DNA, 574 bp, Homo sapiens
  source 1..574: mol_type = genomic DNA
gcaggcgccgagagggcgggccagggccgcactccggagactcgcggttgctacgcgcaccatggctggaggctgtcgcgccccttcctcagcgcccacggtctcgcttcctgaactccgttcactcctagcctccggacgggcccggctcttcgacgtgcgctctcgcgaggaggcggcagctgggaccatcccaggggcgctcaacatcccggtgtccgagttggagagtgctctgcagatggagccagctgccttccaggctttatattctgctgagaagccaaagctggaagatgagcatctcgttttcttctgtcagatgggcaagcggggcctccaggccacgcagctggcccggagtcttggatacactggggctcgcaactacgctggagcctatagagaatggttggagaaagagagttaggcaggaggcagcttactgattgccaccccctggccccttaatggccaccttaactaagggtgtgaacgggctgacttggtgaattgggcaactccttatagtgttgtgcacacaaaagcatcaaataaagaacatttaatcaaa

SEQ ID NO: 1624 - DNA, 457 bp, Homo sapiens
  source 1..457: mol_type = genomic DNA
cagctctgggagggaacgggagatgttgcaggcgccgagagggcgggccagggccgcactccggagactcgcggttgctacgcgcaccatggctggagtgtccgagttggagagtgctctgcagatggagccagctgccttccaggctttatattctgctgagaagccaaagctggaagatgagcatctcgttttcttctgtcagatgggcaagcggggcctccaggccacgcagctggcccggagtcttggatacactggggctcgcaactacgctggagcctatagagaatggttggagaaagagagttaggcaggaggcagcttactgattgccaccccctggccccttaatggccaccttaactaagggtgtgaacgggctgacttggtgaattgggcaactccttatagtgttgtgcacacaaaagcatcaaataaagaacatttaatcaaa

SEQ ID NO: 1625 - DNA, 4106 bp, Homo sapiens
  source 1..4106: mol_type = genomic DNA
agtgtaagatggcggcggcgttggtggtggcagtggacggggcggctgggcctggaacagtcggagcagccgctagcagaaggatgacccaagacgggaagcgggctgctgagcctcgccgattcccgtgcttgtaactgccccagccggacaccccccctcccttgacctacccggtctgtgtctcgttccggctcggcctgcgccccccctcgcttcccagccggtttcccctaaggatgggcctgacccgtatcccaagctcttagcgctcaggtcttttccttccgccgacccgaagtcatcgctgggagtactggttgccctttcctcagtccttcagtgaatctacagacctattttctcaggagctcagcctggccttacttcagtgataaaaggaggaaaggctggctacagcaaacatcattcaagatgtccagcaaagggagcagcacagatggcagaacagacttagctaatggaagcctgtctagcagtccagaggagatgtctggagctgaagaggggagggagacatcctcaggcattgaagtggaggcctcagacctgagtttgagcttgactggggatgatggtggccccaaccgcaccagcacagaaagtcgaggcacagacacagagagctcaggtgaagataaggactctgacagcatggaggacactggtcattactccattaatgatgaaaatcgagtccatgaccgctcagaggaagaggaagaggaggaagaagaggaggaagaagagcagcctcggcgccgtgtacagcgcaagcgggctaaccgtgaccaggactcatcagatgatgagcgggccctagaggactgggtgtcctcagaaacatcagctctaccccgacctcgctggcaagccctccctgcccttcgggagcgggagctgggttcaagtgcccgctttgtctatgaggcctgtggggcaagagtctttgtgcagcgtttccgcctgcagcatgggcttgagggccatactggttgtgtcaataccctgcactttaaccagcgcggcacctggctggccagtggcagcgatgacctgaaggtggtggtgtgggattgggtacggcggcagccagtactggactttgagagtggccacaaaagtaatgtgttccaggccaagtttcttcctaacagtggtgattctactctggccatgtgtgcccgtgacgggcaggttcgagtagcagaactgtctgccacacagtgttgcaagaatacaaaacgtgtggcccagcacaagggagcgtcccacaagttggcactggaaccagactctccctgtacgttcttatctgcaggtgaagatgcagttgttttcaccattgacctgagacaagaccgcccagcgtcgaaactggtggtgacaaaagagaaagagaagaaagtggggctgtatacgatctatgtgaatcctgccaatacccaccagtttgcagtgggtggacgagatcagtttgtaaggatttatgaccagaggaaaattgatgagaatgagaacaatggagtactcaagaagttctgtcctcatcacctggtgaacagtgagtccaaagcaaacatcacctgtcttgtgtacagccacgacggcacagagctcctggccagttacaatgatgaagacatttacctcttcaactcctctcacagtgatggggcccagtatgttaagagatacaagggccacagaaataatgccacagtaaaaggcgtcaatttctatggccccaagagtgagtttgtggtgagcggtagtgactgtgggcacatcttcctctgggagaaatcatcctgccagattattcagttcatggagggggacaagggaggcgtggtaaactgtcttgagccccaccctcacctgcctgtgctggcaaccagtggcctagaccatgatgtgaagatctgggcacccacagctgaagcttccactgagctgacagggttaaaagatgtgattaagaagaacaagcgggagcgggatgaagatagcttgcaccaaactgacctgtttgatagtcacatgctgtggttccttatgcatcacctgagacagagacgccatcaccggcgctggcgagaacctggggttggggccacagacgcggactctgatgagtctcccagctcctcagacacatcggacgaggaggagggccctgaccgggtgcagtgcatgccatcttgaggcctcatacctaggtggggcaggctggggctgccaacctgatcctgcctgggcaaccctttcctgtcccaggccctacattcagcagaaacgcactttggactttttgctttagataaaagaaagacatcccaggagaaggacaaaccagaggagtgaaccaacaaagagtacctaggaatgggagttgagccctggaatggggctctatggagaggtgcataggactcggcagaaatggcctctccccaaagcctctttttgagaggagagggaagcctattttgttaactggtttgggatagggaatggggtttctttttctttaatctcccttgtttcttgggctgggggaggggtggggggaacaactggctattcagtaccaaggggccagagtggagggtaggagtgccactctctctttggtttaggtttttgaccttttcttcctttgttttttaaaagtttatgacagttggctccccccccacccccagcaaccccatcccagaatcctattttcctgggaagtccttaaagcccctaaccatcccacactcttcactttcctttccaccttattcattctctgtacttaccacagtattttgcacttgattacatatccttcactctcttctcttcatcccatcaccccctaaataggtcaggtgagggaggctgggaagaggtgggaggaggggcagaagtgaaggaagaataggaaggatattacctcttctgttatttttttaagaaacattgtttggtggcagcaatctccctgtccctatcactgttagaggcctaattttatatctataaatatattaaaaagcaagtcaaacttggatgtatcaaggtaaaattattgtcaaagtttaaatacctatatattctctgaatgcaataaagggacttaagagtgaacaagagtaatggtgtggaagtgacacctggggtcagtttacctctgtgtatggtcactagagattgggacttaccctttaggttttaggaggcttgagaatggaaggatcctcatttctgcccttcctggttccctgctttggtgtaggggttgggaaaaacaggaaattcctctcagctctgcctcagatctcctacctctccttaagtcttgtagggggttccaaggatggctcttctaaccagaggctggcctgtctttaaaacttaactactttagggtggtgccaccactgcagactattgtggtactttgtgacagaagacatgtacacacacaccacacacatacatacacactctctcactctgtctctcttacctttagctgcttgatcattaagccatccaacttcatgccagttcccttctttatagaagagtgaagggaaagacttcctgggtttgacttaaaccttgtccacctcttgatattttaggattgaggaataagtcattaatctaaggactgattacagtggctggagcttgggcacttgtcttatcactggtcactgagtctgaaagtcccagctgaattcttgcccttaagtgcttttgctgctatttttttgcccccagttccacaagatccaaccaagaattctgtatcctgggacagtcagattcttctaaatcaggccaggaaggaggggaaaagagtgagagaatggtattcccagatacttcttcctcctgccccttttcccagcagctctgagaccagatgttggctgctgtacttactccctgaggtagggaatgtgtggtgatcgagtggtctgtgttcctattgctggtggggtgatagggtgggctaaaaaccatgcactctggaatttgttgtattttctcccagtaaagcttttcttctcccgactgct

SEQ ID NO: 1626 - DNA, 3824 bp, Homo sapiens
  source 1..3824: mol_type = genomic DNA
gcaggcgcaagcgcagagagcggaggcggtggtggtggcggccgctggccagttccttcagtgaatctacagacctattttctcaggagctcagcctggccttacttcagtgataaaaggaggaaaggctggctacagcaaacatcattcaagatgtccagcaaagggagcagcacagatggcagaacagacttagctaatggaagcctgtctagcagtccagaggagatgtctggagctgaagaggggagggagacatcctcaggcattgaagtggaggcctcagacctgagtttgagcttgactggggatgatggtggccccaaccgcaccagcacagaaagtcgaggcacagacacagagagctcaggtgaagataaggactctgacagcatggaggacactggtcattactccattaatgatgaaaatcgagtccatgaccgctcagaggaagaggaagaggaggaagaagaggaggaagaagagcagcctcggcgccgtgtacagcgcaagcgggctaaccgtgaccaggactcatcagatgatgagcgggccctagaggactgggtgtcctcagaaacatcagctctaccccgacctcgctggcaagccctccctgcccttcgggagcgggagctgggttcaagtgcccgctttgtctatgaggcctgtggggcaagagtctttgtgcagcgtttccgcctgcagcatgggcttgagggccatactggttgtgtcaataccctgcactttaaccagcgcggcacctggctggccagtggcagcgatgacctgaaggtggtggtgtgggattgggtacggcggcagccagtactggactttgagagtggccacaaaagtaatgtgttccaggccaagtttcttcctaacagtggtgattctactctggccatgtgtgcccgtgacgggcaggttcgagtagcagaactgtctgccacacagtgttgcaagaatacaaaacgtgtggcccagcacaagggagcgtcccacaagttggcactggaaccagactctccctgtacgttcttatctgcaggtgaagatgcagttgttttcaccattgacctgagacaagaccgcccagcgtcgaaactggtggtgacaaaagagaaagagaagaaagtggggctgtatacgatctatgtgaatcctgccaatacccaccagtttgcagtgggtggacgagatcagtttgtaaggatttatgaccagaggaaaattgatgagaatgagaacaatggagtactcaagaagttctgtcctcatcacctggtgaacagtgagtccaaagcaaacatcacctgtcttgtgtacagccacgacggcacagagctcctggccagttacaatgatgaagacatttacctcttcaactcctctcacagtgatggggcccagtatgttaagagatacaagggccacagaaataatgccacagtaaaaggcgtcaatttctatggccccaagagtgagtttgtggtgagcggtagtgactgtgggcacatcttcctctgggagaaatcatcctgccagattattcagttcatggagggggacaagggaggcgtggtaaactgtcttgagccccaccctcacctgcctgtgctggcaaccagtggcctagaccatgatgtgaagatctgggcacccacagctgaagcttccactgagctgacagggttaaaagatgtgattaagaagaacaagcgggagcgggatgaagatagcttgcaccaaactgacctgtttgatagtcacatgctgtggttccttatgcatcacctgagacagagacgccatcaccggcgctggcgagaacctggggttggggccacagacgcggactctgatgagtctcccagctcctcagacacatcggacgaggaggagggccctgaccgggtgcagtgcatgccatcttgaggcctcatacctaggtggggcaggctggggctgccaacctgatcctgcctgggcaaccctttcctgtcccaggccctacattcagcagaaacgcactttggactttttgctttagataaaagaaagacatcccaggagaaggacaaaccagaggagtgaaccaacaaagagtacctaggaatgggagttgagccctggaatggggctctatggagaggtgcataggactcggcagaaatggcctctccccaaagcctctttttgagaggagagggaagcctattttgttaactggtttgggatagggaatggggtttctttttctttaatctcccttgtttcttgggctgggggaggggtggggggaacaactggctattcagtaccaaggggccagagtggagggtaggagtgccactctctctttggtttaggtttttgaccttttcttcctttgttttttaaaagtttatgacagttggctccccccccacccccagcaaccccatcccagaatcctattttcctgggaagtccttaaagcccctaaccatcccacactcttcactttcctttccaccttattcattctctgtacttaccacagtattttgcacttgattacatatccttcactctcttctcttcatcccatcaccccctaaataggtcaggtgagggaggctgggaagaggtgggaggaggggcagaagtgaaggaagaataggaaggatattacctcttctgttatttttttaagaaacattgtttggtggcagcaatctccctgtccctatcactgttagaggcctaattttatatctataaatatattaaaaagcaagtcaaacttggatgtatcaaggtaaaattattgtcaaagtttaaatacctatatattctctgaatgcaataaagggacttaagagtgaacaagagtaatggtgtggaagtgacacctggggtcagtttacctctgtgtatggtcactagagattgggacttaccctttaggttttaggaggcttgagaatggaaggatcctcatttctgcccttcctggttccctgctttggtgtaggggttgggaaaaacaggaaattcctctcagctctgcctcagatctcctacctctccttaagtcttgtagggggttccaaggatggctcttctaaccagaggctggcctgtctttaaaacttaactactttagggtggtgccaccactgcagactattgtggtactttgtgacagaagacatgtacacacacaccacacacatacatacacactctctcactctgtctctcttacctttagctgcttgatcattaagccatccaacttcatgccagttcccttctttatagaagagtgaagggaaagacttcctgggtttgacttaaaccttgtccacctcttgatattttaggattgaggaataagtcattaatctaaggactgattacagtggctggagcttgggcacttgtcttatcactggtcactgagtctgaaagtcccagctgaattcttgcccttaagtgcttttgctgctatttttttgcccccagttccacaagatccaaccaagaattctgtatcctgggacagtcagattcttctaaatcaggccaggaaggaggggaaaagagtgagagaatggtattcccagatacttcttcctcctgccccttttcccagcagctctgagaccagatgttggctgctgtacttactccctgaggtagggaatgtgtggtgatcgagtggtctgtgttcctattgctggtggggtgatagggtgggctaaaaaccatgcactctggaatttgttgtattttctcccagtaaagcttttcttctcccgactgct

SEQ ID NO: 1627 - DNA, 756 bp, Homo sapiens
  source 1..756: mol_type = genomic DNA
gagttacttggctcggagcgggcgaggggacgcgtgggcggagcggggctggccagcctcggcccccatgacccgctgtcctgtgccctttcccagcgatgggcgtgcagccccccaacttctcctgggtgcttccgggccggctggcgggactggcgctgccgcggctccccgcccactaccagttcctgttggacctgggcgtgcggcacctggtgtccctgacggagcgcgggccccctcacagcgacagctgccccggcctcaccctgcaccgcctgcgcatccccgacttctgcccgccggcccccgaccagatcgaccgcttcgtgcagatcgtggacgaggccaacgcacggggagaggctgtgggagtgcactgtgctctgggctttggccgcactggcaccatgctggcctgttacctggtgaaggagcggggcttggctgcaggagatgccattgctgaaatccgacgactacgacccggctccatcgagacctatgagcaggagaaagcagtcttccagttctaccagcgaacgaaataaggggccttagtacccttctaccaggccctcactccccttccccatgttgtcgatggggccagagatgaagggaagtggactaaagtattaaaccctctagctcccattggctgaagacactgaagtagcccacccctgcaggcaggtcctgattgaaggggaggcttgtactgctttgttgaataaatgagttttacgaaccagg

SEQ ID NO: 1628 - DNA, 694 bp, Homo sapiens
  source 1..694: mol_type = genomic DNA
gcagaccacgtggcccgggaggcgccgaggccagcgatgggcgtgcagccccccaacttctcctgggtgcttccgggccggctggcgggactggcgctgccgcggctccccgcccactaccagttcctgttggacctgggcgtgcggcacctggtgtccctgacggagcgcgggccccctcacagcgacagctgccccggcctcaccctgcaccgcctgcgcatccccgacttctgcccgccggcccccgaccagatcgaccgcttcgtgcagatcgtggacgaggccaacgcacggggagaggctgtgggagtgcactgtgctctgggctttggccgcactggcaccatgctggcctgttacctggtgaaggagcggggcttggctgcaggagatgccattgctgaaatccgacgactacgacccggctccatcgagacctatgagcaggagaaagcagtcttccagttctaccagcgaacgaaataaggggccttagtacccttctaccaggccctcactccccttccccatgttgtcgatggggccagagatgaagggaagtggactaaagtattaaaccctctagctcccattggctgaagacactgaagtagcccacccctgcaggcaggtcctgattgaaggggaggcttgtactgctttgttgaataaatgagttttacgaaccagg

SEQ ID NO: 1629 - DNA, 729 bp, Homo sapiens
  source 1..729: mol_type = genomic DNA
gggcagagcgacccgagggcggcgccctgcagaccacgtggcccgggaggcgccgaggccaggtaggtgcgatgggcgtgcagccccccaacttctcctgggtgcttccgggccggctggcgggactggcgctgccgcggctccccgcccactaccagttcctgttggacctgggcgtgcggcacctggtgtccctgacggagcgcgggccccctcacagcgacagctgccccggcctcaccctgcaccgcctgcgcatccccgacttctgcccgccggcccccgaccagatcgaccgcttcgtgcagatcgtggacgaggccaacgcacggggagaggctgtgggagtgcactgtgctctgggctttggccgcactggcaccatgctggcctgttacctggtgaaggagcggggcttggctgcaggagatgccattgctgaaatccgacgactacgacccggctccatcgagacctatgagcaggagaaagcagtcttccagttctaccagcgaacgaaataaggggccttagtacccttctaccaggccctcactccccttccccatgttgtcgatggggccagagatgaagggaagtggactaaagtattaaaccctctagctcccattggctgaagacactgaagtagcccacccctgcaggcaggtcctgattgaaggggaggcttgtactgctttgttgaataaatgagttttacgaaccagg

SEQ ID NO: 1630 - DNA, 5558 bp, Homo sapiens
  source 1..5558: mol_type = genomic DNA
gctactcccaccccgccccgccccgtcattgtccccgtcggtctcttttctcttccgtcctaaaagctctgcgagccgctcccttctcccggtgccccgcgtctgtccatcctcagtgggtcagacgagcaggatggagggctgcatgggggaggagtcgtttcagatgtgggagctcaatcggcgcctggaggcctacctggcccgggtcaaggcgctggaggagcagaatgagctgctcagcgcggagctcggggggctccgggcacaatccgcggacacctcctggcgggcgcatgccgacgacgagctggcggccctgcgggccctcgttgaccaacgctggcgggagaagcacgcggccgaggtggcgcgcgacaacctggctgaagagctggagggcgtggcaggccgatgccagcagctgcggctggcccgggagcggacgacggaggaggtagcccgcaaccggcgcgccgtcgaggcagagaaatgcgcccgggcctggctgagtagccaggtggcagagctggagcgcgagctagaggctctacgcgtggcgcacgaggaggagcgcgtcggcctgaacgcgcaggctgcctgtgccccccgctgccccgcgccgccccgcgggcctcccgcgccggccccggaggtagaggagctggcaaggcgactgggcgaggcgtggcgcggggcagtgcgcggctaccaggagcgcgtggcacacatggagacgtcgctgggccaggcccgcgagcggctgggccgggcggtgcagggtgcccgcgagggccgcctggagctgcagcagctccaggctgagcgcggaggcctcctggagcgcagggcagcgttggaacagaggttggagggccgctggcaggagcggctgcgggctactgaaaagttccagctggctgtggaggccctggagcaggagaaacagggcctacagagccagatcgctcaggtcctggaaggtcggcagcagctggcgcacctcaagatgtccctcagcctggaggtggccacgtacaggaccctcctggaggctgagaactcccggctgcaaacacctggcggtggctccaagacttccctcagctttcaggaccccaagctggagctgcaattccctaggaccccagagggccggcgtcttggatctttgctcccagtcctgagcccaacttccctcccctcacccttgcctgctacccttgagacacctgtgccagcctttcttaagaaccaagaattcctccaggcccgtacccctaccttggccagcacccccatcccccccacacctcaggcaccctctcctgctgtagatgcagagatcagagcccaggatgctcctctctctctgctccagacacagggtgggaggaaacaggctccagagcccctgcgggctgaagccagggtggccattcctgccagcgtcctgcctggaccagaggagcctgggggccagcggcaagaggccagtacaggccagtccccagaggaccatgcctccttggcaccacccctcagccctgaccactccagtttagaggctaaggatggagaatccggtgggtctagagtgttcagcatatgccgaggggaaggtgaagggcaaatctgggggttggtagagaaagaaacagccatagagggcaaagtggtaagcagcttgcagcaggaaatatgggaagaagaggatctaaacaggaaggaaatccaggactcccaggttcctttggaaaaagaaaccctgaagtctctgggagaggagattcaagagtcactgaagactctggaaaaccagagccatgagacactagaaagggagaatcaagaatgtccgaggtctttagaagaagacttagaaacactaaaaagtctagaaaaggaaaataaagagctattaaaggatgtggaggtagtgagacctctagaaaaagaggctgtaggccaacttaagcctacaggaaaagaggacacacagacattgcaatccctgcaaaaggagaatcaagaactaatgaaatctcttgaaggtaatctagagacatttttatttccaggaacggaaaatcaagaattagtaagttctctgcaagagaacttagagtcattgacagctctggaaaaggagaatcaagagccactgagatctccagaagtaggggatgaggaggcactgagacctctgacaaaggagaatcaggaacccctgaggtctcttgaagatgagaacaaagaggcctttagatctctagaaaaagagaaccaggagccactgaagactctagaagaagaggaccagagtattgtgagacctctagaaacagagaatcacaaatcactgaggtctttagaagaacaggaccaagagacattgagaactcttgaaaaagagactcaacagcgacggaggtctctaggggaacaggatcagatgacattaagacccccagaaaaagtggatctagaaccactgaagtctcttgaccaggagatagctagacctcttgaaaatgagaatcaagagttcttaaagtcactcaaagaagagagcgtagaggcagtaaaatctttagaaacagagatcctagaatcactgaagtctgcgggacaagagaacctggaaacactgaaatctccagaaactcaagcaccactgtggactccagaagaaataaatcagggggcaatgaatcctctagaaaaggaaattcaagaaccactggagtctgtggaagtgaaccaagagacattcagactcctggaagaggagaatcaggaatcattgagatctctgggagcatggaacctggagaatttgagatctccagaggaggtagacaaggaaagtcaaaggaatctggaagaggaagagaacctgggaaagggagagtaccaagagtcactgaggtctctggaggaggagggacaggagctgccgcagtctgcagatgtgcagaggtgggaagatacggtggagaaggaccaagaactggctcaggaaagccctcctgggatggctggagtggaaaatgaggatgaggcagagctgaatctgagggagcaggatggcttcactgggaaggaggaggtggtagagcagggagagctgaatgccacagaggaggtctggatcccaggcgaggggcacccagagagccctgagcccaaagagcagagaggcctggttgagggagccagtgtgaagggaggggctgagggcctccaggaccctgaagggcaatcacaacaggtgggggccccaggcctccaggctccccaggggctgccagaggcgatagagcccctggtggaagatgatgtggccccagggggtgaccaagcctccccagaggtcatgttggggtcagagcctgccatgggtgagtctgctgcgggagctgagccaggcccggggcagggggtgggagggctgggggacccaggccatctgaccagggaagaggtgatggaaccacccctggaagaggagagtttggaggcaaagagggttcagggcttggaagggcctagaaaggacctagaggaggcaggtggtctggggacagagttctccgagctgcctgggaagagcagagacccttgggagcctcccagggagggtagggaggagtcagaggctgaggcccccaggggagcagaggaggcgttccctgctgagaccctgggccacactggaagtgatgccccttcaccttggcctctggggtcagaggaagctgaggaggatgtaccaccagtgctggtctcccccagcccaacgtacaccccgatcctggaagatgcccctgggcctcagcctcaggctgaagggagtcaggaggctagctggggggtgcaggggagggctgaagccctggggaaagtagagagcgagcaggaggagttgggttctggggagatccccgagggcccccaggaggaaggggaggagagcagagaagagagcgaggaggatgagctcggggagacccttccagactccactcccctgggcttctacctcaggtcccccacctcccccaggtgggaccccactggagagcagaggccaccccctcaaggggagactggaaaggagggctgggatcctgctgtcctggcttccgagggccttgaggccccaccctcagaaaaggaggagggggaggagggagaagaggagtgtggccgtgactctgacctgtcagaagaatttgaggacctggggactgaggcaccttttcttcctggggtccctggggaggtggcagaacctctgggccaggtgccccagctgctactggatcctgcagcctgggatcgagatggggagtccgatgggtttgcagatgaggaagaaagtggggaggagggagaggaggatcaggaggaggggagggagccaggggctgggcggtgggggccagggtcttctgttggcagcctccaggccctgagtagctcccagagaggggaattcctggagtctgattctgtgagtgtcagtgtcccctgggatgacagcttgaggggtgcagtggctggtgcccccaagactgccctggaaacggagtcccaggacagtgctgagccttctggctcagaggaagagtctgaccctgtttccttggagagggaggacaaagtccctggccctctagagatccccagtgggatggaggatgcaggcccaggggcagacatcattggtgttaatggccagggtcccaacttggaggggaagtcacagcatgtgaatgggggagtgatgaacgggctggagcagtctgaggaagtggggcaaggaatgccgctagtctctgagggagaccgagggagcccctttcaggaggaggaggggagtgctctgaagacctcttgggcaggggctcctgttcacctgggccagggtcagttcctgaagttcactcagagggaaggagatagagagtcctggtcctcaggggaggactaggaaaagaccatctgcccggcactggggacttaggggtgcggggaggggaaggacgcctccaagcccgctccctgctcaggagcagcactcttaacttacgatctcttgacatatggtttctggctgagaggcctggcccgctaaggtgaaaaggggtgtggcaaaggagcctactccaagaatggaggctgtaggaatataacctcccaccctgcaaagggaatctcttgcctgctccatctcataggctaagtcagctgaatcccgatagtactaggtccccttccctccgcatcccgtcagctggaaaaggcctgtggcccagaggcttctccaaagggagggtgacatgctggcttttgtgcccaagctcaccagccctgcgccacctcactgcagtagtgcaccatctcactgcagtagcacgccctcctgggccgtctggcctgtggctaatggaggtgacggcactcccatgtgctgactccccccatccctgccacgctgtggccctgcctggctagtccctgcctgaataaagtaatgcctccgcttcaaa

SEQ ID NO: 1631 - DNA, 438 bp, Homo sapiens
  source 1..438: mol_type = genomic DNA
tgaggctgtgagcagtaccggagggcaccacacctgttggtgttcagatggagcggcacactagtcatcctaacagaaaagttccagccaaagaggaagctaatgctgtgcctctctgtagagcaaaaccctcccccagctatattaatcttcaagcaagttccccaccagccacttttctgaacatccagacaacaaagctgccctcggttgatcacaagcccaaggaatgcctaggactcctggaatgtatgtatgcaaacctccagcttcagacccagctcgcccaacaacagatggctgttttggaacatttacaggcatctgtgacacaactggctcctgggaggggaagcaataactcttctctcccagccttatctcctaatccattgttaaatcacctgccccaattcagtaaatgaattgtggaacaaa

SEQ ID NO: 1632 - DNA, 491 bp, Homo sapiens
  source 1..491: mol_type = genomic DNA
agccttagcaacaggtggactagagaggcgggactccagccagcacatgggggaaagacctgccggcttggcgcagggcaccacacctgttggtgttcagatggagcggcacactagtcatcctaacagaaaagttccagccaaagaggaagctaatgctgtgcctctctgtagagcaaaaccctcccccagctatattaatcttcaagcaagttccccaccagccacttttctgaacatccagacaacaaagctgccctcggttgatcacaagcccaaggaatgcctaggactcctggaatgtatgtatgcaaacctccagcttcagacccagctcgcccaacaacagatggctgttttggaacatttacaggcatctgtgacacaactggctcctgggaggggaagcaataactcttctctcccagccttatctcctaatccattgttaaatcacctgccccaattcagtaaatgaattgtggaacaaa

SEQ ID NO: 1633 - DNA, 448 bp, Homo sapiens
  source 1..448: mol_type = genomic DNA
gtgctggggttgcggctttcggttaacaccgcaggcaccacacctgttggtgttcagatggagcggcacactagtcatcctaacagaaaagttccagccaaagaggaagctaatgctgtgcctctctgtagagcaaaaccctcccccagctatattaatcttcaagcaagttccccaccagccacttttctgaacatccagacaacaaagctgccctcggttgatcacaagcccaaggaatgcctaggactcctggaatgtatgtatgcaaacctccagcttcagacccagctcgcccaacaacagatggctgttttggaacatttacaggcatctgtgacacaactggctcctgggaggggaagcaataactcttctctcccagccttatctcctaatccattgttaaatcacctgccccaattcagtaaatgaattgtggaacaaa

SEQ ID NO: 1634 - DNA, 598 bp, Homo sapiens
  source 1..598: mol_type = genomic DNA
ggcagttggccagcacaccactacgcatgtgtgtcaactctagggttgggtgctggggttgcggctttcggttaacaccgcagattggaacaggctgagatctgctggagacaacttaggaaattatcatagtgaaaatactaacatggattgttgatcatctgatgctatgattctttcccaggcaccacacctgttggtgttcagatggagcggcacactagtcatcctaacagaaaagttccagccaaagaggaagctaatgctgtgcctctctgtagagcaaaaccctcccccagctatattaatcttcaagcaagttccccaccagccacttttctgaacatccagacaacaaagctgccctcggttgatcacaagcccaaggaatgcctaggactcctggaatgtatgtatgcaaacctccagcttcagacccagctcgcccaacaacagatggctgttttggaacatttacaggcatctgtgacacaactggctcctgggaggggaagcaataactcttctctcccagccttatctcctaatccattgttaaatcacctgccccaattcagtaaatgaattgtggaacaaa

SEQ ID NO: 1635 - DNA, 751 bp, Homo sapiens
  source 1..751: mol_type = genomic DNA
aggaggatcgcttgaacctgggaggcagaggttgcagtgaacagagatcgcgccactgcaacccagcctgggtgacagagcgagactttgtctcaaaatataaaaagaaaaaaaataagggatcttccaaaaggaaaaggtgaccagtcgagaaatctgggaaaacccaactggttagtgggaaagagtacaacgccggggacacggagggaacgattacatctaagatcagtgagattggaacaggctgagatctgctggagacaacttaggaaattatcatagtgaaaatactaacatggattgttgatcatctgatgctatgattctttcccaggcaccacacctgttggtgttcagatggagcggcacactagtcatcctaacagaaaagttccagccaaagaggaagctaatgctgtgcctctctgtagagcaaaaccctcccccagctatattaatcttcaagcaagttccccaccagccacttttctgaacatccagacaacaaagctgccctcggttgatcacaagcccaaggaatgcctaggactcctggaatgtatgtatgcaaacctccagcttcagacccagctcgcccaacaacagatggctgttttggaacatttacaggcatctgtgacacaactggctcctgggaggggaagcaataactcttctctcccagccttatctcctaatccattgttaaatcacctgccccaattcagtaaatgaattgtggaacaaa

SEQ ID NO: 1636 - DNA, 884 bp, Homo sapiens
  source 1..884: mol_type = genomic DNA
caacttcaacatggccgaagcaagtagcgccaatctaggcagcggctgtgaggaaaaaaggcatgaggggtcgtcttcggaatctgtgccacccggcactaccatttcgagggtgaagctcctcgacaccatggtggacacttttcttcagaagctggtcgccgccggcagctctccactccttcattgggacggaagtgctggtccccgcctgccctctggtggacagtctgtgaaacaggccttcagttgggcggcgtgcaggttaccacaggggaggaaggaggaaatctctgacatcaaagaggaggggaacctagaagctgtcttgaatgccttggataaaattgtggaagaaggcaaagtccgcaaagagccagcctggcgccccagcgggatcccagagaaggatctgcacagtgttatggcaccctacttcctgcagcaacgggacaccctgcggcgccatgtgcagaaacaggaggccgagaaccagcagctggcagatgccgtcctggcagggcggaggcaggtggaggagctgcagctacaggtccaggcccagcagcaggcctggcaggctctacacagagaacagagggagctggttgctgtgctgagggagcctgagtgaggagaccgccagccccagaagcagagggcagtcaaggtcaagagcctgtggtccagcatgcctggcctgggcgggctacctctgagaacggctgaaatggtgcccagtccatcagcagtgatggaatttgctggaggactaggccagagcaagcctcactgccactgtgcctttggggcacccttggggttggacatacaccccctttagattcctctgtttcttctacctggataattcttggccatgt

SEQ ID NO: 1637 - DNA, 1068 bp, Homo sapiens
  source 1..1068: mol_type = genomic DNA
aacttcaacatggccgaagcaagtagcgccaatctaggcagcggctgtgaggaaaaaaggcatgaggggtcgtcttcggaatctgtgccacccggcactaccatttcgagggtgaagctcctcgacaccatggtggacacttttcttcagaagctggtcgccgccggcagctaccagagattcactgactgctataagtgcttctaccagttgcagcctgcgatgacacagcaaatctatgacaagtttatagctcagttgcagacatctatccgggaggaaatctctgacatcaaagaggaggggaacctagaagctgtcttgaatgccttggataaaattgtggaagaaggcaaagtccgcaaagagccagcctggcgccccagcgggatcccagagaaggatctgcacagtgttatggcaccctacttcctgcagcaacgggacaccctgcggcgccatgtgcagaaacaggaggccgagaaccagcagctggcagatgccgtcctggcagggcggaggcaggtggaggagctgcagctacaggtccaggcccagcagcaggcctggcaggctctacacagagaacagagggagctggttgctgtgctgagggagcctgagtgaggagaccgccagccccagaagcagagggcagtcaaggtcaagagcctgtggtccagcatgcctggcctgggcgggctacctctgagaacggctgaaatggtgcccagtccatcagcagtgatggaatttgctggaggactaggccagagcaagcctcactgccactgtgcctttggggcacccttggggttggacatacaccccctttagattcctctgtttcttctacctggataattcttggccatgttctctcttctctaggttcaggtcagctctgcccctccgcccccctcctgctggttccccagcccttttccctggccctggcttggagaatctgttttcaatctccactgattgcccccttgctggccagcccaggggcctttaccatgttctctccacatccgtaaataaacttccttcactacactgtaa

SEQ ID NO: 1638 - DNA, 1019 bp, Homo sapiens
  source 1..1019: mol_type = genomic DNA
agatttggaggttcaacttcaacatggccgaagcaagtagcgccaatctaggcagcggctgtgaggaaaaaaggcatgaggggtcgtcttcggaatctgtgccacccggcactaccatttcgagggtgaagctcctcgacaccatggtggacacttttcttcagaagctggtcgccgccggcagctaccagagattcactgactgctataagtgcttctaccagttgcagcctgcgatgacacagcaaatctatgacaagtttatagctcagttgcagacatctatccgggaggaaatctctgacatcaaagaggaggggaacctagaagctgtcttgaatgccttggataaaattgtggaagaaggcaaagtccgcaaagagccagcctgcaacgggacaccctgcggcgccatgtgcagaaacaggaggccgagaaccagcagctggcagatgccgtcctggcagggcggaggcaggtggaggagctgcagctacaggtccaggcccagcagcaggcctggcaggctctacacagagaacagagggagctggttgctgtgctgagggagcctgagtgaggagaccgccagccccagaagcagagggcagtcaaggtcaagagcctgtggtccagcatgcctggcctgggcgggctacctctgagaacggctgaaatggtgcccagtccatcagcagtgatggaatttgctggaggactaggccagagcaagcctcactgccactgtgcctttggggcacccttggggttggacatacaccccctttagattcctctgtttcttctacctggataattcttggccatgttctctcttctctaggttcaggtcagctctgcccctccgcccccctcctgctggttccccagcccttttccctggccctggcttggagaatctgttttcaatctccactgattgcccccttgctggccagcccaggggcctttaccatgttctctccacatccgtaaataaacttccttcactacactgt

SEQ ID NO: 1639 - DNA, 2555 bp, Homo sapiens
  source 1..2555: mol_type = genomic DNA
cctcgatcccctcgccgcggtcccatggaggaggaggcgagccgcagcgccgcggcgacgaacccagggagaaaaggaagcaaatgagctgatggaagatctgtttgaaactttccaagatgagatgggattctccaacatggaagatgatggcccagaagaggaggagcgtgtggctgagcctcaagctaactttaacacccctcaagctctacggtttgaggaactactggccaacctactaaatgaacaacatcagatagcgaaggaactatttgaacagctgaagatgaagaaaccttcagccaaacagcagaaggaggtagagaaggttaaaccccagtgtaaggaagttcatcagaccctgattctggacccagcacaaaggaagagactccagcagcagatgcagcagcatgttcagctcttgacacaaatccaccttcttgccacctgcaaccccaatctcaatccggaggccagtagcaccaggatatgtcttaaagagctgggaacctttgctcaaagctccatcgcccttcaccatcagtacaaccccaagtttcagaccctgttccaaccctgtaacttgatgggagctatgcagctgattgaagacttcagcacacatgtcagcattgactgcagccctcataaaactgtcaagaagactgccaatgaatttccctgtttgccaaagcaagtggcttggatcctggccacaagcaaggttttcatgtatccagagttacttccagtgtgttccctgaaggcaaagaatccccaggataagatcctcttcaccaaggctgaggacaatttgttagctttaggactgaagcattttgaagggactgagtttcttaaccctctaatcagcaagtaccttctaacctgcaagactgcccgccaactgacagtgagaatcaagaacctcaacatgaacagagctcctgacaacatcattaaattttataagaagaccaaacagctgccagtcctaggaaaatgctgtgaagagatccagccacatcagtggaagccacctatagagagagaagaacaccggctcccattctggttaaaggccagtctgccatccatccaggaagaactgcggcacatggctgatggtgctagagaggtaggaaatatgactggaaccactgagatcaactcagatcaaggcctagaaaaagacaactcagagttggggagtgaaactcggtacccactgctattgcctaagggtgtagtcctgaaactgaagccagttgccgaccgtttccccaagaaggcttggagacagaagcgttcatcagtcctgaaacccctccttatccaacccagcccctctctccagcccagcttcaaccctgggaaaacaccagcccaatcaactcattcagaagcccctccgagcaaaatggtgctccggattcctcacccaatacagccagccactgttttacagacagttccaggtgtccctccactgggggtcagtggaggtgagagttttgagtctcctgcagcactgcctgctatgccccctgaggccaggacaagcttccctctgtctgagtcccagactttgctctcttctgcccctgtgcccaaggtaatgatgccctcccctgcctcttccatgtttcgaaagccatatgtgagacggagaccctcaaaaagaaggggagccagggcctttcgctgtatcaaacctgcccctgttatccaccctgcatctgttatcttcactgttcctgctaccactgtgaagattgtgagccttggcggtggctgtaacatgatccagcctgtcaatgcggctgtggcccagagtccccagactattcccatcgccaccctcttggttaaccctacttccttcccctgtccattgaaccagccccttgtggcctcctctgtctcacccttaattgtttctggcaattctgtgaatcttcctataccatccacccctgaagataaggcccacatgaatgtggacattgcttgtgctgtggctgatggggaaaatgcctttcagggcctagaacccaaattagagccccaggaactatctcctctctctgctactgttttccccaaagtggaacatagcccagggcctccaccagtcgataaacagtgccaagaaggattgtcagagaacagtgcctatcgctggaccgttgtgaaaacagaggagggaaggcaagctctggagccgctccctcagggcatccaggagtctctaaacaactcttcccctggggatttagaggaagttgtcaagatggaacctgaagatgctacagaggaaatcagtggatttctttgagctaggagaataagagtctggagactgggagccttcacttcggcctccgattggtggcgcatagggtgtaaccaataggaaacccctaaagggtacttaaaccccagattttgcaactggggctcttgagcagcttgctttagcctgctcccactctgtggaatatacttttgcttcaataaatctgtgcttttattgcttcattgtttca

SEQ ID NO: 1640 - DNA, 2874 bp, Homo sapiens
  source 1..2874: mol_type = genomic DNA
gctacatggccggagtcgggcgaagcgggggaccgtggggaagaacgcgaggagggaggagtgggaggttgggggtgtcgctaggcgcccttagctccctccctctggaggagctgccgcggccactctgctgccgccgctgccgccgccattttgggttcgctttgcgaggggaaacgatcccagtgtcggttgcgggatccgcctcctctcagtttgcccctttagccctccacctttcccttctcctctctcgcatttccgccagtcggcttacccgctggccgcctcctgacaagcgggagggatccgcggtggacccagggaagcggaggagcctggcggccaccccctcttcctcacttccctgtactctcatcgctctcggcctccgacacgaaaaggaagcaaatgagctgatggaagatctgtttgaaactttccaagatgagatgggattctccaacatggaagatgatggcccagaagaggaggagcgtgtggctgagcctcaagctaactttaacacccctcaagctctacggtttgaggaactactggccaacctactaaatgaacaacatcagatagcgaaggaactatttgaacagctgaagatgaagaaaccttcagccaaacagcagaaggaggtagagaaggttaaaccccagtgtaaggaagttcatcagaccctgattctggacccagcacaaaggaagagactccagcagcagatgcagcagcatgttcagctcttgacacaaatccaccttcttgccacctgcaaccccaatctcaatccggaggccagtagcaccaggatatgtcttaaagagctgggaacctttgctcaaagctccatcgcccttcaccatcagtacaaccccaagtttcagaccctgttccaaccctgtaacttgatgggagctatgcagctgattgaagacttcagcacacatgtcagcattgactgcagccctcataaaactgtcaagaagactgccaatgaatttccctgtttgccaaagcaagtggcttggatcctggccacaagcaaggttttcatgtatccagagttacttccagtgtgttccctgaaggcaaagaatccccaggataagatcctcttcaccaaggctgaggacaatttgttagctttaggactgaagcattttgaagggactgagtttcttaaccctctaatcagcaagtaccttctaacctgcaagactgcccgccaactgacagtgagaatcaagaacctcaacatgaacagagctcctgacaacatcattaaattttataagaagaccaaacagctgccagtcctaggaaaatgctgtgaagagatccagccacatcagtggaagccacctatagagagagaagaacaccggctcccattctggttaaaggccagtctgccatccatccaggaagaactgcggcacatggctgatggtgctagagaggtaggaaatatgactggaaccactgagatcaactcagatcaaggcctagaaaaagacaactcagagttggggagtgaaactcggtacccactgctattgcctaagggtgtagtcctgaaactgaagccagttgccgaccgtttccccaagaaggcttggagacagaagcgttcatcagtcctgaaacccctccttatccaacccagcccctctctccagcccagcttcaaccctgggaaaacaccagcccaatcaactcattcagaagcccctccgagcaaaatggtgctccggattcctcacccaatacagccagccactgttttacagacagttccaggtgtccctccactgggggtcagtggaggtgagagttttgagtctcctgcagcactgcctgctatgccccctgaggccaggacaagcttccctctgtctgagtcccagactttgctctcttctgcccctgtgcccaaggtaatgatgccctcccctgcctcttccatgtttcgaaagccatatgtgagacggagaccctcaaaaagaaggggagccagggcctttcgctgtatcaaacctgcccctgttatccaccctgcatctgttatcttcactgttcctgctaccactgtgaagattgtgagccttggcggtggctgtaacatgatccagcctgtcaatgcggctgtggcccagagtccccagactattcccatcgccaccctcttggttaaccctacttccttcccctgtccattgaaccagccccttgtggcctcctctgtctcacccttaattgtttctggcaattctgtgaatcttcctataccatccacccctgaagataaggcccacatgaatgtggacattgcttgtgctgtggctgatggggaaaatgcctttcagggcctagaacccaaattagagccccaggaactatctcctctctctgctactgttttccccaaagtggaacatagcccagggcctccaccagtcgataaacagtgccaagaaggattgtcagagaacagtgcctatcgctggaccgttgtgaaaacagaggagggaaggcaagctctggagccgctccctcagggcatccaggagtctctaaacaactcttcccctggggatttagaggaagttgtcaagatggaacctgaagatgctacagaggaaatcagtggatttctttgagctaggagaataagagtctggagactgggagccttcacttcggcctccgattggtggcgcatagggtgtaaccaataggaaacccctaaagggtacttaaaccccagattttgcaactggggctcttgagcagcttgctttagcctgctcccactctgtggaatatacttttgcttcaataaatctgtgcttttattgcttc

SEQ ID NO: 1641 - DNA, 2927 bp, Homo sapiens
  source 1..2927: mol_type = genomic DNA
cgcgtacgggatggctggctcgcaggacggccgaaggtggtggttggtgggagcagccagcgacgagcccgtagacactcgtacgcgtgcgggctgacgtgcgcgctacatggccggagtcgggcgaagcgggggaccgtggggaagaacgcgaggagggaggagtgggaggttgggggtgtcgctaggcgcccttagctccctccctctggaggagctgccgcggccactctgctgccgccgctgccgccgccattttgggttcgctttgcgaggggaaacgatcccagtgtcggttgcgggatccgcctcctctcagtttgcccctttagccctccacctttcccttctcctctctcgcatttccgccagtcggcttacccgctggccgcctcctgacaagcgggagggatccgcggtggacccagggaagcggaggagcctggcggccaccccctcttcctcacttccctgtactctcatcgctctcggcctccgacacgaaaaggaagcaaatgagctgatggaagatctgtttgaaactttccaagatgagatgggattctccaacatggaagatgatggcccagaagaggaggagcgtgtggctgagcctcaagctaactttaacacccctcaagctctacggtttgaggaactactggccaacctactaaatgaacaacatcagatagcgaaggaactatttgaacagctgaagatgaagaaaccttcagccaaacagcagaaggaggtagagaaggttaaaccccagtgtaaggaagttcatcagaccctgattctggacccagcacaaaggaagagactccagcagcagatgcagcagcatgttcagctcttgacacaaatccaccttcttgccacctgcaaccccaatctcaatccggaggccagtagcaccaggatatgtcttaaagagctgggaacctttgctcaaagctccatcgcccttcaccatcagtacaaccccaagtttcagaccctgttccaaccctgtaacttgatgggagctatgcagctgattgaagacttcagcacacatgtcagcattgactgcagccctcataaaactgtcaagaagactgccaatgaatttccctgtttgccaaagcaagtggcttggatcctggccacaagcaaggttttcatgtatccagagttacttccagtgtgttccctgaaggcaaagaatccccaggataagatcctcttcaccaaggctgaggacaacaagtaccttctaacctgcaagactgcccgccaactgacagtgagaatcaagaacctcaacatgaacagagctcctgacaacatcattaaattttataagaagaccaaacagctgccagtcctaggaaaatgctgtgaagagatccagccacatcagtggaagccacctatagagagagaagaacaccggctcccattctggttaaaggccagtctgccatccatccaggaagaactgcggcacatggctgatggtgctagagaggtaggaaatatgactggaaccactgagatcaactcagatcaaggcctagaaaaagacaactcagagttggggagtgaaactcggtacccactgctattgcctaagggtgtagtcctgaaactgaagccagttgccgaccgtttccccaagaaggcttggagacagaagcgttcatcagtcctgaaacccctccttatccaacccagcccctctctccagcccagcttcaaccctgggaaaacaccagcccaatcaactcattcagaagcccctccgagcaaaatggtgctccggattcctcacccaatacagccagccactgttttacagacagttccaggtgtccctccactgggggtcagtggaggtgagagttttgagtctcctgcagcactgcctgctatgccccctgaggccaggacaagcttccctctgtctgagtcccagactttgctctcttctgcccctgtgcccaaggtaatgatgccctcccctgcctcttccatgtttcgaaagccatatgtgagacggagaccctcaaaaagaaggggagccagggcctttcgctgtatcaaacctgcccctgttatccaccctgcatctgttatcttcactgttcctgctaccactgtgaagattgtgagccttggcggtggctgtaacatgatccagcctgtcaatgcggctgtggcccagagtccccagactattcccatcgccaccctcttggttaaccctacttccttcccctgtccattgaaccagccccttgtggcctcctctgtctcacccttaattgtttctggcaattctgtgaatcttcctataccatccacccctgaagataaggcccacatgaatgtggacattgcttgtgctgtggctgatggggaaaatgcctttcagggcctagaacccaaattagagccccaggaactatctcctctctctgctactgttttccccaaagtggaacatagcccagggcctccaccagtcgataaacagtgccaagaaggattgtcagagaacagtgcctatcgctggaccgttgtgaaaacagaggagggaaggcaagctctggagccgctccctcagggcatccaggagtctctaaacaactcttcccctggggatttagaggaagttgtcaagatggaacctgaagatgctacagaggaaatcagtggatttctttgagctaggagaataagagtctggagactgggagccttcacttcggcctccgattggtggcgcatagggtgtaaccaataggaaacccctaaagggtacttaaaccccagattttgcaactggggctcttgagcagcttgctttagcctgctcccactctgtggaatatacttttgcttcaataaatctgtgcttttattgcttcattgtttca

SEQ ID NO: 1642 - DNA, 2245 bp, Homo sapiens
  source 1..2245: mol_type = genomic DNA
agcgcagtatggcgggcggggcccgggaggtgctcacactgcagttgggacattttgccggtttcgtgggcgcgcactggtggaaccagcaggatgctgcgctgggccgagcgaccgattccaaggagcccccgggagagctgtgccccgacgtcctgtatcgtacgggccggacgctgcacggccaggagacctacacgccgcgactcatcctcatggatctgaagggtagtttgagctccctaaaagaggaaggtggactctacagggacaaacagttggatgctgcaatagcatggcaggggaagctcaccacacacaaaggttcctcaccactccccaccgctacaactccaaaaccacttatccctacagaggccagcatcagggtctggtcagacttcctcagagtccatctccatccccggagcatctgtatgattcagaagtacaaccacgatggggaagcaggtcggctggaggcttttggccaaggggaaagtgtcctaaaggaacccaagtaccaggaagagctggaggacaggctgcatttctacgtggaggaatgtgactacttgcagggcttccagatcctgtgtgacctgcacgatggcttctctggggtaggcgcgaaggcggcagagctgctacaagatgaatattcagggcggggaataataacctggggcctgctacctggtccctaccatcgtggggaggcccagagaaacatctatcgtctattaaacacagcttttggtctcgtgcacctgactgctcacagctctcttgtctgccccttgtccttgggtgggagcctgggcctgcgacccgagccacctgtcagcttcccttacctgcattatgatgccactctgcccttccactgcagtgccatcctggctacagccctggacacagtcactgttccttatcgcctgtgttcctctccagtttccatggttcatctggctgacatgctgagcttctgtgggaaaaaggtggtgacagcaggagcaatcatccctttccccttggctccaggccagtcccttcctgattccctgatgcagtttggaggagccaccccatggaccccactgtctgcatgtggggagccttctggaacacgttgctttgcccagtcagtggtgctgaggggtatagacagagcatgccacacaagccagctcaccccagggacacctccaccctctgcccttcatgcatgtaccactggggaagaaatcttggctcagtatttacaacagcagcagcctggagtcatgagttcttcccatctgctgctgactccctgcagggtggctcctccttacccccacctcttctcaagctgcagtccaccggcagtggagagcatcccagtgtttggggcactgtgttcctcttcgtccctgcaccagaccctggaagccttggccagagacctcaccaaactcgacttgcggcgctgggccagcttcatggatgctggagtggagcacgatgacgtagcagagctgctgcaggagctacaaagcctggcccagtgctaccagggtggtgacagcctcgtggactaaagttcccagtgtgggagaaaggagctagtttgcaataaaaacagctggatgcaggagcccagtgtcttcatgcagaggagctcaatgtcgcgggactagctacaccaacatatgcactttttacatttagaaacactgtgattagaccacagaacaataaatatgtgccatcagaccaaaaaaaagtagagaaaggagctgaactccactctcgatgctacttacagaggacatctgtaaagtcttcataaaagaccttgaatgatgcctaggatggcagagcccctgggtcctactccatcctccagcctttgtccttgtcctggcctcctgctctccagatctgtaaactgggctcaaggactgtacaagcagagtacaactacccgcctccccggtgccagggcgcctgttgggtttggtcctgtgtagatgattcccagagtctcattcatccagctcctcttcagacagaaggtccccatggtcagacagctggtctgcattgctggtactggttgcatcatcctcatcctcagagctggcttcacaggcagtgtggaagagctgcatgagttctcgaaaatggtgggaaacctaagaaaggaggagggctgtattcactgatccttagtaacatgttaacatttatgaagcactat

SEQ ID NO: 1643 - DNA, 2503 bp, Homo sapiens
  source 1..2503: mol_type = genomic DNA
gccgactccaagcaagtttgtcggccttggggagtctggccccgttcctagtgctggagggggaagttgttgcctttcctgctccgtgggccggccccctctccctccagacccacctgggcatagtggacgcgggcttacccagcctccatgccaagtctagggggtcccagcgagtctgttgttaggggctttgggtcacaccctctgtggaattccttggcctgtgcagctcgggcctgccccccgaccttgctagggaggggtggagggtgaagctcccgggagctcattggcactagaggttctggccacgccctctccgcgagtccagtcccacgcgggatgaagagggcaccctccgccaagaggctgctgcgggacccgggtttcccctttccggcgccttccagcctcccaatcctcgggtctcgcctccctccgtctcctccctttcccctgtctgtctttccattggtccatgccgcccacgtgctccccggggctccgcaggcaggactgggccccggggcggtgcgctgggctacacctccctccccgcgccccgtcctctcccgccctacaggccctagcagggcaggcgggagtccgtagttcgtggtccttcgccggtgtccccggagcccagcggctgtggatggcagaagcccagagtgggactggtcagctgcaggagcagaagaaaggtcttctgatagccgtcagcgtctccgttgataaaatcatctcgcatttcggggccgcccggaacttggtgcagaaggcccagttgggtgatagccggctgagcccggatgtggggcacctggtgctgaccaccctctgcccggccctccacgccctggtggcggacgggctgaagcctttccggaaggacctcatcaccgggcagcgcaggagcagcccctggagcgtggtggaggcgtcggtgaagccaggctccagcacccgctcccttggaaccctgtatagccaggtcagccgtctagccccgctgagcagcagccgtagccgcttccatgcctttatcctgggcctcctcaacaccaagcagttggagctgtggttttccagtctccaggaagatgcaggcctgctctccctcctgtacctgccaacaggatttttctccctggcccgcggtggttgtccctccctgtccacagagctgctgctcctgctgcagccattgtcggtgctcactttccacctggacctgctctttgagcaccaccaccacctgcccctgggcccacctcaggcccctgcccctccaggcccacctccagctctgcagcagactatgcaagccatgctgcactttgggggccggctggcccagagccttcgggggacttccaaggaagctgcttcagacccctctgactctccaaaccttcccacaccagggagctggtgggagcagttgacccaggcctcccgggtctatgcctctgggggcactgagggctttcctctttcccgatgggcaccggggcgtcatgggactgcagctgaagaaggtgcacaggagagacccctgcccacagatgagatggcaccaggcaggggcctctggttgggaagactatttggagtgcctgggggccccgcagaaaatgagaatggagccctaaagtccaggagaccatctagctggctgcccccgacagtgagtgtgttggctcttgtgaagcggggggcacctcccgagatgccttctcctcaggagcttgaggcctcagcacccaggatggtgcaaacccatagggcagtgcgggctctctgtgatcacactgctgcaagacctgaccagttgagcttccggcgtggggaagtgctgcgtgtcatcaccacagtggatgaggactggctccgctgtgggcgggatggcatggagggtctggtgcctgtggggtatacctcccttgttctgtagccctgggaccctttcctgcgtatgtgtctccttcctgtcacctgggaatggaatggccagtgaacaccatcccagaagcattttccctctgcaaaatgacgtttcttcccacgtctgtttctgctaatatttaaaataaactttccttcttccctcctatacccacctgtaaggtgaaatctgctcttcttccaaatatataaaaaaggaattgccctccaggtaatccctttcctttttcccgtctatataagggaatgtcttccttcctatctatctgcaaaatggaaatctagacctccttcttcatccataagtggactgtgccagtacaatacatgcctcagcccccaagcctagaaggacctctagtctccttcctgtgtggaatcttccccactccatccctcccaagttgcctgtattgataatgtactcactcatgctgtactaggtgctgaagcctggacacccttggtgggtgggcctgtggtgatggtttgcatccttcctcctttgtcccaataaagtatgggagttgaa

SEQ ID NO: 1644 - DNA, 1968 bp, Homo sapiens
  source 1..1968: mol_type = genomic DNA
cgccctacaggccctagcagggcaggcgggaggtgagcgcggccatcccgctcccggagttccgggatcctggagtccgtagttcgtggtccttcgccggtgtccccggagcccagcggctgtggatggcagaagcccagagtgggactggtcagctgcaggagcagaagaaaggtcttctgatagccgtcagcgtctccgttgataaaatcatctcgcatttcggggccgcccggaacttggtgcagaaggcccagttgggtgatagccggctgagcccggatgtggggcacctggtgctgaccaccctctgcccggccctccacgccctggtggcggacgggctgaagcctttccggaaggacctcatcaccgggcagcgcaggagcagcccctggagcgtggtggaggcgtcggtgaagccaggctccagcacccgctcccttggaaccctgtatagccaggtcagccgtctagccccgctgagcagcagccgtagccgcttccatgcctttatcctgggcctcctcaacaccaagcagttggagctgtggttttccagtctccaggaagatgcaggcctgctctccctcctgtacctgccaacaggatttttctccctggcccgcggtggttgtccctccctgtccacagagctgctgctcctgctgcagccattgtcggtgctcactttccacctggacctgctctttgagcaccaccaccacctgcccctgggcccacctcaggcccctgcccctccaggcccacctccagctctgcagcagactatgcaagccatgctgcactttgggggccggctggcccagagccttcgggggacttccaaggaagctgcttcagacccctctgactctccaaaccttcccacaccagggagctggtgggagcagttgacccaggcctcccgggtctatgcctctgggggcactgagggctttcctctttcccgatgggcaccggggcgtcatgggactgcagctgaagaaggtgcacaggagagacccctgcccacagatgagatggcaccaggcaggggcctctggttgggaagactatttggagtgcctgggggccccgcagaaaatgagaatggagccctaaagtccaggagaccatctagctggctgcccccgacagtgagtgtgttggctcttgtgaagcggggggcacctcccgagatgccttctcctcaggagcttgaggcctcagcacccaggatggtgcaaacccatagggcagtgcgggctctctgtgatcacactgctgcaagacctgaccagttgagcttccggcgtggggaagtgctgcgtgtcatcaccacagtggatgaggactggctccgctgtgggcgggatggcatggagggtctggtgcctgtggggtatacctcccttgttctgtagccctgggaccctttcctgcgtatgtgtctccttcctgtcacctgggaatggaatggccagtgaacaccatcccagaagcattttccctctgcaaaatgacgtttcttcccacgtctgtttctgctaatatttaaaataaactttccttcttccctcctatacccacctgtaaggtgaaatctgctcttcttccaaatatataaaaaaggaattgccctccaggtaatccctttcctttttcccgtctatataagggaatgtcttccttcctatctatctgcaaaatggaaatctagacctccttcttcatccataagtggactgtgccagtacaatacatgcctcagcccccaagcctagaaggacctctagtctccttcctgtgtggaatcttccccactccatccctcccaagttgcctgtattgataatgtactcactcatgctgtactaggtgctgaagcctggacacccttggtgggtgggcctgtggtgatggtttgcatccttcctcctttgtcccaataaagtatgggagttg

SEQ ID NO: 1645 - DNA, 3403 bp, Homo sapiens
  source 1..3403: mol_type = genomic DNA
cgccgggcggggaccgtgggagccgcggacaagcccaaggccggagcggttccaggaggaccctggtctgcacctgtggttgccaggtaggtggatgtgagagaccctacccttctggttctctagaagccatcccatcgccgctagcatcatgctgtcccctcagagagctttactctgcaacctcaaccacatccacctccagcacgtctccctgggcctgcacttgtcccgccgtcctgagctacaggaggggcctttgagcacaccccctcctccaggagacactgggggcaaggagagcaggggcccctgcagtggcaccctggtggacgccaattccaacagcccagctgtgccctgccggtgctgccaggagcacggtccgggcctagaaaaccggcaggacccgtcacaggaggaagagggggctgcctctccctcagacccaggctgctcctcctcactcagctcctgctcagatcttagccccgatgagtcccctgtctcagtctacttgcgggacctccctggtgatgaggatgcccaccctcagcccagtatcatccccctggagcagggctccccactggcttcagcaggccctggcacctgctcaccggacagcttctgctgctctcctgattcctgctccggagcttcttcttcacccgatcctggcctggactcgaactgcaacgccctgaccacctgccaggacgtcccttccccaggcttggaggaagaggacgagagggcggagcaggatctccctacctctgagctcttagaggcggatgatgggaaaatcgacgctgggaaaacggagcccagttggaagattaacccaatttggaaaattgacacagagaaaactaaagctgaatggaaaaccactgaaaacaataacactggttggaaaaacaacgggaatgttaactctagctggaaaagtgaacctgaaaaattcgactctggttggaaaaccaacacaagaataactgattctggctcgaaaacagatgcagggaaaattgatggaggatggagaagtgacgtcagcgaggagccggtgccccaccggacaatcacgtccttccacgagctggcccagaagcgcaagcggggcccagggctgccccttgtcccgcaggcgaagaaagatcgcagtgactggctcatagtcttctcgcccgacaccgagctccccccctcggggtcgccgggcggctcctcggcacctcctcgggaagtcaccaccttcaaggaactccggtcccgaagccgggccccagccccgccagtcccgcctcgagaccccccagttggctgggctttggtcccgccccggcccccacccccgcctgtccctccccgaaggaagaagaaccgacctggactgcagcccatagcggaggggcagtccgaggagggccgggctgtcagcccagcggctggcgaggaggccccagccgcgaaggagccgggcgcgcaggccggcctggaggtccgtagttcgtggtccttcgccggtgtccccggagcccagcggctgtggatggcagaagcccagagtgggactggtcagctgcaggagcagaagaaaggtcttctgatagccgtcagcgtctccgttgataaaatcatctcgcatttcggggccgcccggaacttggtgcagaaggcccagttgggtgatagccggctgagcccggatgtggggcacctggtgctgaccaccctctgcccggccctccacgccctggtggcggacgggctgaagcctttccggaaggacctcatcaccgggcagcgcaggagcagcccctggagcgtggtggaggcgtcggtgaagccaggctccagcacccgctcccttggaaccctgtatagccaggtcagccgtctagccccgctgagcagcagccgtagccgcttccatgcctttatcctgggcctcctcaacaccaagcagttggagctgtggttttccagtctccaggaagatgcaggcctgctctccctcctgtacctgccaacaggatttttctccctggcccgcggtggttgtccctccctgtccacagagctgctgctcctgctgcagccattgtcggtgctcactttccacctggacctgctctttgagcaccaccaccacctgcccctgggcccacctcaggcccctgcccctccaggcccacctccagctctgcagcagactatgcaagccatgctgcactttgggggccggctggcccagagccttcgggggacttccaaggaagctgcttcagacccctctgactctccaaaccttcccacaccagggagctggtgggagcagttgacccaggcctcccgggtctatgcctctgggggcactgagggctttcctctttcccgatgggcaccggggcgtcatgggactgcagctgaagaaggtgcacaggagagacccctgcccacagatgagatggcaccaggcaggggcctctggttgggaagactatttggagtgcctgggggccccgcagaaaatgagaatggagccctaaagtccaggagaccatctagctggctgcccccgacagtgagtgtgttggctcttgtgaagcggggggcacctcccgagatgccttctcctcaggagcttgaggcctcagcacccaggatggtgcaaacccatagggcagtgcgggctctctgtgatcacactgctgcaagacctgaccagttgagcttccggcgtggggaagtgctgcgtgtcatcaccacagtggatgaggactggctccgctgtgggcgggatggcatggagggtctggtgcctgtggggtatacctcccttgttctgtagccctgggaccctttcctgcgtatgtgtctccttcctgtcacctgggaatggaatggccagtgaacaccatcccagaagcattttccctctgcaaaatgacgtttcttcccacgtctgtttctgctaatatttaaaataaactttccttcttccctcctatacccacctgtaaggtgaaatctgctcttcttccaaatatataaaaaaggaattgccctccaggtaatccctttcctttttcccgtctatataagggaatgtcttccttcctatctatctgcaaaatggaaatctagacctccttcttcatccataagtggactgtgccagtacaatacatgcctcagcccccaagcctagaaggacctctagtctccttcctgtgtggaatcttccccactccatccctcccaagttgcctgtattgataatgtactcactcatgctgtactaggtgctgaagcctggacacccttggtgggtgggcctgtggtgatggtttgcatccttcctcctttgtcccaataaagtatgggagttgaa

SEQ ID NO: 1646 - DNA, 3114 bp, Homo sapiens
  source 1..3114: mol_type = genomic DNA
gctagtgcccctcccctcccgctctgtgccccgccgggcggggaccgtgggagccgcggacaagcccaaggccggagcggttccaggaggaccctggtctgcacctgtggttgccaggtaggtggatgtgagagaccctacccttctggttctctagaagccatcccatcgccgctagcatcatgctgtcccctcagagagctttactctgcaacctcaaccacatccacctccagcacgtctccctgggcctgcacttgtcccgccgtcctgagctacaggaggggcctttgagcacaccccctcctccaggagacactgggggcaaggagagcaggggcccctgcagtggcaccctggtggacgccaattccaacagcccagctgtgccctgccggtgctgccaggagcacggtccgggcctagaaaaccggcaggacccgtcacaggaggaagagggggctgcctctccctcagacccaggctgctcctcctcactcagctcctgctcagatcttagccccgatgagtcccctgtctcagtctacttgcgggacctccctggtgatgaggatgcccaccctcagcccagtatcatccccctggagcagggctccccactggcttcagcaggccctggcacctgctcaccggacagcttctgctgctctcctgattcctgctccggagcttcttcttcacccgatcctggcctggactcgaactgcaacgccctgaccacctgccaggacgtcccttccccaggcttggaggaagaggacgagagggcggagcaggatctccctacctctgagctcttagaggcggatgatgggaaaatcgacgctgggaaaacggagcccagttggaagattaacccaatttggaaaattgacacagagaaaactaaagctgaatggaaaaccactgaaaacaataacactggttggaaaaacaacgggaatgttaactctagctggaaaagtgaacctgaaaaattcgactctggttggaaaaccaacacaagaataactgattctggctcgaaaacagatgcagggaaaattgatggaggatggagaagtgacgtcagcgaggagccggtgccccaccggacaatcacgtccttccacgagctggcccagaagcgcaagcggggcccagggctgccccttgtcccgcaggcgaagaaagatcgcagtgactggctcatagtcttctcgcccgacaccgagctccccccctcggggtcgccgggcggctcctcggcacctcctcgggaagtcaccaccttcaaggaactccggtcccgaagccgggccccagccccgccagtcccgcctcgagaccccccagttggctgggctttggtcccgccccggcccccacccccgcctgtccctccccgaaggaagaagaaccgacctggactgcagcccatagcggaggggcagtccgaggagggccgggctgtcagcccagcggctggcgaggaggccccagccgcgaaggagccgggcgcgcaggccggcctggaggtccgtagttcgtggtccttcgccggtgtccccggagcccagcggctgtggatggcagaagcccagagtgggactggtcagctgcaggagcagaagaaaggtcttctgatagccgtcagcgtctccgttgataaaatcatctcgcatttcggggccgcccggaacttggtgcagaaggcccagttgggtgatagccggctgagcccggatgtggggcacctggtgctgaccaccctctgcccggccctccacgccctggtggcggacgggctgaagcctttccggaaggacctcatcaccgggcagcgcaggagcagcccctggagcgtggtggaggcgtcggtgaagccaggctccagcacccgctcccttggaaccctgtatagccaggtcagccgtctagccccgctgagcagcagccgtagccgcttccatgcctttatcctgggcctcctcaacaccaagcagttggagctgtggttttccagtctccaggaagatgcagggagctggtgggagcagttgacccaggcctcccgggtctatgcctctgggggcactgagggctttcctctttcccgatgggcaccggggcgtcatgggactgcagctgaagaaggtgcacaggagagacccctgcccacagatgagatggcaccaggcaggggcctctggttgggaagactatttggagtgcctgggggccccgcagaaaatgagaatggagccctaaagtccaggagaccatctagctggctgcccccgacagtgagtgtgttggctcttgtgaagcggggggcacctcccgagatgccttctcctcaggagcttgaggcctcagcacccaggatggtgcaaacccatagggcagtgcgggctctctgtgatcacactgctgcaagacctgaccagttgagcttccggcgtggggaagtgctgcgtgtcatcaccacagtggatgaggactggctccgctgtgggcgggatggcatggagggtctggtgcctgtggggtatacctcccttgttctgtagccctgggaccctttcctgcgtatgtgtctccttcctgtcacctgggaatggaatggccagtgaacaccatcccagaagcattttccctctgcaaaatgacgtttcttcccacgtctgtttctgctaatatttaaaataaactttccttcttccctcctatacccacctgtaaggtgaaatctgctcttcttccaaatatataaaaaaggaattgccctccaggtaatccctttcctttttcccgtctatataagggaatgtcttccttcctatctatctgcaaaatggaaatctagacctccttcttcatccataagtggactgtgccagtacaatacatgcctcagcccccaagcctagaaggacctctagtctccttcctgtgtggaatcttccccactccatccctcccaagttgcctgtattgataatgtactcactcatgctgtactaggtgctgaagcctggacacccttggtgggtgggcctgtggtgatggtttgcatccttcctcctttgtcccaataaagtatgggagttg

SEQ ID NO: 1647 - DNA, 1513 bp, Homo sapiens
  source 1..1513: mol_type = genomic DNA
gaagtgggggaggaggaggaggagttggaaggggaggaggaagagggggagcaggaagaggggcagaaggaagaagaagagggggaggagaaagagatagaagagtaagaggagggggaagaaagacaaggggaaggggaggaggaggaggacggggaggagcttcgccgcggcctgctccgcccagccggggtcggtggccgcatggcttcggtctcctctgcgaccttctcgggccacggggctcggtccctactgcagttcctgcggctggtagggcagctcaagagagtcccacgaactggctgggtatacagaaatgtccagaggccggagagcgtttcagatcacatgtaccggatggcagttatggctatggtgatcaaagatgaccgtcttaacaaagaccgagaagctatgaagcagataacccagctcctaccagaggacctcagaaaggagctctatgaactttgggaagagtacgagacccaatctagtgcagaagccaaatttgtgaagcagctagaccaatgtgaaatgattcttcaagcatctgaatatgaagaccttgaacacaaacctgggagactgcaagacttctatgattccacagcaggaaaattcaatcaccctgagatagtccagcttgtttctgaacttgaggcagaaagaagcactaacatagctgcagctgccagtgagccacactcctgagacactctctaaattgctgcactcctgtaacaaacattatttttccatttcattgtattgtgttttgccattgttggtctgttgatttccctagatgtgagtctgtttgttttcaattgtctgaacttcagcaagaaatgtgatacaacttgggcactaaaagaagccacagaacaggaagcggtcatgaaagtgccatggatgaacactggaggtggcagtgcctgtttatgaactaaataaataaatattaaacacctaaaatattagaatatttattggagatttaaaatcatcttattctgacttaattaccgatatccccgaaggctaggttcattgaataatagaaaatttcattatgattgcttttaagaacagattcttcagctgatttagtgataagaatccagaaaagaaaatgtactagtgatgtattctctccccagatgaaattgctgccttattcagatttactctcttgagccagattttgaatttcactgcagactgcttcagacttctaatcataggcttgtaaacctactaataggctctgcccctcttcccaatactttttgtcatttagagatataaaccggggcatataaaaatgcaacttgtattcctttgtatatttttccctgtctgacttataaatcttgagacctttattgtaaaagcatgtatcatcaggtgagaaatataaataggaactggggtcattgagcctcaggtagggaatatatcaacccgatttcttcctctcttttcccttttataggataaataatcc

SEQ ID NO: 1648 - DNA, 2147 bp, Homo sapiens
  source 1..2147: mol_type = genomic DNA
aggtaaccagaagcggctagtggcggctgcctgcgtccccaaccccctccgcgcagcgctcgcgacacgcgtgccaggagtgggagcgagcggcggggccagctgcgttctgagcctgggcgcagctgccatctgctctgggaagcaccagggtgtccccgccgccctcagctcgaagtcagccaccatggaggcgcaggcacaaggtttgttggagactgaaccgttgcaaggaacagacgaagatgcagtagccagtgctgacttctctagcatgctctctgaggaggaaaaggaagagttaaaagcagagttagttcagctagaagacgaaattacaacactacgacaagttttgtcagcgaaagaaaggcatctagttgagataaaacaaaaactcggcatgaacctgatgaatgaattaaaacagaacttcagcaaaagctggcatgacatgcagactaccactgcctacaagaaaacacatgaaaccctgagtcacgcagggcaaaaggcaactgcagctttcagcaacgttggaacggccatcagcaagaagttcggagacatgagacgaaagtaggcggtacgaaccctaatggaggcagttttgaggaggtcctcagctccacggcccatgccagtgcccagagcttggcaggaggctcccggcggaccaaggaggaggagctgcagtgctaagtccagccagcgtgcagctgcatccagaaaccggccactacccagcccatctctgcctgtgcttatccagataagaagaccaaaatcccgctgggaaaaacccaggccttgacattgttattcaaatggcccctccagaaagtttaatgatttccatttgtatttgtgttgatgatggaccacttgaccatcacatttcagtattcatagatgactgtcacattttaaaatgttcccacttgagcaggtacacaactggtcataattcctgtctgtgtaattcgatgtatatttttccaaacatgtagctattgtttgctttgatttttgcttggcctcctttatgatgtgcatgtccttgaaggctgaatgaacagtccctttcagttcagcagatcaacaggatggagctcttcatgactgtctccagcaataggatgatttactataaatttcatccaactacttgtgatctctctcacctacatcaattatgtatgttaatttcagcaattaaaagaattgattttaatgactttgaattcttaatttctttgtcttaaaagttgctagttatgattttacagatgcaattttaaatcaacttttagccaggtgcggcggctcacacctgtaatcccaactattttggatgccaaggtgagaggattgcttgaggccaggagttaaagatcagcctgggcaacacagaccctgtctctacaaaaaaagaaaaaaattagccagacatagtgttgcttgcctgtagtcccagctactctagaggctgaggcaggaggattgcatgagcctaggagttcgaaactgcagtgagctatgattgcaccactgcactactccagcctgggtgacagagtgggacactgtctccaaaaatagtaataataagtagtcaacttttactgctaatttggtgaacatgagagaggatatgaaaataaatattacctcagctatcctaggatgttaaaataatctccaattttaaaattctctccaatctacatacagtagtagttagtcagataaaggatatccaaaaaagagatagctagaaaatgggagaagcagagttctgcaacccctttcagtttgtaaattgttcacatgtatgaaaataactggtatttatcaatccactcagatttctgcactaacttttatcttatatatcatatgtatctcttttctttttctaaatgggaacatatatttgttattaggtggcagagatatagccttaagatatatttgtaaaatgcacactgaatagacatccaacctaaaaaaaatcactatttaaaaagcccatataatatatacatatttgttagcatgctaattgttcatgttttgtgtttattaaatagaagtgatatatatgacattttgaagtaaagcacatctgaaaaattctactcaaa

SEQ ID NO: 1649 - DNA, 1308 bp, Homo sapiens
  source 1..1308: mol_type = genomic DNA
ttggtttgggccaggtggactggaaggggcggaggtaaccagaagcggctagtggcggctgcctgcgtccccaaccccctccgcgcagcgctcgcgacacgcgtgccaggagtgggagcgagcggcggggccagctgcgttctgagcctgggcgcagctgccatctgctctgggaagcaccagggtgtccccgccgccctcagctcgaagtcagccaccatggaggcgcaggcacaaggtttgttggagactgaaccgttgcaaggaacagacgaagatgcagtagccagtgctgacttctctagcatgctctctgaggaggaaaaggaagagttaaaagcagagttagttcagctagaagacgaaattacaacactacgacaagttttgtcagcgaaagaaaggcatctagttgagataaaacaaaaactcggcatgaacctgatgaatgaattaaaacagaacttcagcaaaagctggcatgacatgcagactaccactgcctacaagaaaacacatgaaaccctgagtcacgcagggcaaaaggcaactgcagctttcagcaacgttggaacggccatcagcaagaagttcggagacatgagttactccattcgccattccataagtatgcctgctatgagacgaaagtaggcggtacgaaccctaatggaggcagttttgaggaggtcctcagctccacggcccatgccagtgcccagagcttggcaggaggctcccggcggaccaaggaggaggagctgcagtgctaagtccagccagcgtgcagctgcatccagaaaccggccactacccagcccatctctgcctgtgcttatccagataagaagaccaaaatcccgctgggaaaaacccaggccttgacattgttattcaaatggcccctccagaaagtttaatgatttccatttgtatttgtgttgatgatggaccacttgaccatcacatttcagtattcatagatgactgtcacattttaaaatgttcccacttgagcaggtacacaactggtcataattcctgtctgtgtaattcgatgtatatttttccaaacatgtagctattgtttgctttgatttttgcttggcctcctttatgatgtgcatgtccttgaaggctgaatgaacagtccctttcagttcagcagatcaacaggatggagctcttcatgactgtctccagcaataggatgatttactataaatttcatccaactacttgtgatctctctcacctacatcaattatgtatgttaatttcagcaattaaaagaattgattttaatga

SEQ ID NO: 1650 - DNA, 1175 bp, Homo sapiens
  source 1..1175: mol_type = genomic DNA
ctgcaacaagttaagctgaagaccgaagcaagagctggttcaggtggcagccacagcagcctcagggacctcagcaactatggcctcctgcccagactctgataatagctgggtgcttgctggctccgagagcctgccagtggagacactgggcccggcatccaggatggacccagaatctgagagagccctgcaggcccctcacagcccctccaagacagatgggaaagaattagctgggaccatggatggagaagggacgctcttccagactgaaagccctcagtctggcagcattctaacagaggagactgaggtcaagggcaccctggaaggtgatgtttgtggtgtggagcctcctggcccaggagacacagtagtccagggagacctgcaggagaccaccgtggtgacaggcctgggaccagacacacaggacctggaaggccagagccctccacagagcctgccttcaacccccaaagcagcttggatcagggaggagggccgctgctccagcagtgacgatgacaccgacgtggacatggagggtctgcggagacggcggggccgggaggccggcccacctcagcccatggtgcccctggctgtggagaaccaggctgggggtggcctctcagagtctgagactgggcccatggaggaagtggagcggcaggtcctcccagaccccgaggtgctggaagctgtgggggacaggcaggatgggctaagggaacagctgcaggccccagtgcctcctgacagtgtccccagcctgcaaaacatgggtcttctgctggacaagctggccaaggagaaccaggacatccggctgctgcaggcccagctgcaggtgggcacaggcaggaggggctgggctagggtaacccacctaggccaggcgtctgtcctagcatcctcccccaaaaggaatgtttcctatttacccacacatcctgaccctcccctctcccactatagtcagggcgtcttcccagttcttggttcacatcccttgtgctaaggtttgggccagggctggcatacctgttccacatggtacatgaaacatacatggtatcacctgtgattgattggtgtggtctgcctggagcactgtgtggaaaaggatttaaagaacatgccaggtgccatgatcagttaacactgtt

SEQ ID NO: 1651 - DNA, 3212 bp, Homo sapiens
  source 1..3212: mol_type = genomic DNA
aagttaagctgaagaccgaagcaagagctggttcaggtggcagccacagcagcctcagggacctcagcaactatggcctcctgcccagactctgataatagctgggtgcttgctggctccgagagcctgccagtggagacactgggcccggcatccaggatggacccagaatctgagagagccctgcaggcccctcacagcccctccaagacagatgggaaagaattagctgggaccatggatggagaagggacgctcttccagactgaaagccctcagtctggcagcattctaacagaggagactgaggtcaagggcaccctggaaggtgatgtttgtggtgtggagcctcctggcccaggagacacagtagtccagggagacctgcaggagaccaccgtggtgacaggcctgggaccagacacacaggacctggaaggccagagccctccacagagcctgccttcaacccccaaagcagcttggatcagggaggagggccgctgctccagcagtgacgatgacaccgacgtggacatggagggtctgcggagacggcggggccgggaggccggcccacctcagcccatggtgcccctggctgtggagaaccaggctgggggtgagggtgcaggcggggagctgggcatctccctcaacatgtgcctccttggggccctggttctgcttggcctgggggtcctcctcttctcaggtggcctctcagagtctgagactgggcccatggaggaagtggagcggcaggtcctcccagaccccgaggtgctggaagctgtgggggacaggcaggatgggctaagggaacagctgcaggccccagtgcctcctgacagtgtccccagcctgcaaaacatgggtcttctgctggacaagctggccaaggagaaccaggacatccggctgctgcaggcccagctgcaggcccaaaaggaagagcttcagagcctgatgcaccagcccaaagggctagaggaggagaatgcccagctccggggggctctgcagcagggcgaagccttccagcgggctctggagtcagagctgcagcagctgcgggcccggctccaggggctggaggccgactgtgtccggggcccagatggggtgtgcctcagtgggggtagaggcccacagggtgacaaggccatcagggagcaaggccccagggagcaggagccagaactcagcttcctgaagcagaaggaacagctggaggctgaggcacaggcattaaggcaagagttagagaggcagcgacggctgctggggtctgtacagcaggatctggagaggagcttgcaggatgccagccgcggggacccagctcatgctggcttggctgagctgggccacagattggcccagaaactgcagggcctggagaactggggccaggaccctggggtctctgccaatgcctcaaaggcctggcaccagaagtcccacttccagaattctagggagtggagtggaaaggaaaagtggtgggatgggcagagagaccggaaggctgagcactggaaacataagaaggaagaatctggccgggaaaggaagaagaactggggaggtcaggaggacagggagccagcaggaaggtggaaggagggcaggccaagggtggaggagtcggggagcaagaaggagggcaagcgacagggcccgaaggaacccccaaggaaaagtggtagcttccactcctctggagaaaagcagaagcaacctcggtggagggaagggactaaggacagccatgaccccctgccatcctgggcagagctgttgaggcccaagtaccgggcaccccagggctgctcaggtgtggacgagtgtgcccggcaggagggcctgactttctttggcacagagctagccccagtgcggcaacaggagctggcctctctgctaagaacatacttggcacggctgccctgggctgggcagctgaccaaggagctacccctctcacctgctttctttggtgaggatggcatcttccgtcatgaccgcctccgcttccgggattttgtggatgccctggaggacagcttggaggaggtggctgtgcaacagacaggtgatgatgatgaagtagatgactttgaggacttcatcttcagccacttctttggagacaaagcactgaagaagaggtcagggaagaaggacaagcactcacagagcccaagagctgcggggcccagggaggggcacagccatagccaccaccaccaccaccggggctgacaccctgccccacagggaatggccttggcctggcccagcccaagatcccagcgttatctaactcctggagggtggactctgtcctggcttgtttggtgtcctcagatatctttcacacagtagagcaaaatcaccagccctgcactgatgtcactttatgtagaaaaaggccttagctggacctgcgttgccgtctatgcaaatgcatgcaaatactccaggccctgggatgtgggcttgtgttttgtcactgtgaagggggagatgggagaggagcctgttttggggtggggtctggggaaggcaatctgattctgaagctaaagagctttcatcctcttgagtgtatgtccccatagtgggccccttgacccacatgctgaccggtgccttgggatttgactagagttgctggctcgaggcccagcacgaggacttaccctggggttttgttaggtttggaagcagctgtccctagggggtgaagtcccccccctttttttttttacccctgcttctcccacggcttcacctccctatgtgaactgtagactcagatcccaataaagtgctgttgcagctatgatgctaggtggtttctaagcacaggggacaccccacaccccctgcctgaatggatgggtccatcccaggcactggtacttgcccccttgttctgtatccccctttgcccttgccttgcccttccaacaaaccctaggcccttgagaagctgatacttctccttttgctcacagctgccttggccccacccctgggagatgtagcaaattgagtgtgggttttggagtctgagcctcaggctcaaatccaggccaagtgatcttgggcaagttaatctctgggaactttgggtttcttatcctcaaaaaaggcgatggaagggctggggaagtgattaaataaaagcaacgcaagaaaaa

SEQ ID NO: 1652 - DNA, 3144 bp, Homo sapiens
  source 1..3144: mol_type = genomic DNA
aaagggaagcctgcaacaagttaagctgaagaccgaagcaagagctggttcagcctgccagtggagacactgggcccggcatccaggatggacccagaatctgagagagccctgcaggcccctcacagcccctccaagacagatgggaaagaattagctgggaccatggatggagaagggacgctcttccagactgaaagccctcagtctggcagcattctaacagaggagactgaggtcaagggcaccctggaaggtgatgtttgtggtgtggagcctcctggcccaggagacacagtagtccagggagacctgcaggagaccaccgtggtgacaggcctgggaccagacacacaggacctggaaggccagagccctccacagagcctgccttcaacccccaaagcagcttggatcagggaggagggccgctgctccagcagtgacgatgacaccgacgtggacatggagggtctgcggagacggcggggccgggaggccggcccacctcagcccatggtgcccctggctgtggagaaccaggctgggggtgagggtgcaggcggggagctgggcatctccctcaacatgtgcctccttggggccctggttctgcttggcctgggggtcctcctcttctcaggtggcctctcagagtctgagactgggcccatggaggaagtggagcggcaggtcctcccagaccccgaggtgctggaagctgtgggggacaggcaggatgggctaagggaacagctgcaggccccagtgcctcctgacagtgtccccagcctgcaaaacatgggtcttctgctggacaagctggccaaggagaaccaggacatccggctgctgcaggcccagctgcaggcccaaaaggaagagcttcagagcctgatgcaccagcccaaagggctagaggaggagaatgcccagctccggggggctctgcagcagggcgaagccttccagcgggctctggagtcagagctgcagcagctgcgggcccggctccaggggctggaggccgactgtgtccggggcccagatggggtgtgcctcagtgggggtagaggcccacagggtgacaaggccatcagggagcaaggccccagggagcaggagccagaactcagcttcctgaagcagaaggaacagctggaggctgaggcacaggcattaaggcaagagttagagaggcagcgacggctgctggggtctgtacagcaggatctggagaggagcttgcaggatgccagccgcggggacccagctcatgctggcttggctgagctgggccacagattggcccagaaactgcagggcctggagaactggggccaggaccctggggtctctgccaatgcctcaaaggcctggcaccagaagtcccacttccagaattctagggagtggagtggaaaggaaaagtggtgggatgggcagagagaccggaaggctgagcactggaaacataagaaggaagaatctggccgggaaaggaagaagaactggggaggtcaggaggacagggagccagcaggaaggtggaaggagggcaggccaagggtggaggagtcggggagcaagaaggagggcaagcgacagggcccgaaggaacccccaaggaaaagtggtagcttccactcctctggagaaaagcagaagcaacctcggtggagggaagggactaaggacagccatgaccccctgccatcctgggcagagctgttgaggcccaagtaccgggcaccccagggctgctcaggtgtggacgagtgtgcccggcaggagggcctgactttctttggcacagagctagccccagtgcggcaacaggagctggcctctctgctaagaacatacttggcacggctgccctgggctgggcagctgaccaaggagctacccctctcacctgctttctttggtgaggatggcatcttccgtcatgaccgcctccgcttccgggattttgtggatgccctggaggacagcttggaggaggtggctgtgcaacagacaggtgatgatgatgaagtagatgactttgaggacttcatcttcagccacttctttggagacaaagcactgaagaagaggtcagggaagaaggacaagcactcacagagcccaagagctgcggggcccagggaggggcacagccatagccaccaccaccaccaccggggctgacaccctgccccacagggaatggccttggcctggcccagcccaagatcccagcgttatctaactcctggagggtggactctgtcctggcttgtttggtgtcctcagatatctttcacacagtagagcaaaatcaccagccctgcactgatgtcactttatgtagaaaaaggccttagctggacctgcgttgccgtctatgcaaatgcatgcaaatactccaggccctgggatgtgggcttgtgttttgtcactgtgaagggggagatgggagaggagcctgttttggggtggggtctggggaaggcaatctgattctgaagctaaagagctttcatcctcttgagtgtatgtccccatagtgggccccttgacccacatgctgaccggtgccttgggatttgactagagttgctggctcgaggcccagcacgaggacttaccctggggttttgttaggtttggaagcagctgtccctagggggtgaagtcccccccctttttttttttacccctgcttctcccacggcttcacctccctatgtgaactgtagactcagatcccaataaagtgctgttgcagctatgatgctaggtggtttctaagcacaggggacaccccacaccccctgcctgaatggatgggtccatcccaggcactggtacttgcccccttgttctgtatccccctttgcccttgccttgcccttccaacaaaccctaggcccttgagaagctgatacttctccttttgctcacagctgccttggccccacccctgggagatgtagcaaattgagtgtgggttttggagtctgagcctcaggctcaaatccaggccaagtgatcttgggcaagttaatctctgggaactttgggtttcttatcctcaaaaaaggcgatggaagggctggggaagtgattaaataaaagcaacgcaagaaaaatgcc

SEQ ID NO: 1653 - DNA, 7118 bp, Homo sapiens
  source 1..7118: mol_type = genomic DNA
gcctatcatttgaagacgttccttgaggaggtttgaaaaaaaacagctgacccttggctaacattacatgatttggagaaataattggaagtctaccacagggagactaaatgtaaaactccaatcagataaattacaacacggatgtggcccagattattcatcagcatggctacctgctaatgaatcattgtggcaggccacaactgttccatctaaccatcgaaataaccatatcaggagacacagtatagcttctgacagtggagacactggcattggaacttcctgttctgatagcgtggaagatcattcaacttcaagtggcacattatcttttaagcctagtcaatcattgattactcttcctactgcccatgtgatgccgtctaattccagcgcttcaatttccaaacttagggaatcattgacaccagatggctcaaaatggagtacaagcctcatgcaaacattgggaaaccacagtaggggggagcaggactcttccctagacatgaaggacttccggccacttcggaaatggtcatctttatccaaactcactgccccggataactgtggccagggtggcactgtatgcagagaagagtcaaggaatggtttggagaagatagggaaggctaaggctttaacatcacaactgaggacaattgggcctagctgtttacatgatagtatggagatgcttaggttagaggacaaggaaataaataaaaaacggtcatcaactctggactgcaagtataaatttgagagctgtagcaaggaggactttagagcctcttcctctactcttaggagacagcctgtagacatgacatatagtgccttacctgaaagcaagcccattatgacaagctcagaggcttttgaacctccaaaatatttaatgcttggtcaacaggcagtaggtggagttcccattcagccttccgtaaggactcagatgtggcttacagagcagctgcggacaaatcctttggaaggtagaaatacagaggattcttacagtttagctccttggcaacagcagcaaattgaagactttcgacaaggaagtgaaacaccaatgcaggttttgactggatcatctcgtcaaagttattcacctggctatcaggatttcagtaagtgggaatcaatgttgaaaataaaagaaggacttctaaggcagaaagaaattgtaatcgatcggcagaagcaacaaattacccacctgcatgagaggataagggataatgaattacgggctcaacatgccatgttaggacattatgtaaattgtgaggattcttatgtggctagtttgcagccacaatatgagaacacttcactccagacaccattttcagaggaatcagtttcccattcccaacaaggggaatttgagcaaaagcttgcatctactgagaaagaagttttacagcttaatgagtttctcaaacaaagactaagcctatttagtgaagagaagaagaaactagaggaaaaacttaaaactagagatcgatacatcagtagtctgaaaaagaaatgccagaaggaatctgaacaaaacaaagaaaagcagagaagaattgagaccttggaaaagtatctggctgatcttccaactctagatgatgtacagagtcagagtctacagctgcagattctggaagaaaaaaataagaatttacaagaggctttgatagatacagaaaaaaaacttgaagagatcaaaaagcagtgtcaagataaagagacacagttaatatgccagaaaaagaaagaaaaggagttagtaactaccgttcagagtttgcaacaaaaagtagaaagatgccttgaagatggaatccgccttcccatgttagatgcaaaacagcttcagaatgaaaatgataatctcagacaacaaaatgagactgctagtaagataatagacagccaacaagatgagattgacagaatgattttagaaattcagtctatgcaaggaaagctttctaaagagaaactgaccactcaaaagatgatggaagagctggaaaagaaagaaagaaatgtacagagattaacaaaagcattgcttgaaaaccaaagacaaacagatgagacatgctctttattggatcagggccaggaacctgaccaatctaggcagcagacagttctttccaaacggccactatttgatttgactgtgattgatcagctgttcaaggaaatgtcctgttgtttgtttgacttgaaagcattgtgtagtattcttaatcagcgtgctcagggcaaggagcctaatctttcattattactgggaataagatcaatgaactgttcagctgaagagactgagaatgaccacagcacagaaacactcactaaaaagctgtcagatgtgtgccagttacgaagagacattgatgaattaaggactacaatatcagaccgctatgctcaggacatgggagacaactgcattactcagtgatcaagtgttagtcccacagcaataatgacctgttgtttaaatgctgctgtgttatggagccataatggaaggttgcaagtgacatgacttgcacttagggattttttttctgtggatttgttttgttgaaggggagaagggaagtgaagagattttgaaggggcttatctaatcaggcaaaaagaaaaaaaatcaaattacctttggaaaatatgataaaatctacaaggaaaaaaatgtctatattctcaaactactgattgtaggaccaagctgtgaagagtacccttcacatgaaggagtaggattccttttaatcctatagctttgtgtgtttgtgtgtgcatgtatgtgtgttgttgtgtgtgtgtgcacgtgctttattcacaaatttataagggtttctagggtcagagcagagcttctgagaaaggcacacgctgtttattcttatatttctttcatatagaagcttgtgttgtactttgggattttcagtggctggctgaacaagagttcaaacagcaggcaagtgttgtcatggtagtacaggaggcaaaaccatttatattttgaacacttactgcactgataggatgtttgtggttgagctgattttagtactgtagataggtcagctgtttttccagagtgattgtggatttcccaagaggtgtgaaattttgacgtgatgctctttttccttagcattgtaatgtatgtgttacaagaaaggttaacataacttgaactaattttaacatgttccttactatttacaattttttatttatatgttttatatatatacatatataaatgtaaacaaagccatatataattaataaaggcattggatcattattataaaaggaagattaacaaagttaccctggaacaatagcttacttatccaaatctcaacatttacattttaacagttttgtatgtttcaaagttgaaactactgtaagagaaagccaatactatttatatctgaatcaacagtagcataaacattttttaattgagattgtattttaatcccttttgttaaagtacattaacaacagtttttcacaggatatgaacttggcgaaattagttcttaatctgaattacagggtattactatgaaatgcagttgattttgcagtagacgtacagtcatttaaacttccaaatgagtgttgtccatgtttctgttggtattttggaaggattatacattttattgccttcagcattgattatgttcttttgaatatacttagttttggcgaaagccttgtcctttgtaagttggtttgatcttgtgatgcaaccaagtctcatttaggtcaagactaaataagagatggaggggtagagggtgtgactcaagcaggataatattgatttgataaagagcatatcacatgcctgttttcttgccagataaagggcatagcacatgcctgttttcttatatactagaataaaggctctcctaggaaagatttttcttaaatatttaaaagtgaaaatgtgagacaaggccttcaaggagactacccaggaagatacacagtttaaaatgttggctatacagctctcaatagattattttatagttatagttgaataatcagttataatacactgtaaagaaatcagattttccttctgtttggtgtctgagtccttcctgctcttcttacttctgagaatctgggcactaagaaatcagtaagtacattgtagtgctcctgcatcccagagtccttaacctaaggagggtcttagtcactggtaagaacttggctttctaattatattcacttggtttttaacattagtagcttgacgataatcagggtatagtaaatttccaccaaaaatgtgatgcgaagaattctgccttggtcctttatggtaaaacagataataacgtctaaaatagatcagccacaagtgcagcaaatatttttacactctctttgaatagaatcccaaccaccctcccccatgattttagaaataaaggcttcctaaaataatagaacaaattggcaaacaatcactaattggaccagtaggttcttacttaaatatctctcctagatttttagtgtatgttttgggattttatgggtttatttatttttttttttttaagcagacgttacagtttgttttaatctactatagatacgtttttgttttttggcttagttggggataaaataatttatttgtaagttagctttctaaaacttagagaaagtaatttaattcacgtatcttaaaaataaaattccaaagttaaaaaatttctgacttagtaggaagttaacaaaactactgctgatgcatttcagtttccaaaatctgtaccctccccccataaaaaagggagttaagatgtgctagtttaagtagttagctgaattatagattgatcctcttaaaatctggagtttgtaaaggggcctacataaacagtagatagacttggagggattttgtgggggaattgaaactaatagtattctatctagtttgtcagtatttactttttgatttttatttttcagaaaattttcctttcccaggacaccctcttgtattagaatatcctcttctgtatcacattaaaaacagattttactgttagaccaaataagatgggcaaatagcaacactagagcatctcacccagtttgaactaggatgttcgtggaagttatgacaccaatatattcctgaaatgaaaattaacctaaattttaaagtgaatctatttgaaaatttacttagataatgaaacctcgttttaattgtgctttttgtgaatccaacacttgtttgcttagaaagtatcttatccagtattaatattttgttcttttgggttttaaagttgagcttattcagcctcaatcacattacagcaagcataaagtaacagttgactcaatgaaagacccaaattgcctgtacagataaaattcactgaatcaaaggcacaatagctatcttttcacttgagctcagaaaagtaaaatggcttaatttgaactattaattttcagtggcctctaattaaacaaaaacaaaaaaccacaaatactggctaggtaagatattcctgaggtcattttaaaagaagtgtggcacctaggattcaatatttaatgctaacagtattatattttagtgaaatttattttggtggtgacagtttattaaacctaattagacttctttcaatagcttgttgtagagacaatctcaagggctggaaagtgttgctaaaatgaatgtcatacatttctgatatactaaggagcttataaagtaattctttcatagtgcaagaattattaatttcttagaggatgtttttaaaggagctacttaattgggaaaatgttctttaaatatcagtaatagttcattaagtaacatagtagctaagaacatggactatattttcacagcatagttcagcttaggcacacctttagtttggattattggcattctcttacgtaggaattatatcattgtagatatgtaattatggtaataagcaattttcataaccatgctcactcagactatatcatttgaaactgccatgtttccatttttgacaattcatgttcacaaaacaacaggaacaatttcctatttggtataaagagcaaaatttccaactttgccccaaaatgccatgggtggcatattgccatatgattatatcatatatttaatcatgtatgggaaagattttggattttttttcttatttaaaaaagtgctaaatataagaatatagttttaaatcagcaagtctaataacactattgcagctgtacacagagagaaccttttgtgcctttttgcctgcagtaagcatttatttctattttacatgagttctaagaatgttgatgattattgcaccttgttcttctgtatataaacttgattaaggaatttttttttttaaagcaaggagccgttttttgttactaggtggataccttagtaaacatgaggggaattatcagatagatgtctttggagcccagccttccctgtgtagtgagctggaaactcctttagattgtattcattggtgtgtatgtatatgtacatatatgtataaatagttaaatacataaacataaaacttaacatcgcattgttgtgatgacaagaagtagtaaggtgctaggtggttacattaaaaagcacagcacagtgtataatcagtcactatgactggtggttttgtaagctgggttcagtttttgaaccacccagaatacctcatgtgtaaatacagtgttcatgacttaattgaaatacagttattgtttaaaaaaaaaaaaaaagaatgtgaagccactggttggcttatgccttctgatctatcattcttgcctctttttttgtaaaggggttttcttcttgttgttctgttttttaatagggtttacagctagaattttgaatgccaaagttctatttattaaattaagaaaaaagttttcaatgttaatggctagtatttttccactggactattgtttgttgatgttggaatttgtatttacagagaaataaatttttt

SEQ ID NO: 1654 - DNA, 7673 bp, Homo sapiens
  source 1..7673: mol_type = genomic DNA
gggagggcgtgagggattacccaagggaggggcgagtatcgcaaaataggccaagtcgctgccctctactcaactcgcagggcgggaggatggagacagagggatgcggcgggagggcgggacagcccagtcgccgccaaggaggcgaagcggggtcggggtagctcacccgccccccgcagtccccgccccccgcagtccccgccccgcgcggcgccgcgcacgcctgaagtcattgcccgaggccccgccccctcgcggccccagccccggctctggctctgccggcggagggggcggagagaacccgcagctgcaacttcgcctggagcctttgagcctgggctcagccggggatctagcagccgtcaccgccgagtcgccgcttccccggcgcgggcctcagcccagccggcttggccatggcaggcgccggcagtgcggcgaatctggcccctgcgctccccgcccgtagctgagcagccgttaaccagccatcccgcctttcctcctgcccgtgtcgccgaggcccacgctccgcgcaagtttccgccgccgaagaagcaggaggacggacgtgaggagtcgggcgtccctggcccacccggccctctcgcccgcgatgtgggggcgcttcctggctccggaggccagcggccgggatagccccggcggagcccgcagcttccctgccggcccagattattcatcagcatggctacctgctaatgaatcattgtggcaggccacaactgttccatctaaccatcgaaataaccatatcaggagacacagtatagcttctgacagtggagacactggcattggaacttcctgttctgatagcgtggaagatcattcaacttcaagtggcacattatcttttaagcctagtcaatcattgattactcttcctactgcccatgtgatgccgtctaattccagcgcttcaatttccaaacttagggaatcattgacaccagatggctcaaaatggagtacaagcctcatgcaaacattgggaaaccacagtaggggggagcaggactcttccctagacatgaaggacttccggccacttcggaaatggtcatctttatccaaactcactgccccggataactgtggccagggtggcactgtatgcagagaagagtcaaggaatggtttggagaagatagggaaggctaaggctttaacatcacaactgaggacaattgggcctagctgtttacatgatagtatggagatgcttaggttagaggacaaggaaataaataaaaaacggtcatcaactctggactgcaagtataaatttgagagctgtagcaaggaggactttagagcctcttcctctactcttaggagacagcctgtagacatgacatatagtgccttacctgaaagcaagcccattatgacaagctcagaggcttttgaacctccaaaatatttaatgcttggtcaacaggcagtaggtggagttcccattcagccttccgtaaggactcagatgtggcttacagagcagctgcggacaaatcctttggaaggtagaaatacagaggattcttacagtttagctccttggcaacagcagcaaattgaagactttcgacaaggaagtgaaacaccaatgcaggttttgactggatcatctcgtcaaagttattcacctggctatcaggatttcagtaagtgggaatcaatgttgaaaataaaagaaggacttctaaggcagaaagaaattgtaatcgatcggcagaagcaacaaattacccacctgcatgagaggataagggataatgaattacgggctcaacatgccatgttaggacattatgtaaattgtgaggattcttatgtggctagtttgcagccacaatatgagaacacttcactccagacaccattttcagaggaatcagtttcccattcccaacaaggggaatttgagcaaaagcttgcatctactgagaaagaagttttacagcttaatgagtttctcaaacaaagactaagcctatttagtgaagagaagaagaaactagaggaaaaacttaaaactagagatcgatacatcagtagtctgaaaaagaaatgccagaaggaatctgaacaaaacaaagaaaagcagagaagaattgagaccttggaaaagtatctggctgatcttccaactctagatgatgtacagagtcagagtctacagctgcagattctggaagaaaaaaataagaatttacaagaggctttgatagatacagaaaaaaaacttgaagagatcaaaaagcagtgtcaagataaagagacacagttaatatgccagaaaaagaaagaaaaggagttagtaactaccgttcagagtttgcaacaaaaagtagaaagatgccttgaagatggaatccgccttcccatgttagatgcaaaacagcttcagaatgaaaatgataatctcagacaacaaaatgagactgctagtaagataatagacagccaacaagatgagattgacagaatgattttagaaattcagtctatgcaaggaaagctttctaaagagaaactgaccactcaaaagatgatggaagagctggaaaagaaagaaagaaatgtacagagattaacaaaagcattgcttgaaaaccaaagacaaacagatgagacatgctctttattggatcagggccaggaacctgaccaatctaggcagcagacagttctttccaaacggccactatttgatttgactgtgattgatcagctgttcaaggaaatgtcctgttgtttgtttgacttgaaagcattgtgtagtattcttaatcagcgtgctcagggcaaggagcctaatctttcattattactgggaataagatcaatgaactgttcagctgaagagactgagaatgaccacagcacagaaacactcactaaaaagctgtcagatgtgtgccagttacgaagagacattgatgaattaaggactacaatatcagaccgctatgctcaggacatgggagacaactgcattactcagtgatcaagtgttagtcccacagcaataatgacctgttgtttaaatgctgctgtgttatggagccataatggaaggttgcaagtgacatgacttgcacttagggattttttttctgtggatttgttttgttgaaggggagaagggaagtgaagagattttgaaggggcttatctaatcaggcaaaaagaaaaaaaatcaaattacctttggaaaatatgataaaatctacaaggaaaaaaatgtctatattctcaaactactgattgtaggaccaagctgtgaagagtacccttcacatgaaggagtaggattccttttaatcctatagctttgtgtgtttgtgtgtgcatgtatgtgtgttgttgtgtgtgtgtgcacgtgctttattcacaaatttataagggtttctagggtcagagcagagcttctgagaaaggcacacgctgtttattcttatatttctttcatatagaagcttgtgttgtactttgggattttcagtggctggctgaacaagagttcaaacagcaggcaagtgttgtcatggtagtacaggaggcaaaaccatttatattttgaacacttactgcactgataggatgtttgtggttgagctgattttagtactgtagataggtcagctgtttttccagagtgattgtggatttcccaagaggtgtgaaattttgacgtgatgctctttttccttagcattgtaatgtatgtgttacaagaaaggttaacataacttgaactaattttaacatgttccttactatttacaattttttatttatatgttttatatatatacatatataaatgtaaacaaagccatatataattaataaaggcattggatcattattataaaaggaagattaacaaagttaccctggaacaatagcttacttatccaaatctcaacatttacattttaacagttttgtatgtttcaaagttgaaactactgtaagagaaagccaatactatttatatctgaatcaacagtagcataaacattttttaattgagattgtattttaatcccttttgttaaagtacattaacaacagtttttcacaggatatgaacttggcgaaattagttcttaatctgaattacagggtattactatgaaatgcagttgattttgcagtagacgtacagtcatttaaacttccaaatgagtgttgtccatgtttctgttggtattttggaaggattatacattttattgccttcagcattgattatgttcttttgaatatacttagttttggcgaaagccttgtcctttgtaagttggtttgatcttgtgatgcaaccaagtctcatttaggtcaagactaaataagagatggaggggtagagggtgtgactcaagcaggataatattgatttgataaagagcatatcacatgcctgttttcttgccagataaagggcatagcacatgcctgttttcttatatactagaataaaggctctcctaggaaagatttttcttaaatatttaaaagtgaaaatgtgagacaaggccttcaaggagactacccaggaagatacacagtttaaaatgttggctatacagctctcaatagattattttatagttatagttgaataatcagttataatacactgtaaagaaatcagattttccttctgtttggtgtctgagtccttcctgctcttcttacttctgagaatctgggcactaagaaatcagtaagtacattgtagtgctcctgcatcccagagtccttaacctaaggagggtcttagtcactggtaagaacttggctttctaattatattcacttggtttttaacattagtagcttgacgataatcagggtatagtaaatttccaccaaaaatgtgatgcgaagaattctgccttggtcctttatggtaaaacagataataacgtctaaaatagatcagccacaagtgcagcaaatatttttacactctctttgaatagaatcccaaccaccctcccccatgattttagaaataaaggcttcctaaaataatagaacaaattggcaaacaatcactaattggaccagtaggttcttacttaaatatctctcctagatttttagtgtatgttttgggattttatgggtttatttatttttttttttttaagcagacgttacagtttgttttaatctactatagatacgtttttgttttttggcttagttggggataaaataatttatttgtaagttagctttctaaaacttagagaaagtaatttaattcacgtatcttaaaaataaaattccaaagttaaaaaatttctgacttagtaggaagttaacaaaactactgctgatgcatttcagtttccaaaatctgtaccctccccccataaaaaagggagttaagatgtgctagtttaagtagttagctgaattatagattgatcctcttaaaatctggagtttgtaaaggggcctacataaacagtagatagacttggagggattttgtgggggaattgaaactaatagtattctatctagtttgtcagtatttactttttgatttttatttttcagaaaattttcctttcccaggacaccctcttgtattagaatatcctcttctgtatcacattaaaaacagattttactgttagaccaaataagatgggcaaatagcaacactagagcatctcacccagtttgaactaggatgttcgtggaagttatgacaccaatatattcctgaaatgaaaattaacctaaattttaaagtgaatctatttgaaaatttacttagataatgaaacctcgttttaattgtgctttttgtgaatccaacacttgtttgcttagaaagtatcttatccagtattaatattttgttcttttgggttttaaagttgagcttattcagcctcaatcacattacagcaagcataaagtaacagttgactcaatgaaagacccaaattgcctgtacagataaaattcactgaatcaaaggcacaatagctatcttttcacttgagctcagaaaagtaaaatggcttaatttgaactattaattttcagtggcctctaattaaacaaaaacaaaaaaccacaaatactggctaggtaagatattcctgaggtcattttaaaagaagtgtggcacctaggattcaatatttaatgctaacagtattatattttagtgaaatttattttggtggtgacagtttattaaacctaattagacttctttcaatagcttgttgtagagacaatctcaagggctggaaagtgttgctaaaatgaatgtcatacatttctgatatactaaggagcttataaagtaattctttcatagtgcaagaattattaatttcttagaggatgtttttaaaggagctacttaattgggaaaatgttctttaaatatcagtaatagttcattaagtaacatagtagctaagaacatggactatattttcacagcatagttcagcttaggcacacctttagtttggattattggcattctcttacgtaggaattatatcattgtagatatgtaattatggtaataagcaattttcataaccatgctcactcagactatatcatttgaaactgccatgtttccatttttgacaattcatgttcacaaaacaacaggaacaatttcctatttggtataaagagcaaaatttccaactttgccccaaaatgccatgggtggcatattgccatatgattatatcatatatttaatcatgtatgggaaagattttggattttttttcttatttaaaaaagtgctaaatataagaatatagttttaaatcagcaagtctaataacactattgcagctgtacacagagagaaccttttgtgcctttttgcctgcagtaagcatttatttctattttacatgagttctaagaatgttgatgattattgcaccttgttcttctgtatataaacttgattaaggaatttttttttttaaagcaaggagccgttttttgttactaggtggataccttagtaaacatgaggggaattatcagatagatgtctttggagcccagccttccctgtgtagtgagctggaaactcctttagattgtattcattggtgtgtatgtatatgtacatatatgtataaatagttaaatacataaacataaaacttaacatcgcattgttgtgatgacaagaagtagtaaggtgctaggtggttacattaaaaagcacagcacagtgtataatcagtcactatgactggtggttttgtaagctgggttcagtttttgaaccacccagaatacctcatgtgtaaatacagtgttcatgacttaattgaaatacagttattgtttaaaaaaaaaaaaaaagaatgtgaagccactggttggcttatgccttctgatctatcattcttgcctctttttttgtaaaggggttttcttcttgttgttctgttttttaatagggtttacagctagaattttgaatgccaaagttctatttattaaattaagaaaaaagttttcaatgttaatggctagtatttttccactggactattgtttgttgatgttggaatttgtatttacagagaaataaattttttataaaaaga

SEQ ID NO: 1655 - DNA, 2685 bp, Homo sapiens
  source 1..2685: mol_type = genomic DNA
ctggtggggtctgtcggcttctcttcagtgcgatatatttaaatggataaaaatatgttagttcccaaagaattgtattatgtctattacgtcaagataccgttgttgaaatattttcaaaaaatacattagtgatgtggaaatgttatttctttactaatggaccaaataaaatctggtataatgggcacctttaaagaaagcaccttcacacttgaagtgcgtaaatgatgtttgaagttgttcagatgatgacgtggagatgtctggtttctgtcaatgttggccccgcctaccccacacgagcatcattttgggtgtcagggccccacgcaccccacacgagcatcattttgttgcctgggctcatcatggaaggaaatgctaaattccaaaaagaggtgggtgcagataaagacaaatcagtttcccacctatctctgcggaccgtacattctccctgagcccaggttaaatactccgttccagagcgaggtttgtaggtttgttggttttcttttttttttttttctttttttttttgaggcagagtctcgctccattgccaggctggagtgcagtggcatgatctcggctcgctgcaacccccacctcccaggttcaagcgattcccctgccttaacctcccaagtagctgggactacaggtgcacaccaccacgcccagctgattttttgtattttagtagagacggggtttcactgtgttggccaggatggtcttgatctcttgacttcgtgatctgcccacctcagcctcccaaagtgctggggttacaggcgtgagccactgtgcccggcccctaggttcgttttagccgagaagtgttggggttacaggcgtgagccaccgtgcccggcccctaggttcgttttagcccacagttgagaagtaactggtagattaggctcggcccttgtggaacgttacttggaagtgtgctggcctctgttaatgtccctgcgcgctgccggcctggagaagtgtcgcctgcctcaggcgcccttgctttgcctgtgaccgaagcgctccctgtggttttagtgagtttatggtcgaggagcacgagctgcggaaggagaggatccaggaggattacaacgacaagtactgggaccagcggtacaccatcgtccagcagcagatcccgtccttcctgcagaaaatggcggacaagatcctcagcacaggaaaatatctaaatgtggtcagagagtgtggccatgacgtcacctgcccggtggctaaagagatcatctacacgttaaaagagcgggcgtatgtggagcagatcgagaaggcgtttaactacgccagcaaggtgctgctggacttcctgatggaggagaaggagctggtggctcacctcaggtccatcaagcgctacttcctcatggaccagggcgacttcttcgtgcacttcatggacctcgcggaggaggagctccggaagccggtggaggacatcacgccccctcgcctggaagcgctcctggagctggcgctgcgcatgagcacggccaacactgaccccttcaaggacgacctcaagatcgacctgatgccccatgacctcatcactcagctcttgcgcgtcctggccatcgagaccaagcaggagaaggcgatggcgcacgccgaccccacggagctggcgctgagcggcctggaggccttctctttcgactacatcgtcaagtggcccctttcgctcatcatcaacaggaaagccctcactcgctaccagatgctcttcaggcacatgttctactgcaagcacgtggagcggcagctctgcagcgtctggatcagcaacaaaaccgccaagcagcactcgctgcactccgcccagtggtttgctggggctttcactctgcggcagcgaatgctcaacttcgtccagaatattcaatactacatgatgtttgaagtgatggaaccgacctggcacatcctggagaaaaacctgaaatccgcctccaacattgacgacgtccttggccaccacacaggcttcctggacacctgcctgaaggactgcatgctcaccaaccccgagctgctgaaggtcttctccaagctcatgtctgtgtgcgtcatgttcaccaactgcatgcagaaatttacacagagcatgaaattagatggcgagctgggcgggcagacgctggagcacagcaccgtcctggggctgcccgcaggggccgaggagcgggcccggaaggagctcgccaggaagcacctggctgagcacgcagacactgtgcagctggtgtccggcttcgaggccaccatcaacaagtttgacaagaacttctcagcccacctgctggacctcctggcccggctgagcatctatagcaccagtgactgtgagcacggcatggccagcgtcatctccaggcttgacttcaatggtttctacacggagcgcctggagcgcctgtctgcagagaggagccagaaggccaccccccaagtgcctgtcctgcgggggcccccggctcctgcacccagggtcgcagtcaccgcacagtgagccctggctgtgacaggaaggaagggtgtggggtcagcagggactggtgcaaatgggtccagaattttcaaatcgaatgctctgtgttctgtctttgcagtttaaatataaagcaggaatgattg

SEQ ID NO: 1656 - DNA, 3198 bp, Homo sapiens
  source 1..3198: mol_type = genomic DNA
ccactggatcctacaactactttttccctcttttgctcacgcacctcgaagaactggtgctcccgcgggaagcgcacggggcgcgcaacgaagcgaaagggcgcggccccagccgcgggatcccgctctacaggcagcggctccgccgccccgggccccgcagcgaggcgggcgcacagcgcggggggcaactgcatcaccccgggcgcgggcgggcgcagcctgtcggccaccgtccgcgagccgagccggacgtgacgtcacgctcacttccgccgccgtcgggggctgcgcgggggctgtggctccgggactgcggagaacatattgtgatgttcgtgcctcagagctaaaactatgagtgaatttcggattcaccatgacgtcaatgaactgcttagcctgctgcgtgtccacggaggagatggggctgaggtctacattgacctgcttcaaaagaacaggaccccgtacgtcactaccactgtctctgctcacagtgccaaggttaaaattgcagagttttctcgtactccagaagactttctaaagaaatatgatgaactgaaatctaaaaatacaaggaaccttgacccgctggtgtacctgttgtcaaagctcacggaagacaaagagactctgcagtacttacaacagaatgcaaaagaaagagctgagcttgcagccgctgctgtgggcagcagtaccaccagcatcaacgtccctgccgcggcctccaagatctccatgcaggagcttgaggaactgaggaagcagcttggcagcgtggccacaggctccacgctgcagcagtctctggaacttaaaagaaagatgcttcgagacaagcagaacaaaaaaaattcaggccagcacctccccatcttcccagcatgggtgtatgagagacctgccctgatcggggatttcctgattggtgctggcatcagcacagacaccgctttgccgataggcacgttgcccctggcctcgcaggagtcggccgtggtggaggacctgctgtacgtgctggtgggcgtggacgggaggtacgtcagtgctcagcccctggctgggaggcagagccggaccttcctcgtggaccccaacctggacctgtccatcagggagctggtgcacaggatcctcccagtggccgccagctactccgctgtgaccaggttcattgaagagaagtcttccttcgagtacgggcaggtgaaccacgccctggcggccgccatgcgcaccctggtgaaggagcacctgattctggtgtcacagctggagcagctgcacaggcagggcctcctttcgctgcagaagctctggttctacatccagccagccatgcgcaccatggacatcctggcctccctcgccacctcggtggacaaaggcgaatgtcttggggggtccacgctgagcctgctccacgacaggagcttcagctacacaggggacagccaggcgcaggagctatgcctgtacctaaccaaggcggccagtgctccctacttcgaggttctggagaagtggatctacaggggcatcatccacgacccatacagtgagtttatggtcgaggagcacgagctgcggaaggagaggatccaggaggattacaacgacaagtactgggaccagcggtacaccatcgtccagcagcagatcccgtccttcctgcagaaaatggcggacaagatcctcagcacaggaaaatatctaaatgtggtcagagagtgtggccatgacgtcacctgcccggtggctaaagagatcatctacacgttaaaagagcgggcgtatgtggagcagatcgagaaggcgtttaactacgccagcaaggtgctgctggacttcctgatggaggagaaggagctggtggctcacctcaggtccatcaagcgctacttcctcatggaccagggcgacttcttcgtgcacttcatggacctcgcggaggaggagctccggaagccggtggaggacatcacgccccctcgcctggaagcgctcctggagctggcgctgcgcatgagcacggccaacactgaccccttcaaggacgacctcaagatcgacctgatgccccatgacctcatcactcagctcttgcgcgtcctggccatcgagaccaagcaggagaaggcgatggcgcacgccgaccccacggagctggcgctgagcggcctggaggccttctctttcgactacatcgtcaagtggcccctttcgctcatcatcaacaggaaagccctcactcgctaccagatgctcttcaggcacatgttctactgcaagcacgtggagcggcagctctgcagcgtctggatcagcaacaaaaccgccaagcagcactcgctgcactccgcccagtggtttgctggggctttcactctgcggcagcgaatgctcaacttcgtccagaatattcaatactacatgatgtttgaagtgatggaaccgacctggcacatcctggagaaaaacctgaaatccgcctccaacattgacgacgtccttggccaccacacaggcttcctggacacctgcctgaaggactgcatgctcaccaaccccgagctgctgaaggtcttctccaagctcatgtctgtgtgcgtcatgttcaccaactgcatgcagaaatttacacagagcatgaaattagatggcgagctgggcgggcagacgctggagcacagcaccgtcctggggctgcccgcaggggccgaggagcgggcccggaaggagctcgccaggaagcacctggctgagcacgcagacactgtgcagctggtgtccggcttcgaggccaccatcaacaagtttgacaagaacttctcagcccacctgctggacctcctggcccggctgagcatctatagcaccagtgactgtgagcacggcatggccagcgtcatctccaggcttgacttcaatggtttctacacggagcgcctggagcgcctgtctgcagagaggagccagaaggccaccccccaagtgcctgtcctgcgggggcccccggctcctgcacccagggtcgcagtcaccgcacagtgagccctggctgtgacaggaaggaagggtgtggggtcagcagggactggtgcaaatgggtccagaattttcaaatcgaatgctctgtgttctgtctttgcagtttaaatataaagcaggaatgattgactcagc

SEQ ID NO: 1657 - DNA, 5089 bp, Homo sapiens
  source 1..5089: mol_type = genomic DNA
ggagaaggggcgcaggtggccgccatcttggattgcgaactgggtcgctacgcttcacgccaggggcggagtggcggcccttctgttacccgccacacacgtcgccgctggggactgggaaatcagggcatcggagagtgccacattaatggatgccatggctagtccagggaaagataactatagaatgaaaagttataagaataaagccctaaatcctcaagagatgcgtagacgaagagaagaagaaggaatacagcttagaaaacaaaaaagagaagaacagttgttcaaacgcagaaatgtctatttgcccagaaatgatgaatctatgcttgaaagtcctatacaggatccagatattagttccactgtacccattccagaggaagaagttgttactacagatatggttcagatgattttttctaataatgctgatcaacagctaacagcaacacagaaatttagaaagctgctttctaaagaacctaatccaccaatagatcaagttatacagaaaccaggagttgtacagagatttgtgaaatttcttgaaagaaatgaaaattgcactttacaatttgaagctgcatgggcattaacaaatatagcatctggaacttttctgcataccaaggtagtgattgaaactggggctgttccgatttttatcaaacttcttaattctgaacatgaagatgttcaggaacaggctgtttgggcacttggtaatattgctggtgacaatgcagaatgcagagattttgttttgaattgtgaaatacttccacctcttttagagttattaacaaattcaaacagactcacaacaacaagaaatgccgtgtgggccctctcaaatttatgtagaggcaaaaaccctcctccaaactttagtaaggtttcaccttgcttaaatgtcctgtcacgactgttgtttagcagtgacccagatgtgttagcagacgtgtgttgggccctttcttatctctccgatggacccaatgataaaattcaagcagtcattgattctggagtctgtcgaagattggtggaacttttgatgcacaatgattataaagttgtatcacctgcattaagggcagttggtaatattgtgactggtgatgatattcaaacacaggtaattttgaattgttctgcattaccctgtctcttacatttattgagtagcccaaaggagtcaattagaaaagaagcctgctggactgtttctaacatcactgctggaaatagagctcagattcaggctgttatagatgcaaatatttttcctgttttgattgagattcttcagaaagcagagtttcgtaccagaaaagaagcagcttgggctataactaatgcaacatcaggaggtactccagagcaaataaggtatttggtagctttaggctgcattaaaccactttgtgatcttttgactgttatggactccaaaatagtccaagtggctttaaatggacttgaaaatattttacgtcttggagaacaagaatctaagcagaatggaataggcattaatccatactgtgctctcattgaagaagcatatggtctggataaaattgagtttttgcaaagccatgaaaatcaggaaatttaccagaaggcatttgatctgattgaacattactttggtgtagaagaagatgaccccagcattgtacctcaggtggatgaaaaccaacaacagtttatatttcagcagcaggaagcaccaatggatggatttcaactttaacttactggaggaaaaaaaatttatggctaaaaagggtagcttcaggtaactcctctttgttgccaatgtaagaatgtttgtttttttacatagaacagtaaagagaatttgatgcacttttagaaagcaaaatgaaacaaaaatttccattcagatgcaacctttcattgtagtttgttgttgttttagttttgttgttgtgcctgtatttatatcttctattgtttggatttttgtatctatttgtgaataattgaatatgcaattatttagtaatttaagcttgaaaaggagaattttggtgaagcattacttagtaattctgaattttttcaagcattcttggaaactgcacattagcagtaaacctattgataattgcattttggcagtaagtcttacacatctaatctctactaaatctacctctatcttgaagcagaaataaaaacaaaaaagcttcagaagcatgaaataatgcaaatgctaaattagaatgtgaaaatatttattaccttaaattatacatatcactgtgctgtaggttatactttgcaaaaaattgcaacagaaaacctataaaatttatttataaaacagaagaaatattatactgataatccattaaaatgtggcaattgtgaagggagaagctgtttttcatgttgaacacattaaaaagattactttataaaatgtttaaatatttctgtttttaacatataagtgctatgtatattagtatattttgtatttcaaccaaatatgctaccatttttgaaatagtgttttattgtttttcactcattgttttaaagagcatcatgacagagatgtcatcatgaatctaaagtagtgctgcatatctaaaataataactaattatttctctgatttttcagagcagtaattgaaaagtttcattttctgtataatagtactagtttaagtttaagtacaagtacaagtttaggtactcgaatgacaaaattaccctgaagaaataaccttattatgtgttaaattgtattaaatgcatttaacatttggatgctaaatgataatgaaaattgctaaaggttctttaatatggttcaaatctataagacttttttcttttagtaatactcagagggtcattctgctgcttgttatgaatcatagattacattcatgtcagattgatcaatatgtatgttttatgatttaacagcaaaaacctcttcaaacggaaaatttgaaagaaaggtttcaatagaaaaattatatatatatttatacatatatatgtgtgtgtgttactctcacagttcaactactgttgaactcaatcttttaatttatagttatacgtaggctatttatgtgtccaattgtatacctagaatacttacttaaaacttagtttacaactctttttaagatgagaactaaggcaattttgatatgattcatggtctattctttaaaaaaagatttcatttatgatagtatttgtaatgtttctgctggaaatcagaggcacgttccaagaggaaaatgtatataggagtacttttaaagaatatgtcactttgtaaattacatatcatgaaactaagcttttgacaagatacttaaaacctacagctgtaaaatacaggtttaaatggtgttcgtaatgctgagtgcatctgccagcccttttttattattaagtagaagattgtatctgtgccccttttttcgtagtggaaggtatatagccgagtataaaatggttttcttttgcattatctgtattcaaaaaacagggtagttatattaaagcttaccaaattgatggtgaatttatcagattaacctttttgtggtgcagatggttctaagtatcaggtgacagggtattctactctttctagtcaattaaaattgataatgcagcatgattcataaactaaccagctgtgcctccttttattttgaggaccctgtagtcactataataaatttctaagccaaatttttcaaacaagatagttcttatagaaggagaaataataaatatgtgtgtgttgatgcatgcacacagaatgacctgtgaaaggaaacttaaattttgccggtaaaacaaacatatctctacagactgtgattatacttcataagcatttaaatacagttttatttatttccttaaatatattacttgggtaattaattttagatttgattgcaaagagcactgtatagcagttgggaccagctcttggcttggcttggcttggcttattgttaagagtttattggatcaagactaacaaataactttgtgatgaaaattcttcaaaaatatagctactcttttcaagtataccatttaaaatatttcatcaggcagagccctgaccaggaaaaaaaaaaaaaaagaaagaaagaaaagaaaaaaataaataaaatgctccaaaaagtgttttcagtagtcttcactggcccttgtgggaggaaaaatacttttttaacttgcttttctaagatttgttatatttaaatccaagagaaactatgccgaaaaaaagtgttataaagaggaatgcatgtagcattaatgcaaatatcaagaaaatacttgaaagagtccttttcatttatttaattaaatttggtgttttattttgtctgaatctgaatttctcctatttaatctatgcaattatgcttgttttatatttataagcacttgactcactgggtgtggtctttttactgtgttttatttcaaaacgttgttttaagtgatagtgtccttaaattttagtgtcatttggtcaacttactggtaacaccagaacaagaaagcaaaaaagtaataaattctgctggcacagaactaacatatcatttggtaactgtaaaacctatttgcagttaaaggttgatttattggataagggactaaaagaagcatatattacctttgcctttatattttttcttcttttaagaaggagcattatggaaaaataaatataaagtcttagtgaatttttgttatggttctcaattcagcaatctactggctgcttgcgaaactgtgaaatcaaattgttcttaacctttattcagtttagtttatagcattactgttttatgaaatgtgacattttaggagccaatataatagagctctaaaaggatagtatatctttaaattctgactggggagtaagaagagaagatattcttaccctactaaataaaccaacttttgagtagtatgcaatattatgaaatgttacaacactatattaaaaataataaaatattttaaaattgcattta

SEQ ID NO: 1658 - DNA, 726 bp, Homo sapiens
  source 1..726: mol_type = genomic DNA
tctgctactcagaggaaggggcggttggtgcggcctccattgttcgtgttttaaggcgccatgaggggtgacagaggccgtggtcgtggtgggcgctttggttccagaggaggcccaggaggagggttcaggccctttgtaccacatatcccatttgacttctatttgtgtgaaatggcctttccccgggtcaagccagcacctgatgaaacttccttcagtgaggccttgctgaagaggaatcaggacctggctcccaattctgctgaacaggcatctatcctttctctggtgacaaaaataaacaatgtgattgataatctgattgtggctccagggacatttgaagtgcaaattgaagaagttcgacaggtgggatcctataaaaaggggacaatgactacaggacacaatgtggctgacctggtggtgatactcaagattctgccaacgtgtgagtgtgcctgtttctggtcatgggaacagaacatagcacttggattaggggtttaggtatctttttttgttttgagacaaattctccctccgttggccaggctggagtgcagtggtaccattgtagctcactgcagccttgacctccactacagcaagtgatcttcccgccttagcctcccgagtagctgggactacagatgtgtgctaccacacccagctaatttttgtattttttgtagatacagggtttcaccgtgttgctcgggc

SEQ ID NO: 1659 - DNA, 476 bp, Homo sapiens
  source 1..476: mol_type = genomic DNA
aggggtgacagaggccgtggtcgtggtgggcgctttggttccagaggaggcccaggaggagggttcaggccctttgtaccacatatcccatttgacttctatttgttgtttacttctggtttagtgtgaaatggcctttccccgggtcaagccagcacctgatgaaacttccttcagtgaggccttgctgaagaggaatcaggacctggctcccaattctgctgaacaggcatctatcctttctctggtgacaaaaataaacaatgtgattgataatctgattgtggctccagggacatttgaagtgcaaattgaagaagttcgacaggtgggatcctataaaaaggggacaatgactacaggacacaatgtggctgacctggtggtgatactcaagattctgccaacgttggaagctgttgctgccctggggaacaaagtcgtggaaagcctaagagcacaggatccttctgaag

SEQ ID NO: 1660 - DNA, 947 bp, Homo sapiens
  source 1..947: mol_type = genomic DNA
ctctgttccccttttcctgccaccttcttctccagggaccagaaacaagggccccgccagcaggcgaagcagggagatgtcagactgctacacggagctggagaaggcagtcattgtcctggtggaaaacttctacaaatatgtgtctaagtacagcctggtcaagaacaagatcagcaagagcagcttccgcgagatgctccagaaagagctgaaccacatgctgtcggacacagggaaccggaaggctgcggataagctcatccagaacctggatgccaatcatgatgggcgcatcagcttcgatgagtactggaccttgataggcggcatcaccggccccatcgccaaactcatccatgagcaggagcagcagagcagcagctagagacccctttggccacaccttccaggcactggcctgatgccccgccctggtgctctccccaggctccctcctcagcctcctgcccacccagggccctttactctcttctccctccagaccttcctctgacccttgctgaactggggtccctttgtgagtgtctcagtctagaggtacctccctccctggggggtctcagctcctggagtcgcaggcccttggggcccctctgtgagatctcaatgctgtctggggaccctaagagttttctcacctgttcagtctcatctaaccttccaatgtctgatgttcctgccaaattcctgcctgattctgggtccgtcctgacctccaaaggtcagcttggtgcttgaggtctccctgctcttggtggcagtggtagcagcaacagcagcagcagcagcagcagcagcagcagagacctctccactttcccttagcccctctgctgggtagagaggcactttcagggacttccctccagctgcctcttcatctgggaatgagctaagcaaggctgagcctcctcctgttgctt

SEQ ID NO: 1661 - DNA, 1146 bp, Homo sapiens
  source 1..1146: mol_type = genomic DNA
aatggccacaagtggccaacggaaagcaggtggcaggacaggaggctgtggtggggcctgaccgagcagcctttccttccaaatctgactgtggcttgctcaggcccctatggtggctgtgaccctgttttgtccatctcctttcaccaggacccgccgggccccgccagcaggcgaagcagggagatgtcagactgctacacggagctggagaaggcagtcattgtcctggtggaaaacttctacaaatatgtgtctaagtacagcctggtcaagaacaagatcagcaagagcagcttccgcgagatgctccagaaagagctgaaccacatgctgtcggacacagggaaccggaaggctgcggataagctcatccagaacctggatgccaatcatgatgggcgcatcagcttcgatgagtactggaccttgataggcggcatcaccggccccatcgccaaactcatccatgagcaggagcagcagagcagcagctagagacccctttggccacaccttccaggcactggcctgatgccccgccctggtgctctccccaggctccctcctcagcctcctgcccacccagggccctttactctcttctccctccagaccttcctctgacccttgctgaactggggtccctttgtgagtgtctcagtctagaggtacctccctccctggggggtctcagctcctggagtcgcaggcccttggggcccctctgtgagatctcaatgctgtctggggaccctaagagttttctcacctgttcagtctcatctaaccttccaatgtctgatgttcctgccaaattcctgcctgattctgggtccgtcctgacctccaaaggtcagcttggtgcttgaggtctccctgctcttggtggcagtggtagcagcaacagcagcagcagcagcagcagcagcagcagagacctctccactttcccttagcccctctgctgggtagagaggcactttcagggacttccctccagctgcctcttcatctgggaatgagctaagcaaggctgagcctcctcctgttgcttgaaataatgatgatataaaggctggatttggagtttgtatcccctggtccctctgggatgctcattaaaaccttcccactccttggaaa

SEQ ID NO: 1662 - DNA, 1443 bp, Homo sapiens
  source 1..1443: mol_type = genomic DNA
agccggcatgggagtaggaatggccacaagtggccaacggaaagcaggtggcaggacaggaggctgtggtggggcctgaccgagcagcctttccttccaaatctgactgtggcttgctcaggcccctatggtggctgtgaccctgttttgtccatctcctttcaccaggacccgccgggtgagggtgactggagcacattcctgggcttgggggtgggaagggagtctgatttgcctggggttgatgtgggggggttttgggcatgggccgtgactcacagagtagatccagatccgcctgctcccctcatatcctgttattcagaaggctgtatccgcttagaaagtgtcttttgtcctggggtgagagggtgacgcatgtgccctctggcagtctgctgctgtgtccagagtccgactccagctgggctgtaactgggcttggcccccgccttaggccccgccagcaggcgaagcagggagatgtcagactgctacacggagctggagaaggcagtcattgtcctggtggaaaacttctacaaatatgtgtctaagtacagcctggtcaagaacaagatcagcaagagcagcttccgcgagatgctccagaaagagctgaaccacatgctgtcggacacagggaaccggaaggctgcggataagctcatccagaacctggatgccaatcatgatgggcgcatcagcttcgatgagtactggaccttgataggcggcatcaccggccccatcgccaaactcatccatgagcaggagcagcagagcagcagctagagacccctttggccacaccttccaggcactggcctgatgccccgccctggtgctctccccaggctccctcctcagcctcctgcccacccagggccctttactctcttctccctccagaccttcctctgacccttgctgaactggggtccctttgtgagtgtctcagtctagaggtacctccctccctggggggtctcagctcctggagtcgcaggcccttggggcccctctgtgagatctcaatgctgtctggggaccctaagagttttctcacctgttcagtctcatctaaccttccaatgtctgatgttcctgccaaattcctgcctgattctgggtccgtcctgacctccaaaggtcagcttggtgcttgaggtctccctgctcttggtggcagtggtagcagcaacagcagcagcagcagcagcagcagcagcagagacctctccactttcccttagcccctctgctgggtagagaggcactttcagggacttccctccagctgcctcttcatctgggaatgagctaagcaaggctgagcctcctcctgttgcttgaaataatgatgatataaaggctggatttggagtttgtatcccctggtccctctgggatgctcattaaaaccttcccactccttggaaa

SEQ ID NO: 1663 - DNA, 1203 bp, Homo sapiens
  source 1..1203: mol_type = genomic DNA
tttaacaagggcccaaccccagggccaagtcaagaaggagctcagccactatctccccaccgagccagctcagcgggcagggctgggagggagtgggacagattctgggagtgcagcggggaggagtcccggctgggctgagcgcagggagctgcttggcagtgccagagcccaggccccagagccctgctggagaggaggcagactgaggcagcaggccccgccagcaggcgaagcagggagatgtcagactgctacacggagctggagaaggcagtcattgtcctggtggaaaacttctacaaatatgtgtctaagtacagcctggtcaagaacaagatcagcaagagcagcttccgcgagatgctccagaaagagctgaaccacatgctgtcggacacagggaaccggaaggctgcggataagctcatccagaacctggatgccaatcatgatgggcgcatcagcttcgatgagtactggaccttgataggcggcatcaccggccccatcgccaaactcatccatgagcaggagcagcagagcagcagctagagacccctttggccacaccttccaggcactggcctgatgccccgccctggtgctctccccaggctccctcctcagcctcctgcccacccagggccctttactctcttctccctccagaccttcctctgacccttgctgaactggggtccctttgtgagtgtctcagtctagaggtacctccctccctggggggtctcagctcctggagtcgcaggcccttggggcccctctgtgagatctcaatgctgtctggggaccctaagagttttctcacctgttcagtctcatctaaccttccaatgtctgatgttcctgccaaattcctgcctgattctgggtccgtcctgacctccaaaggtcagcttggtgcttgaggtctccctgctcttggtggcagtggtagcagcaacagcagcagcagcagcagcagcagcagcagagacctctccactttcccttagcccctctgctgggtagagaggcactttcagggacttccctccagctgcctcttcatctgggaatgagctaagcaaggctgagcctcctcctgttgcttgaaataatgatgatataaaggctggatttggagtttgtatcccctggtccctctgggatgctcattaaaaccttcccactccttggaaa

SEQ ID NO: 1664 - DNA, 4295 bp, Homo sapiens
  source 1..4295: mol_type = genomic DNA
gcttggggtgcagggcagcccaggctggctactggctggaagatctgctttggaaagctttttgaaagcaaagatgagcaacactcaagctgagaggtccataataggcatgatcgacatgtttcacaaatacaccggacgtgatggcaagattgagaagccaagcctgctgacgatgatgaaggagaacttccccaatttcctcagtgcctgtgacaaaaagggcatacattacctcgccactgtctttgagaaaaaggacaagaatgaggataagaagattgatttttctgagtttctgtccttgctgggagacatagccgcagactaccacaagcagagccatggagcggcgccctgttctgggggaagccagtgatccagccccaccaaggggcctccagagaccccaggaacaataagtgtctcctcccaccagacacttgccttatttcttcttctctttggtgacctacattgtcaaaactaccaattccaggttaactttgttggagaatttcccccacccccatccagtgggtcacccaggagtaatgtccctccagcaacgttccccctatggcctccagcagagctgatctgcctctcacacaggtcctggtgtctgcctctgcaccgttccctaaatgcagccaccttggcaggttccaggtggaagttggtagaaggcccctgccaggtcacagcaatgctctccttgtcaaggcatggaccagggtcattcagacacattcagatactgcactgagaaggagctggcatctctcagtgtgctcctgccctcccactcctgccccagctgttctccagggcttggggaaacagaaaccactcacatagggattcctggatggcttcaggttcagcgcccttggggctatgaatgggaggctcagcagtgccctgaggatgggcttccttgtcctgtggcctctgctccaggggcagtgtcctttccctgtgctgtgtgcttgtgtgcatgtgcctatgtgggtgaccctgtggaagtgagaaggagtcactgtgatgcttagctgtcctaaatgatggtttgctcaatgccaggactgggtttctggtgatgaatgaatattccagattttgaggagctctaagtggtccaggagtccaagtaagcagtctggctggaataaggcagcatcacggaaattctgtaaggactgacacagagagctcatgctgactgtgatgagaaattgcagcacctctatctcgcaggtaatggagtagtttgttattggtagtctactccaggccaggcagtgtgttatgggctgaggatgcagaaacaggcaggacacagtgctgtcctagcagtgcactggcgggtctctccatgcaggccacaacacagggtcagtgttcacctggtgtcacttccaggcaatgttctgtgcagccgctcttagtattcttccttgaggctcacatcatgtgtccctatcactcttactactctggtcagtctccagctaacctctcaatcaggcaaacattcttcttggaggaatcaggcaaacatctcaaaaattctctttccatcctaccagcagcagtgtgtaagatgggctatttgttctttggaatgactgctccactccacactcacacctctattcacagaccagcatctcctctccttatcaggaacattccttcctgaacatattctgcacctcgtcagccttcaggactgatctgccattttcacctctaaatccccatgtctgaccattagttttcttctctttccttctctccctttctcattctcattccacctgttcttggaactcacggagacctacagtccctgggctttcattttctcctcccagccccctgctgccttctctatgcagcctgccctccatcatccaccccagaattgctctctttcctctcttagctctgttgcccactttccttgggccataccttccctgcagatctccagcccagaaccatcttcccctgttgtcctcctctctcctccaccgggactgctggtcactgcttagaaccgtcatgccagggtcccaaaagtgtgggtgcctgacttcctctctgtgcagcactctctgaatccctcctattcaccttgctgctgttattccccgaatgcgcaacataccccccatcaatatatctcagtatttcatgtctcaataccaatcttttaaactactgcctctaccagaaatgtcttttaatacttcttctgtctcattaacattacatttcaaggctgagctttaatgtcagtgtctcttagacattcagagggtgaaccaccatcccttcaccccaaagaaatgatctctgcttcatttgtgcctccctcaccatgaccccactcttaccatagtggctacattacttcagattcccctaatgtctttccagccagacttggaatcatggagggaaaacattgttacctcggatctcctggttacccagcacatagtagtactggattccagctcataataagtactctatatcatttttcaatataaaatgtatttgtgcaaattctagtcaatactactttatgtaaacagcagtgtaaaatccaaaaacttccagtcctggaggcaggttgtgcagcttaggggaggaccccagaatctggaccccagagtctggaagcaggccagaaaggataaggcaaatgactgaacagttccctcaggactcacgtactgatctcccaaaagaagagagggtctccctggggtggggttgctggaccttcaatccatcgctacagtccagaaggcaattggccactcctaatgtgggcctgccctccctttatttttccagttcttatttcacctgataatattccgtccaattggcaatggcacataaaaattaggatggagtgtgtggacaaatacttcttcatcttcttgtctaggttttagaaatcaccttctcaagggagccttgtctaatgttcctgagactatttcacactctccatgcttatgtcaatgcaggactcatcacatctattcggatattctgtttacacacccatgtcatcccagagaggtgatcacagggcagggacacatgtgtggcatacagttcctagttaagatcccaaatcctgagatattgctgatttgctatggcaggtcgtcaagagaactgtgtcattccaaactcaccaaggtggcttatagaacagaagcagatggatatgaagaggagaggggaccagaccatctccgcaaccacagcccagagctccagtcaccagatagaaaattgatttgatttcatccaatattccttcgaaagagtgtcaaggaatagggtggggcaatgtgtcattctgcattggaaggaggacattttagagcaaggcctaagggcacaggtattagtgtcatattgatcagaattcaacctttgttctaacacatactagagcaagaatttacttgatttggaataattaatagctactggacattatattggtactaaagagaaagaatacttgacagctctatgcccacactcacattacagctgatgtgaaagagattctggaaatccaaatgttccccagaaattctgatatcaaaacattccaataacttttttttttcaggcgcagtctcactctgtcgcccgggctggagtgctgtgagctgtccgtggtgctgaattcactgtgacgtcactcctgtctctctttgctttcttctgactgacatttattcagccttctctacaggaatctcttatgttcccccacatgcaggtggtttttcagtaggctcctgaagagtgatctcaactttccaggaagaaaagagggcaaagggaacaatgtgaaaagaagcagaaaatcataaaagaccatgtgtttgataaacaaccagattgtttctggttccctgccactataaaaacaccatgagagcatactcatacatgttcccttataaatctgcgaggtagtttctttggtattcttgcccaggaaatgggttgattcatcacagattttatatatatacttttttttaactaagtgtgagataatatcttattgtttttgtaacttgcattttacaagagttctgaccagcaccagataagcttcagtgctctcctttctttggccttaatattattggattaaagaattactgcctctcactaggagcatcatttatttaccattattttcaatttcatattaaaactcaatttctagtagagtc

SEQ ID NO: 1665 - DNA, 4334 bp, Homo sapiens
  source 1..4334: mol_type = genomic DNA
gtgggaagagccaggctgagccttataaaggactgctctttgtccaaacacacacatctcactcatccttctactcgtgacacttcccagttctggctttttgaaagcaaagatgagcaacactcaagctgagaggtccataataggcatgatcgacatgtttcacaaatacaccggacgtgatggcaagattgagaagccaagcctgctgacgatgatgaaggagaacttccccaatttcctcagtgcctgtgacaaaaagggcatacattacctcgccactgtctttgagaaaaaggacaagaatgaggataagaagattgatttttctgagtttctgtccttgctgggagacatagccgcagactaccacaagcagagccatggagcggcgccctgttctgggggaagccagtgatccagccccaccaaggggcctccagagaccccaggaacaataagtgtctcctcccaccagacacttgccttatttcttcttctctttggtgacctacattgtcaaaactaccaattccaggttaactttgttggagaatttcccccacccccatccagtgggtcacccaggagtaatgtccctccagcaacgttccccctatggcctccagcagagctgatctgcctctcacacaggtcctggtgtctgcctctgcaccgttccctaaatgcagccaccttggcaggttccaggtggaagttggtagaaggcccctgccaggtcacagcaatgctctccttgtcaaggcatggaccagggtcattcagacacattcagatactgcactgagaaggagctggcatctctcagtgtgctcctgccctcccactcctgccccagctgttctccagggcttggggaaacagaaaccactcacatagggattcctggatggcttcaggttcagcgcccttggggctatgaatgggaggctcagcagtgccctgaggatgggcttccttgtcctgtggcctctgctccaggggcagtgtcctttccctgtgctgtgtgcttgtgtgcatgtgcctatgtgggtgaccctgtggaagtgagaaggagtcactgtgatgcttagctgtcctaaatgatggtttgctcaatgccaggactgggtttctggtgatgaatgaatattccagattttgaggagctctaagtggtccaggagtccaagtaagcagtctggctggaataaggcagcatcacggaaattctgtaaggactgacacagagagctcatgctgactgtgatgagaaattgcagcacctctatctcgcaggtaatggagtagtttgttattggtagtctactccaggccaggcagtgtgttatgggctgaggatgcagaaacaggcaggacacagtgctgtcctagcagtgcactggcgggtctctccatgcaggccacaacacagggtcagtgttcacctggtgtcacttccaggcaatgttctgtgcagccgctcttagtattcttccttgaggctcacatcatgtgtccctatcactcttactactctggtcagtctccagctaacctctcaatcaggcaaacattcttcttggaggaatcaggcaaacatctcaaaaattctctttccatcctaccagcagcagtgtgtaagatgggctatttgttctttggaatgactgctccactccacactcacacctctattcacagaccagcatctcctctccttatcaggaacattccttcctgaacatattctgcacctcgtcagccttcaggactgatctgccattttcacctctaaatccccatgtctgaccattagttttcttctctttccttctctccctttctcattctcattccacctgttcttggaactcacggagacctacagtccctgggctttcattttctcctcccagccccctgctgccttctctatgcagcctgccctccatcatccaccccagaattgctctctttcctctcttagctctgttgcccactttccttgggccataccttccctgcagatctccagcccagaaccatcttcccctgttgtcctcctctctcctccaccgggactgctggtcactgcttagaaccgtcatgccagggtcccaaaagtgtgggtgcctgacttcctctctgtgcagcactctctgaatccctcctattcaccttgctgctgttattccccgaatgcgcaacataccccccatcaatatatctcagtatttcatgtctcaataccaatcttttaaactactgcctctaccagaaatgtcttttaatacttcttctgtctcattaacattacatttcaaggctgagctttaatgtcagtgtctcttagacattcagagggtgaaccaccatcccttcaccccaaagaaatgatctctgcttcatttgtgcctccctcaccatgaccccactcttaccatagtggctacattacttcagattcccctaatgtctttccagccagacttggaatcatggagggaaaacattgttacctcggatctcctggttacccagcacatagtagtactggattccagctcataataagtactctatatcatttttcaatataaaatgtatttgtgcaaattctagtcaatactactttatgtaaacagcagtgtaaaatccaaaaacttccagtcctggaggcaggttgtgcagcttaggggaggaccccagaatctggaccccagagtctggaagcaggccagaaaggataaggcaaatgactgaacagttccctcaggactcacgtactgatctcccaaaagaagagagggtctccctggggtggggttgctggaccttcaatccatcgctacagtccagaaggcaattggccactcctaatgtgggcctgccctccctttatttttccagttcttatttcacctgataatattccgtccaattggcaatggcacataaaaattaggatggagtgtgtggacaaatacttcttcatcttcttgtctaggttttagaaatcaccttctcaagggagccttgtctaatgttcctgagactatttcacactctccatgcttatgtcaatgcaggactcatcacatctattcggatattctgtttacacacccatgtcatcccagagaggtgatcacagggcagggacacatgtgtggcatacagttcctagttaagatcccaaatcctgagatattgctgatttgctatggcaggtcgtcaagagaactgtgtcattccaaactcaccaaggtggcttatagaacagaagcagatggatatgaagaggagaggggaccagaccatctccgcaaccacagcccagagctccagtcaccagatagaaaattgatttgatttcatccaatattccttcgaaagagtgtcaaggaatagggtggggcaatgtgtcattctgcattggaaggaggacattttagagcaaggcctaagggcacaggtattagtgtcatattgatcagaattcaacctttgttctaacacatactagagcaagaatttacttgatttggaataattaatagctactggacattatattggtactaaagagaaagaatacttgacagctctatgcccacactcacattacagctgatgtgaaagagattctggaaatccaaatgttccccagaaattctgatatcaaaacattccaataacttttttttttcaggcgcagtctcactctgtcgcccgggctggagtgctgtgagctgtccgtggtgctgaattcactgtgacgtcactcctgtctctctttgctttcttctgactgacatttattcagccttctctacaggaatctcttatgttcccccacatgcaggtggtttttcagtaggctcctgaagagtgatctcaactttccaggaagaaaagagggcaaagggaacaatgtgaaaagaagcagaaaatcataaaagaccatgtgtttgataaacaaccagattgtttctggttccctgccactataaaaacaccatgagagcatactcatacatgttcccttataaatctgcgaggtagtttctttggtattcttgcccaggaaatgggttgattcatcacagattttatatatatacttttttttaactaagtgtgagataatatcttattgtttttgtaacttgcattttacaagagttctgaccagcaccagataagcttcagtgctctcctttctttggccttaatattattggattaaagaattactgcctctcactaggagcatcatttatttaccattattttcaatttcatattaaaactcaatttctagtagagtc

SEQ ID NO: 1666 - DNA, 568 bp, Homo sapiens
  source 1..568: mol_type = genomic DNA
agatctttgaagactctgattctctgagactgaggagagatgtcttaccagcagcagcagtgcaagcagccctgccagccacctcctgtgtgccccacgccaaagtgcccagagccatgtccacccccgaagtgccctgagccttacctgcctcctccttgtccacctgagcattgcccacctccaccatgccaggataaatgccctcctgtgcaaccatacccaccctgccagcagaagtatccacccaagagcaagtaacatcactagaattcatcaggaccatgaaacaacaagatccagtggctcttcttactcccaggactccatcatcttcccttcagctgtagtgggaggctgcatcttccctaacctctgtctggcttgagcgttgacagagaaaaggcttagttctgaaaaccgatatgttgttggaagatgagcagccagatcactgcctaatctcgctttgctgtctgtgatgtagatggtggttcctatcctgagagcaagtgtgtttattcttttgcttctccccaataaagcacatgtttcatggtcaagccca

SEQ ID NO: 1667 - DNA, 678 bp, Homo sapiens
  source 1..678: mol_type = genomic DNA
aaactcctggtacttgagcactgatctgctttggagaacctgattctgagactccagcaggatgtcttatcaacagcagcagtgcaagcagccctgccagccacctcctgtgtgccccacgccaaagtgcccagagccatgtccacccccgaagtgccctgagccctgcccaccaccaaagtgtccacagccctgcccacctcagcagtgccagcaaaaatgtcctcctgtgacaccttccccaccctgccagccaaagtgtccacccaagagcaagtaacagcttcagaattcatcaggagcatgaaaggataaggataattggctcaccttgttccacagcttcacctgcatcttctcatcaaagcctaccatggatacacagttagcttctttcctcttagccagtgatctgcccatgatgatccctgatagcaaaaggtttcctttctgaggctgccatattgccactgtccaggtggagactgagaaaggaagtcctcagcagtgtcagttcccagagctttggaagaaggaccagcagctctgtccctgggaaccatcaaaaaatgctgttgatgttttctgtgtctgtctgtcacctgggcatgggcttctaacacctgtgcaattgtcacttttctttcactccctgaataaaatatctttgcatacgta

SEQ ID NO: 1668 - DNA, 692 bp, Homo sapiens
  source 1..692: mol_type = genomic DNA
gaaagtgtctgttcttgtcttttgttcacttttcaaaggggctgtttatttttcatattctgagactccagcaggatgtcttatcaacagcagcagtgcaagcagccctgccagccacctcctgtgtgccccacgccaaagtgcccagagccatgtccacccccgaagtgccctgagccctgcccaccaccaaagtgtccacagccctgcccacctcagcagtgccagcaaaaatgtcctcctgtgacaccttccccaccctgccagccaaagtgtccacccaagagcaagtaacagcttcagaattcatcaggagcatgaaaggataaggataattggctcaccttgttccacagcttcacctgcatcttctcatcaaagcctaccatggatacacagttagcttctttcctcttagccagtgatctgcccatgatgatccctgatagcaaaaggtttcctttctgaggctgccatattgccactgtccaggtggagactgagaaaggaagtcctcagcagtgtcagttcccagagctttggaagaaggaccagcagctctgtccctgggaaccatcaaaaaatgctgttgatgttttctgtgtctgtctgtcacctgggcatgggcttctaacacctgtgcaattgtcacttttctttcactccctgaataaaatatctttgcatacgta

SEQ ID NO: 1669 - DNA, 788 bp, Homo sapiens
  source 1..788: mol_type = genomic DNA
ctgtagtacacatccttgatggcaccaagtagcaaacgtgctgtggagactagatctcactctcaaatctgtcctgggatgcaagtgcctctacgaatgtggtgcagaagctacaaatgtggtgcagaagacagcttcaaagaggaaaggaatataggtgccaagagcctgcaatccttcccaaacagccctttgttctgtgctcaagtcaacccactgggactttactacagataatgataagagaaatggcttgtgagattgctcatgatcctgagactccagcaggatgtcttatcaacagcagcagtgcaagcagccctgccagccacctcctgtgtgccccacgccaaagtgcccagagccatgtccacccccgaagtgccctgagccctgcccatcaccaaagtgtccacagccctgcccacctcagcagtgccagcagaaatatcctcctgtgacaccttccccaccctgccagccaaagtgtccacccaagagcaagtaacagcttcaggattcatcaggagcatgagaggataaggataattggctcacctcgttccacagctccacttgcatcttctcaccaaagccttccatggatgcacagggagcttctttctccttaacctgtggcctgcctgtgatgatctgtgacagcaaaagattccctttctgaggctgccatactgccactgtccaggtggagctaagaaaaggaagtcctcagctgtgccagctcccagagcttcggaagaaagagcagcagctctctccctgggaac

SEQ ID NO: 1670 - DNA, 800 bp, Homo sapiens
  source 1..800: mol_type = genomic DNA
aggctgtagtacacatccttgatggcaccaagtagcaaacgtgctgtggagactagatctcactctcaaatctgtcctgggatgcaagtgcctctacgaatgtggtgcagaagctacaaatgtggtgcagaagacagcttcaaagaggaaaggaatataggtaaaaatctgaggttttatctgagaaaaaggtggcaaagaaaatttcagtcttgaacagggtcagcagatagcacaatgtggtcagcctgcaaacccagagatcctgagactccagcaggatgtcttatcaacagcagcagtgcaagcagccctgccagccacctcctgtgtgccccacgccaaagtgcccagagccatgtccacccccgaagtgccctgagccctgcccatcaccaaagtgtccacagccctgcccacctcagcagtgccagcagaaatatcctcctgtgacaccttccccaccctgccagccaaagtgtccacccaagagcaagtaacagcttcaggattcatcaggagcatgagaggataaggataattggctcacctcgttccacagctccacttgcatcttctcaccaaagccttccatggatgcacagggagcttctttctccttaacctgtggcctgcctgtgatgatctgtgacagcaaaagattccctttctgaggctgccatactgccactgtccaggtggagctaagaaaaggaagtcctcagctgtgccagctcccagagcttcggaagaaagagcagcagctctctccctgggaaccatcagacaattctgttgat

SEQ ID NO: 1671 - DNA, 782 bp, Homo sapiens
  source 1..782: mol_type = genomic DNA
aggctgtagtacacatccttgatggcaccaagtagcaaacgtgctgtggagactagatctcactctcaaatctgtcctgggatgcaagtgcctctacgaatgtggtgcagaagctacaaatgtggtgcagaagacagcttcaaagaggaaaggaatatagatcctgagactccagcaggatgtcttatcaacagcagcagtgcaagcagccctgccagccacctcctgtgtgccccacgccaaagtgcccagagccatgtccacccccgaagtgccctgagccctgcccatcaccaaagtgtccacagccctgcccacctcagcagtgccagcagaaatatcctcctgtgacaccttccccaccctgccagccaaagtgtccacccaagagcaagtaacagcttcaggattcatcaggagcatgagaggataaggataattggctcacctcgttccacagctccacttgcatcttctcaccaaagccttccatggatgcacagggagcttctttctccttaacctgtggcctgcctgtgatgatctgtgacagcaaaagattccctttctgaggctgccatactgccactgtccaggtggagctaagaaaaggaagtcctcagctgtgccagctcccagagcttcggaagaaagagcagcagctctctccctgggaaccatcagacaattctgttgatgtgttctgtgtctgtctgtcacctggtcatgagcttctaccacctttgcaattgtcatttatctttcactccctgaataaagta

SEQ ID NO: 1672 - DNA, 9623 bp, Homo sapiens
  source 1..9623: mol_type = genomic DNA
accctgaaagctgtttctgtctctaccctacttgttcctctggtgagctaggttactcaaacttgcaaaaaaaaaaatgcctaaactcctacaaggcgtcatcactgtcatcgatgttttctaccaatatgccacccagcatggggagtatgatacgttgaacaaggcagagctgaaagaacttctggaaaatgagtttcatcaaattctgaagaatccaaacgatccagatactgtggatatcatcttgcaaagtctggatcgagaccataacaagaaagtggattttactgagtatcttctgatgatattcaagctggttcaggctcgtaataaaatcattggcaaagattactgccaagtttcagggtcaaagctgagagatgacactcaccagcaccaagaggaacaagaagaaactgaaaaagaggagaacaaacggcaagaatcctcttttagtcattcaagttggagtgcaggagagaatgattcctattccagaaacgtcagaggaagtcttaaacctgggactgaatccatatccagaagactgagttttcaaagagacttttctggccaacataactcctactcaggtcagtcttccagctatggtgagcaaaactccgactcccatcagtcttcaggccgcggccaatgtgggtctgggtcagggcagtctcccaactatggccaacacggctctggctccggacagtcttccagcaatgacacacatgggtctggctcaggccagtcttctggctttagtcaacacaagtctagctcagggcagtcctctggttacagtcagcatggatctggctcaggtcactcctctggctacggacaacacggctctaggtcaggacagtcatctaggggtgaacgacacagatctagctcaggttcgtcttccagctatggtcagcatgggtctggttcccgtcagtctttgggccacggccgacaagggtctggatctcgccagtctcctagccacgtccgacatgggtccggttcggggcactcctccagccacggccaacacgggtctggctcaagttactcttacagccgtggccattatgagtctggctcaggccagacttctggctttgggcaacatgagtctggctcaggacagtcctctggctatagtaagcatggttctggctcaggtcactcctctagccagggacaacatggatctacgtcagggcaggcatcaagctctggccaacatggctccagctcacgtcagtcttccagctatggtcagcatgagtctgcctcccgtcactcttcaggccgcggccaacacagctctggatctggccagtctccaggccacggccagcgtgggtctgggtcagggcagtctcccagctccggccaacatgggactggctttggtcgatcttccagcagtggcccatatgtgtctggttcaggctactcttctggctttggtcaccacgagtctagctcagagcattcctctggttacactcagcatggatctggctcaggtcactcctccggccacggacaacacggctctaggtcaggacagtcatctaggggtgaacgacaaggatctagtgcaggttcatcttccagctatggtcagcatgggtctggctcccgtcaatctttgggacacagccgacatgggtctggatctggccagtctcctagccctagccgtggccgacatgagtctggttccaggcagtcttccagctatggcccacatgggtatggctcagggaggtcttcaagccgtggcccatatgagtctggctccggtcactcttctggcttaggtcaccaagagtctcgctcaggacagtcctctggctacggtcaacacggatctagctcgggtcattcctctacccatgggcaacatggttctacatcaggacagtcatcgagctgtggccaacatggagctacctcaggtcagtcttccagccacggtcagcatggctctggctcaagtcagtcttctcgctatggccaacagggctctggatctggccagtctcctagtcgcggccgacatgggtccgattttgggcactcttccagctacggccaacatgggtctggctccggttggtcttcaagcaatggcccacatgggtctgtctcaggccagtcttccggctttggtcacaagtctggctcagggcagtcctctggttacagtcagcatggatctggctcaagtcactcctccggctacagaaaacacggctctaggtcaggacagtcatctaggagtgaacaacacggatctagctcaggtttgtcttccagctatggtcagcatgggtcgggctcccatcaatcttcgggccacggccgacaagggtctggatctggccactctcctagccgtgtccgacatgggtccagttcagggcactcctccagccacggccaacacgggtctggcacaagttgttcttccagctgtggccattatgagtctggctcaggccaggcttctggttttgggcaacacgagtctggctcaggacagggctatagtcagcatggttctgcctcaggtcacttctctagccagggacgacatggatctacgtcagggcagtcatcaagctccggccaacatgactctagctcaggtcaatcttccagctatggtcagcatgagtctgcctcccatcacgcttcgggccgcggccgacatggctctggatctggccagtctccaggccacggccagcgtgggtctgggtcagggcagtctcccagctatggccgacatgggtctggctccggtcggtcttccagcagtggccgacatgggtctggctcaggccagtcttctggctttggtcacaagtctagctcagggcagtcctctggttacactcagcatggatctggctcaggtcactcctccagctacgaacaacacggctctaggtcaggacagtcatctaggagcgaacaacatggatctagctcaggttcgtcttccagctatggtcagcatgggtctggctcccgtcagtctttgggccacggccaacatgggtctggatctggccagtctcctagccctagccgtggccgacatgggtctggttccgggcagtcttccagctatggcccatataggtctggctcagggtggtcttcaagccgtggcccatatgagtctggctccggtcactcttctggcttaggtcaccgagagtctcgctcaggacagtcctctggctacggtcaacatggatctagctcaggtcattcctctacccatgggcaacacggttctacatcaggacagtcatcgagctgtggccaacatggagctagctcaggtcagtcttccagccacggtcagcatggctctggctcaagtcagtcttctggctatggccgacagggctctggatctggccagtctccaggccacggccagcgtgggtctgggtcaaggcagtctcccagctacggccgacatgggtctggctccggtcggtcttccagcagtggccaacatgggtctggcttaggcgagtcttctggctttggtcaccacgagtctagctcagggcagtcctctagttacagtcagcatgggtctggctcaggtcactcctctggctacggacaacacggctctagatcaggacagtcatctaggggtgaacgacacggatctagctcaggttcgtcttcccactatggtcagcatgggtctggctcccgtcagtcttcgggccacggccgacaagggtctggatctggccattcccctagccgcggccgacatgggtccggtttggggcactcctccagccacggccaacatgggtctggctcaggtcgttcttccagccgtggcccatatgagtctcgctcgggtcactcttctgtctttggtcaacatgagtctggctcaggacattcctctgcttacagtcagcatggtagtggctcagggcacttctgtagccaaggacagcatggttctacatcaggacagtcatcaacctttgaccaggagggatctagcacaggccagtcttccagctatggccaccgtggctctggctccagtcagtcttctggctatggccgacatggggctggatctggccagtctcctagtcgcggccgacatgggtccggttctgggcactcttccagctacggccaacatgggtctggctccggttggtcttccagcagtggccgacatgggtctggctcaggtcagtcttctggatttggtcaccacgagtctagctcatggcagtcctctggttgcactcagcatggatctggctcaggtcactcctccagctacgaacaacacggctctaggtcaggacagtcatctaggggtgaacgacacggatctagctcaggttcatcttccagctatggtcagcatgggtctggctcccgtcagtctttgggccacggccaacatgggtctggatctggccagtctcctagccctagccgtggccgacatgggtctggttctgggcagtcttccagctacagcccatatgggtctggctcagggtggtcttccagccgtggcccatatgagtctggctccagtcactcttctggcttaggtcaccgagagtctcgctcaggacagtcctctggctacggtcaacatggatctagctcaggtcattcctctacccatgggcaacatggttctacatcaggacagtcatcgagctgtggccaacatggagctagctcaggtcagtcttccagccacggtcagcatggctctggctcaagtcagtcttctggctatggccgacagggctctggatctggccagtctccaggccacggccagcgtgggtctgggtcaaggcagtctcccagctacggccgacatgggtctggctccggtcggtcttccagcagtggccaacatgggtctggcttaggcgagtcttctggctttggtcaccacgagtctagctcagggcagtcctctagttacagtcagcatgggtctggctcaggtcactcctctggctacggacaacacggctctagatcaggacagtcatctaggggtgaacgacacggatctagctcacgttcgtcttcccgctatggtcagcatgggtctggctcccgtcagtcttcgggccacggccgacaagggtctggatctggccagtcccctagccgcggccgacatgggtccggtttggggcactcctccagccacggccaacatgggtctggctcaggtcgttcttccagccgtggcccatatgagtctcgctcgggtcactcttctgtctttggtcaacatgagtctggctcaggacattcctctgcttacagtcagcatggtagtggctcagggcacttctgtagccaaggacagcatggttctacatcaggacagtcatcaacctttgaccaggagggatctagcacaggtcagtcttccagccacggtcagcatggctctggctcaagtcagtcttctagctatggccaacagggctctggatctggccagtctcctagtcgcggccgacatgggtccggttccgggcactcttccagctacggccaacatgggtctggctccggttggtcttccagcagtggccgacatgggtctggctcaggtcagtcttctggatttggtcaccatgagtctagctcatggcagtcctctggttacactcagcatggatctggctcaggtcactcctccagctacgaacaacacggctctaggtcaggacagtcatctaggggtgaacaacacggatctagctcaggttcatcttccagctatggtcagcatgggtctggctcccgtcagtctttgggccacggccaacatgggtctggatctggccagtctcctagccctagccgtggccgacatgggtctggttctgggcagtcttccagctacggcccatatgggtctggctcagggtggtcttccagccgtggcccatatgagtctggctccggtcactcttctggcttaggtcaccgagagtctcgctcaggacagtcctctggctacggtcaacatggatctagctcaggtcattcctctacccatgggcaacatggttctgcatcaggacagtcatcgagctgtggccaacatggagctagctcaggtcagtcttccagccacggtcagcatggctctggctcaagtcagtcttctggctatggccgacagggctctggatctggccagtctccaggccacggccagcgtgggtctgggtcaaggcagtctcccagctatggccgacatgggtctggctccggtcggtcttccagcagtggccaacatgggcctggcttaggcgagtcttctggctttggtcaccacgagtctagctcagggcagtcctctagttacagtcagcatgggtctggctcaggtcactcctctggctacggacaacacggctctagatcaggacagtcatctaggggtgaacgacacggatctagctcaggttcgtcttcccgctatggtcagcatgggtctggctcccgtcagtcttcgggccacggccgacaagggtctggatctggccattcccctagccgcggccgacatgggtccggttcggggcactcctccagccacggccaacatgggtctggctcaggtcgttcttccagccgtggcccatatgagtctcgctcgggtcactcttctgtctttggtcaacatgagtctggctcaggacattcctctgcttacagtcagcatggtagtggctcagggcacttctgtagccaaggacagcatggttctacatcaggacagtcatcaacctttgaccaggagggatctagcacaggtcagtcttccagccacggtcagcatggctctggctcaagtcagtcttctagctatggccaacagggctctggatctggccagtctcctagtcgcggccgacatgggtccggttccgggcactcttccagctacggccaacatgggtctggctccggttggtcttccagcagtggccgacatgggtctggctcaggtcagtcttctggatttggtcaccacgagtctagctcatggcagtcctctggttacactcagcatggatctggctcaggtcactcctccagctacgaacaacacggctctaggtcaggacagtcatctaggggtgaacgacacggatctagctcaggttcatcttccagctatggtcagcatgggtctggctcccgtcagtctttgggccacggccaacatgggtctggatctggccagtctcctagccctagccgtggccgacatgggtctggttctgggcagtcttccagctacagcccatatgggtctggctcagggtggtcttccagccgtggcccatatgagtctggctccggtcactcttctggcttaggtcaccgagagtctcgctcaggacagtcctctggctacggtcaacatggatctagctcaggtcattcctctacccatgggcaacatggttctacatcaggacagtcatcgagctgtggccaacatggagctagctcaggtcagtcttccagccacggtcagcatggctctggctcaagtcagtcttctggctatggccgacagggctctggatctggccagtctccaggccacggccagcgtgggtctgggtcaaggcagtctcccagctacggccgacatgggtctggctccggtcggtcttccagcagtggccaacatgggtctggcttaggcgagtcttctggctttggtcaccacgagtctagctcagggcagtcctctagttacagtcagcatgggtctggctcaggtcactcctctggctacggacaacacggctctagatcaggacagtcatctaggggtgaacgacacggatctagctcaggttcgtcttcccactatggtcagcatgggtctggctcccgtcagtcttcgggccacggccgacaagggtctggatctggccagtcccctagccgcggccgacatgggtccggtttggggcactcctccagccacggccaacatgggtctggctcaggtcgttcttccagccgtggcccatatgagtctcgcttgggtcactcttctgtctttggtcaacatgagtctggctcaggacattcctctgcttacagtcagcatggtagtggctcagggcacttctgtagccaaggacagcatggttctacatcaggacagtcatcaacctttgaccaggagggatctagcacaggccagtcttccagctatggccaccgtggctctggctccagtcagtcttctggctatggccgacatggggctggatctggccagtctcttagccacggccgacacgggtctggttcagggcagtcttccagctacggccaacatgggtctggctcaggacagtcctctggttatagtcagcatggaagtggctcagggcaagatgggtattcttattgcaaaggaggaagtaaccatgatgggggaagttctggctcatattttctcagttttcctagtagcacttcaccctatgaatatgtccaagagcagaggtgctacttttatcagtgaataataaacataaatgcaatttactcaagtagcaatttaagaaataggaaagtcatctatgaattcatcatgaaagacaagcaatccatcatgaaattcgttctaaaagtgaatcaatgcatttctgtctctttctttagagcctaaaactgtagcatatatcttgttatggggttccttccaaagactgttaggcatttgtgctactttgttagaaaatactgagtggaataacttgttagaatgagggttaaactttgaggaataatgaaaagcttttaaagagctttgggtttagttggagttgtctttttgagagctcatcattcatttatagatggtgccaaagctaaccttacatttcttagaagcaaaatattacaaatgcattaccagtcctagatacaaagctttgttttacagcaattagtgtaccctaatttttagtgtgccccaagtttggtgtgtcccaatttttggtattgtggcagaaggtgaaggctctgaaagcaaagatgcagcagcggtagtgtctttacttatcaaaaccatcaagtcctttttcttgggtatatatttaatcagtaagttaattagtggcataaaaaagtagcatcagggtcttttcccaagccagtgagcaagagcattatttcataaagaatagggatttatcatttcaggaaaaaaaaaaacattcaaatgtgggctttagcttgttttcagcagaaagatcttgctccctatttctaagaggctgctcaatattgggaaatatattgaggagttattccatggaaatacaatgctttccacctactactgtagttcaataacgtttccacctgaaaaaatatcatccatgcccagatgaaaaggaagagtatctgtcactgctacatagttccttaatttgactgtaacacatttgtttcaagtctttggattcaaacaaccggattgtattaaaattgacaataaataaatgttgatt

SEQ ID NO: 1673 - DNA, 1462 bp, Homo sapiens
  source 1..1462: mol_type = genomic DNA
atggcggccccaacggccgtccaggacgtggagcgaaatgagctcgggcgctgacggcggcggtggcgctgcggtggcggcgcggtcggacaagggcagtcccggggaggacggtttcgtcccgtcggcgctggggacccgcgagcattgggatgctgtctatgagagagaactgcaaactttccgagaatatggagatacaggtgaaatctggtttggagaagagagtatgaatcgactaataaggtggatgcagaaacacaagattccactggatgcttcagtgcttgatattggaactggaaatggtgttttcctggttgaacttgcaaaatttggtttctctaatattactggaattgattactctccttctgcaattcagctttctggaagtattatagaaaaagaaggtttatctaacattaagttaaaggtagaagactttttgaatctctccacacagctgtctggatttcatatttgtattgacaaagggacttttgatgccataagccttaatcctgacaatgcaattgagaagaggaagcaatatgtgaaatctctctccagggtgttgaaagtaaaaggcttttttctaataacgtcatgtaattggaccaaggaagagttgctaaatgaattcagtgaaggttggagtacagtggcaggattttggctcactgcagccttgacttcctgggctcaagcgatcttttccacttcagcctcccgagtaggtggaactacaggcacacatcatcatgcctggataatttttgtatttttagcagagacgaggttttgccatgttgtccaggctggtctggaactcctgggctcaagtgattctcccacctggcctcccaaagtgctgggattataccatgccaggccctcgttggcattttagatttgaacttctcgaagagctaccaacacccaagttcagctttggaggcagatctggaaacagtgtagcagcattggttttccaaaaaatgtgagactttttcttggacgaattcaggtagctacacagaatctacacagcaaagttaacctgacacagaaaatccttgtgcaaataaatgcttagtaagtacacaggatgcacatgttgaatagagtatactggattggtgaaagaaaataataataatgagcatctaagtggttgggttttagagatcaatcaagaataattttaattttcttttgtatttgaaatgtaaatagttttcttttcgattaaaaaaatttcctataactgctaaacagttaaaaactttaaagtagtaaatgagtttatagaaagcatgtattcttgatttttgtgccttggtaaagttgataactatttatgaatatttgaccaaattattccagcatcagaataataagcaaaataactttgttagtgttttgttagactgtttatgaaatataacaagaaatacta

SEQ ID NO: 1674 - DNA, 1522 bp, Homo sapiens
  source 1..1522: mol_type = genomic DNA
gaggagcagggccgggcgccatggcaccgtggggcaagcggctggctggcgtgcgcggggtgctgcttgacatctcgggcgtgctgtacgacagcggcgcgggcggcggcacggccatcgccggctcggtggaggcggtggccagactgaagcgttcccggctgaaggtgaggttctgcaccaacgagtcgcagaagtcccgggcagagctggtggggcagcttcagaggctgggatttgacatctctgagcaggaggtgaccgccccggcaccagctgcctgccagatcctgaaggagcaaggcctgcgaccatacctgctcatccatgacggagtccgctcagaatttgatcagatcgacacatccaacccaaactgtgtggtaattgcagacgcaggagaaagcttttcttatcaaaacatgaataacgccttccaggtgctcatggagctggaaaaacctgtgctcatatcactgggaaaagggcgttactacaaggagacctctggcctgatgctggacgttggtccctacatgaaggcgcttgagtatgcctgtggcatcaaagccgaggtggtggggaagccttctcctgagtttttcaagtctgccctgcaagcgataggagtggaagcccaccaggcccagtgacgagcaccatccggaagtgaaggctgatgggtacgtggacaacctcgcagaggcagtggacctgctgctgcagcacgccgacaagtgatggcctcctgggagagccccgcctcctccacccctgcctctcctccacccctgcctcccctccacccctgcctctcctccacccgcccaggagagccccacctcctccacccctgcctctcctccacccctgcctcccctccacctgccccagtgcccagaccaaccaaggccctgacagccctgccttctgccctctgccctgcatgggcaggcatttgttccctacctgggtggcctgctcccctgcctgggccctgacttcagctccctgtagtgaagtccaggagggtgggacaggcctgtcaggcctctgggaatctcccaaatcccagaactcaccactcaccatgggcctttaaatgcagtaaactccacctaaccagattcaggggcactatgcccactgcctcctcttcagactctttgcatttcagtgaagagcctggaagaaacccaggggcctcctatgcacagatcttgcagcccagaaccaagtcagcctccctgcgactgcccaggcacactgcccaccaccccacccccgaaacaatgccagcccgctgctttttctatcctcccagtcacctttgcagacaaagaccaggggcagctcccgagggcactgtgaaggctcccatgccacacagtgagaactgtagcctctgcgtccaaggcacacagggtactttctggacccactgctggacagacttgaaggtgtcatgcccggtgtgtgcaggaggaaactaacagttcagtaaactctgccttgaccagca

SEQ ID NO: 1675 - DNA, 1622 bp, Homo sapiens
  source 1..1622: mol_type = genomic DNA
gcggagctgaggagcagggccgggcgccatggcaccgtggggcaagcggctggctggcgtgcgcggggtgctgcttgacatctcgggcgtgctgtacgacagcggcgcgggcggcggcacggccatcgccggctcggtggaggcggtggccagactgaagcgttcccggctgaaggtgaggttctgcaccaacgagtcgcagaagtcccgggcagagctggtggggcagcttcagaggctgggatttgacatctctgagcaggaggtgaccgccccggcaccagctgcctgccagatcctgaaggagcaaggcctgcgaccatacctgctcatccatgacggagtccgctcagaatttgatcagatcgacacatccaacccaaactgtgtggtaattgcagacgcaggagaaagcttttcttatcaaaacatgaataacgccttccaggtgctcatggagctggaaaaacctgtgctcatatcactgggaaaagggcgttactacaaggagacctctggcctgatgctggacgttggtccctacatgaaggcgcttgagtatgcctgtggcatcaaagccgaggtggtggggaagccttctcctgagtttttcaagtctgccctgcaagcgataggagtggaagcccaccaggccgtcatgattggggacgatatcgtgggcgacgtcggcggtgcccagcggtgtggaatgagagcgctgcaggtgcgcaccgggaagttcaggcccagtgacgagcaccatccggaagtgaaggctgatgggtacgtggacaacctcgcagaggcagtggacctgctgctgcagcacgccgacaagtgatggcctcctgggagagccccgcctcctccacccctgcctctcctccacccctgcctcccctccacccctgcctctcctccacccgcccaggagagccccacctcctccacccctgcctctcctccacccctgcctcccctccacctgccccagtgcccagaccaaccaaggccctgacagccctgccttctgccctctgccctgcatgggcaggcatttgttccctacctgggtggcctgctcccctgcctgggccctgacttcagctccctgtagtgaagtccaggagggtgggacaggcctgtcaggcctctgggaatctcccaaatcccagaactcaccactcaccatgggcctttaaatgcagtaaactccacctaaccagattcaggggcactatgcccactgcctcctcttcagactctttgcatttcagtgaagagcctggaagaaacccaggggcctcctatgcacagatcttgcagcccagaaccaagtcagcctccctgcgactgcccaggcacactgcccaccaccccacccccgaaacaatgccagcccgctgctttttctatcctcccagtcacctttgcagacaaagaccaggggcagctcccgagggcactgtgaaggctcccatgccacacagtgagaactgtagcctctgcgtccaaggcacacagggtactttctggacccactgctggacagacttgaaggtgtcatgcccggtgtgtgcaggaggaaactaacagttcagtaaactctgccttgaccagca

SEQ ID NO: 1676 - DNA, 6054 bp, Homo sapiens
  source 1..6054: mol_type = genomic DNA
agactaccggcggcgacgaccacaggagcatggcggacaccgacctgttcatggaatgtgaggaggaggagttggagccatggcagaaaatcagtgatgtcattgaggactctgtagttgaagattataattcagtggataaaactaccacagtttctgtgagccagcagccagtctcggctccagtgcccatcgctgcccatgcttctgttgctgggcacctctctacatccaccaccgttagtagcagcggggcacagaacagcgacagtacaaagaagactcttgtcacactaattgccaacaacaatgccccaggtacccagtttgttaagccgacagttggagttccacaagtgttctcccagatgacccctgtgaggccaggctccacaatgcctgtgaggcccaccaccaacaccttcaccaccgtcatcccggccactcttaccattcgaagcaccgtcccacagtcccagtcccagcagaccaagtccactcccagcacttctaccactcccactgccacacagccaacctcactggggcaactagctgttcagtctccaggccagtcaaaccagaccacgaatcccaagctagctccctccttcccctctccacctgcagtgagcattgccagctttgtcactgtgaagcgacctggtgttacaggcgaaaatagcaatgaagtggccaaattggtgaatacccttaacaccatcccttccctgggccagagtcctgggccagtggtggtgtccaacaacagctctgctcatggctctcaaagaaccagcggacctgagtcttcaatgaaagtgacctcttccatcccagtatttgacctccaggatggtggacggaaaatatgtccacgatgtaatgctcaatttcgtgttactgaagctttgagaggtcacatgtgttactgttgcccagaaatggttgaataccagaagaaaggaaagtccctggattcagaacccagtgtcccatcagcagcaaagcccccatcccctgagaaaacagctcctgttgcttccacaccctcttctacacctattcctgctctgtcaccgcctaccaaagtaccagaaccaaatgagaacgtgggcgatgccgtccagaccaaactcattatgcttgtagatgacttctactatggacgggatggtggcaaagtagcccagctcacaaatttccctaaggtcgccacatctttccgatgcccacattgtaccaaaaggctaaaaaacaatattcgattcatgaaccatatgaaacaccacgtagaactcgatcagcagaacggtgaggtagatggtcacactatctgccagcactgttaccgccagttttccactcccttccagcttcagtgccacttggaaaatgttcatagtccctatgaatctactaccaagtgcaagatctgtgaatgggcgtttgaaagtgagccactatttctccagcatatgaaggatactcataagcctggagagatgccttatgtttgccaggtgtgtcaatatcgctcctcactctactctgaggtagatgtccattttcggatgatccatgaggatacccggcatctgctctgcccttattgcctgaaggtcttcaaaaatggcaatgcattccaacagcattacatgaggcaccagaagagaaatgtttatcactgcaacaaatgccggctgcagtttctctttgccaaggacaaaattgaacacaagcttcaacaccataaaaccttccgtaaacccaagcagctggagggcttgaaaccaggcaccaaggtgacaatccgggcttcccgagggcagccacgaactgttcctgtatcctctaatgatacacctcccagcgccttgcaggaggcagcaccgctgacctcctcaatggaccctctgcctgtcttcctttatccccctgtccagcgcagcatccagaagagagctgttaggaaaatgagtgtcatgggccggcagacatgcctggagtgcagcttcgagatcccagacttccctaatcatttccctacttacgtacactgctctctgtgtcgctatagcacctgctgttctcgagcttatgccaaccacatgatcaacaatcatgttccacggaagagccccaagtatttggctttgtttaaaaattctgtgagtggaatcaagctggcctgcacttcatgtacctttgttacctctgtgggcgatgctatggccaagcatttggtattcaacccctctcacagatccagcagcatcctgccacggggactcacttggatagctcactcaaggcatggccagactcgtgaccgagtgcatgaccggaacgtgaagaatatgtaccctcctccttccttccccactaacaaagctgccactgtgaaatctgcgggggccaccccagctgagcctgaagagctactaactcccttagccccagcactcccatcaccagcctcaactgcaaccccaccaccaacccccactcacccgcaggctttagcccttccaccgctggctacagagggagccgaatgtctgaatgttgatgatcaggatgaagggagcccagtcacccaagaacctgagctagcatcaggtggtggtggtagtggtggagttggcaaaaaggagcagctgtctgtgaagaagcttcgagtagtactgtttgctctatgctgcaatacagaacaggcagctgaacacttccgaaatccccagcgacgtattcgccgttggcttcgacgtttccaggcctcccagggggagaatctagagggcaaatatctgagctttgaggcagaagagaaactggctgagtgggtgctaacccagcgcgaacaacagctacctgtaaatgaggagaccttgttccagaaggccaccaaaataggacgttctttggaaggggggtttaagatctcctatgagtgggctgtgcgtttcatgctgcggcaccacctgactccccatgcccggcgagctgtggcccacaccctacctaaggatgtagcagagaatgcaggactcttcattgattttgtacaacggcagattcacaaccaggacttacccttgtctatgattgtggctattgatgagatctctttgttcctggatacagaggtgctgagcagtgatgatcgaaaggagaatgccctgcagacagtgggcacaggggaaccttggtgtgatgtagtcctagccattctggcagatggcactgtccttcccaccctggttttctacagagggcagatggatcagcctgctaacatgccagactccatattgctagaggcaaaggagagtggctacagtgatgacgagatcatggagctgtggtcaactcgagtgtggcagaagcacacagcttgccagcgcagcaaaggcatgcttgtgatggactgtcatcgcactcacttgtcagaagaggtactggctatgcttagtgcctctagcactttgcctgcagtggtcccagcaggctgtagctccaaaattcagccattagatgtatgcatcaaaagaactgtcaagaacttcctgcataaaaaatggaaggaacaggctcgggaaatggcagatactgcatgtgattctgatgtcctgcttcagctggtgcttgtctggctgggtgaagtgctaggtgtcattggggactgtccagagctagttcagcgctccttcctggtggctagtgttctgcctggccccgatggcaacattaactcacctacaagaaatgctgacatgcaggaggagctaattgcctccctagaggagcaactgaagctgagtggggaacattctgagtcttccactccacgacccagatcatctcctgaagagacaattgagcctgaaagtcttcaccagctctttgagggtgaaagtgagaccgagtctttctatggctttgaagaagctgacctagatctgatggagatttgagtgttggggtcatgagggggtgtggagtgagggtgggaacatgtgagggagggtaaaggggcttagggaaaagggggcataccaggtggggtatttggtttctattttttaattttataccaccactcccccctgaagttgacttacacttccctgtggatttgtggattaattaggaaaaccaatagtaatcacgtctgagccaaggagctggcccattggtcattcacttctgctaaaaacaggtttttgtgactttttttttttttaaatttaaatcactgtgtttggtatttttctgacaaaattaagaaaaagaaaaaaaattatttgtgggcaaatgttaaatttttttgtttccccttttacctcaattgtatcatagtactgggtttttttgtttgttttattgtgtggccaatgtctttgggcatgatgctatctaatcattgttaatgtgagaacatttctgaagatgggaaagacaaattatgtagctcacaaactggtttattatatatatggataaaaaacttttttcattgtggtcttaacacttttatataaaaatgaaaatggaaaaaaagtcccactgaactctctcttccttctccttttctttccttccctctccagagatgttggtttctacagcaaccctagatataaaattgtggctttaaaaatgcatgaaaccacctttaattatccagaatgaatagatttgtcttttcctcaccaccttccctccaaaacatgacataaacaatattttttgcacttgtgatccttggcccctttccccattctcaacaccatccatccctctggacaaaggatcatacaggtgttattagcaagcaagagatactgaagcgatcaaacagttttagggtggaagccattcccagtttgagtcttcatcctgtaagcccccaggggcagtccctgctttactgaacttcatcctgttagatggagagcatgcctgtttaagggattactggtcctacagccaggagctaattgttcaagaagtgttgaactttaaaaagacaagaccacttgttgaaatccagcgtgctctgtggctttcccctatttctcttaatacttagggaagaatctgacaggaagaagcgcacaggggtgtgcacaaagaaaatgacatgaatctttatttttcactgccagcttcaaggaaagaaaattttttctacaatttgcatgagggatttttttaattgtatgtactcatggttgtaaaccaaaacgtactgtaccgtacagagaaaaggagcaaaaaaccaagtcttctgtttatcctgaggctttccacaatgttcccctcctgtgagccaaggaggcaaactgcacaagcttgtaaatggttcgtctttaaaatgtacataagtggaacatttaataaaatgaggggaaatggatttataaacttgttttttttctaggtgaccctgtttaataggctttcacagactggggaatgctcaagatgtgatgggcctggtggtacaggtgtgacatttgttaccacccatttctcccaccccaccctgcttttttgtttgtttgttttttcatcccccagcacactataatatagtgaactggaaaagtcccttccagaaacagcttggccagctttgtgaacctttgacatctgaaaacaaccaaggatccatctgggcttctcttccccagctttttgcctgatgccattttattgacagacaatggactttgaagtcagcctttgcctttgagaaagttcaagaactatggttggtcacgtctatctacaacctaatcctactctttggtagtctctgcagcagccacagccttagcagagctggggttcctgtcttctgcacacgattgactttcttgatgggtaattttttttaagattataccaacagtggatcagctgggttttggccaggaagttgtctttgtggactctgcctgcatggcttagtagtagaaggaaatttttttttggttttgttttttataattcagtttaatcaataaacatgtatttattgactgt

SEQ ID NO: 1677 - DNA, 3331 bp, Homo sapiens
  source 1..3331: mol_type = genomic DNA
cgcagccggggcctggtgcagcctccgcggccgctgtcagggaagcgcaggcggccaatggaacccgggagcggtcgctgctgctgaggcggcagtgtcggcagtccaaccgcgactgcccgcaccccctccgcgggggtcccccagaggatcaactaaaccttgaactaagaagaaaaatgtgttgtgagcagggggagcctcagctgcctcaggccgttcaggacagaagggtgtttctgaaggccggagcaagttttgaagaagtccctatcagattacacttggttgactactccggagcagccactaagagggatgaacaggcctgcgtggaaattgaatgagattagttgagtccacgctccatgagaatgctgaacaccatccaaagcagcaaattgagattccttgatttggggaagaggtttgggaggaacccttcaataattggcatgggacaagaggggacccagtccaagtgtatttgggactcgcagtagggaggaacaattcagagagagcttggaagctcgaagtctggctgtggccatgggagatacagtagtggagcctgcccccttgaagccaacttctgagcccacttctggcccaccagggaataatggggggtccctgctaagtgtcatcacggagggggtcggggaactatcagtgattgaccctgaggtggcccagaaggcctgccaggaggtgttggagaaagtcaagcttttgcatggaggcgtggcagtctctagcagaggcaccccactggagttggtcaatggggatggtgtggacagtgagatccgttgcctagatgatccacctgcccagatcagggaggaggaagatgagatgggggccgctgtggcctcaggcacagccaaaggagcaagaagacggcggcagaacaactcagctaaacagtcttggctgctgaggctgtttgagtcaaaactgtttgacatctccatggccatttcatacctgtataactccaaggagcctggagtacaagcctacattggcaaccggctcttctgctttcgcaacgaggacgtggacttctatctgccccagttgcttaacatgtacatccacatggatgaggatgtgggtgatgccattaagccctacatagtccaccgttgccgccagagcattaacttttccctccagtgtgccctgttgcttggggcctattcttcagacatgcacatttccactcaacgacactcccgtgggaccaagctacggaagctgatcctctcagatgagctaaagccagctcacaggaagagggagctgccctccttgagcccggcccctgacacagggctgtctccctccaaaaggactcaccagcgctctaagtcagatgccactgccagcataagtctcagcagcaacctgaaacgaacagccagcaaccctaaagtggagaatgaggatgagcctgttcgactggctcctgagagagaattcatcaagtccctgatggcgatcggcaagcggctggccacgctccccaccaaagagcagaaaacacagaggctgatctcagagctctccctgctcaaccataagctccctgcccgagtctggctgcccactgctggctttgaccaccacgtggtccgtgtaccccacacacaggctgttgtcctcaactccaaggacaaggctccctacctgatttatgtggaagtccttgaatgtgaaaactttgacaccaccagtgtccctgcccggatccccgagaaccgaattcggagtacgaggtccgtagaaaacttgcccgaatgtggtattacccatgagcagcgagctggcagcttcagcactgtgcccaactatgacaacgatgatgaggcctggtcggtggatgacataggcgagctgcaagtggagctccccgaagtgcataccaacagctgtgacaacatctcccagttctctgtggacagcatcaccagccaggagagcaaggagcctgtgttcattgcagcaggggacatccgccggcgcctttcggaacagctggctcataccccgacagccttcaaacgagacccagaagatccttctgcagttgctctcaaagagccctggcaggagaaagtacggcggatcagagagggctccccctacggccatctccccaattggcggctcctgtcagtcattgtcaagtgtggggatgaccttcggcaagagcttctggcctttcaggtgttgaagcaactgcagtccatttgggaacaggagcgagtgcccctttggatcaagccatacaagattcttgtgatttcggctgatagtggcatgattgaaccagtggtcaatgctgtgtccatccatcaggtgaagaaacagtcacagctctccttgctcgattacttcctacaggagcacggcagttacaccactgaggcattcctcagtgcacagcgcaattttgtgcaaagttgtgctgggtactgcttggtctgctacctgctgcaagtcaaggacagacacaatgggaatatccttttggacgcagaaggccacatcatccacatcgactttggcttcatcctctccagctcaccccgaaatctgggctttgagacgtcagcctttaagctgaccacagagtttgtggatgtgatgggcggcctggatggcgacatgttcaactactataagatgctgatgctgcaagggctgattgccgctcggaaacacatggacaaggtggtgcagatcgtggagatcatgcagcaaggttctcagcttccttgcttccatggctccagcaccattcgaaacctcaaagagaggttccacatgagcatgactgaggagcagctgcagctgctggtggagcagatggtggatggcagtatgcggtctatcaccaccaaactctatgacggcttccagtacctcaccaacggcatcatgtgacacgctcctcagcccaggagtggtggggggtccagggcaccctccctagagggcccttgtctgagaaaccccaaaccaggaaaccccacctacccaaccatccacccaagggaaatggaaggcaagaaacacgaaggatcatgtggtaactgcgagagcttgctgaggggtgggagagccagctgtggggtccagacttgttggggcttccctgcccctcctggtctgtgtcagtattaccaccagactgactccaggactcactgccctccagaaaacagaggtgacaaatgtgagggacactggggcctttcttctccttgtaggggtctctcagaggttctttccacaggccatcctcttattccgttct

SEQ ID NO: 1678 - DNA, 3340 bp, Homo sapiens
  source 1..3340: mol_type = genomic DNA
gggcctggtgcagcctccgcggccgctgtcagggaagcgcaggcggccaatggaacccgggagcggtcgctgctgctgaggcggcagtgtcggcagtccaaccgcgactgcccgcaccccctccgcgggggtcccccagagcttggaagctcgaagtctggctgtggccatgggagatacagtagtggagcctgcccccttgaagccaacttctgagcccacttctggcccaccagggaataatggggggtccctgctaagtgtcatcacggagggggtcggggaactatcagtgattgaccctgaggtggcccagaaggcctgccaggaggtgttggagaaagtcaagcttttgcatggaggcgtggcagtctctagcagaggcaccccactggagttggtcaatggggatggtgtggacagtgagatccgttgcctagatgatccacctgcccagatcagggaggaggaagatgagatgggggccgctgtggcctcaggcacagccaaaggagcaagaagacggcggcagaacaactcagctaaacagtcttggctgctgaggctgtttgagtcaaaactgtttgacatctccatggccatttcatacctgtataactccaaggagcctggagtacaagcctacattggcaaccggctcttctgctttcgcaacgaggacgtggacttctatctgccccagttgcttaacatgtacatccacatggatgaggatgtgggtgatgccattaagccctacatagtccaccgttgccgccagagcattaacttttccctccagtgtgccctgttgcttggggcctattcttcagacatgcacatttccactcaacgacactcccgtgggaccaagctacggaagctgatcctctcagatgagctaaagccagctcacaggaagagggagctgccctccttgagcccggcccctgacacagggctgtctccctccaaaaggactcaccagcgctctaagtcagatgccactgccagcataagtctcagcagcaacctgaaacgaacagccagcaaccctaaagtggagaatgaggatgaggagctctcctccagcaccgagagtattgataattcattcagttcccctgttcgactggctcctgagagagaattcatcaagtccctgatggcgatcggcaagcggctggccacgctccccaccaaagagcagaaaacacagaggctgatctcagagctctccctgctcaaccataagctccctgcccgagtctggctgcccactgctggctttgaccaccacgtggtccgtgtaccccacacacaggctgttgtcctcaactccaaggacaaggctccctacctgatttatgtggaagtccttgaatgtgaaaactttgacaccaccagtgtccctgcccggatccccgagaaccgaattcggagtacgaggtccgtagaaaacttgcccgaatgtggtattacccatgagcagcgagctggcagcttcagcactgtgcccaactatgacaacgatgatgaggcctggtcggtggatgacataggcgagctgcaagtggagctccccgaagtgcataccaacagctgtgacaacatctcccagttctctgtggacagcatcaccagccaggagagcaaggagcctgtgttcattgcagcaggggacatccgccggcgcctttcggaacagctggctcataccccgacagccttcaaacgagacccagaagatccttctgcagttgctctcaaagagccctggcaggagaaagtacggcggatcagagagggctccccctacggccatctccccaattggcggctcctgtcagtcattgtcaagtgtggggatgaccttcggcaagagcttctggcctttcaggtgttgaagcaactgcagtccatttgggaacaggagcgagtgcccctttggatcaagccatacaagattcttgtgatttcggctgatagtggcatgattgaaccagtggtcaatgctgtgtccatccatcaggtgaagaaacagtcacagctctccttgctcgattacttcctacaggagcacggcagttacaccactgaggcattcctcagtgcacagcgcaattttgtgcaaagttgtgctgggtactgcttggtctgctacctgctgcaagtcaaggacagacacaatgggaatatccttttggacgcagaaggccacatcatccacatcgactttggcttcatcctctccagctcaccccgaaatctgggctttgagacgtcagcctttaagctgaccacagagtttgtggatgtgatgggcggcctggatggcgacatgttcaactactataagatgctgatgctgcaagggctgattgccgctcggaaacacatggacaaggtggtgcagatcgtggagatcatgcagcaaggttctcagcttccttgcttccatggctccagcaccattcgaaacctcaaagagaggttccacatgagcatgactgaggagcagctgcagctgctggtggagcagatggtggatggcagtatgcggtctatcaccaccaaactctatgacggcttccagtacctcaccaacggcatcatgtgacacgctcctcagcccaggagtggtggggggtccagggcaccctccctagagggcccttgtctgagaaaccccaaaccaggaaaccccacctacccaaccatccacccaagggaaatggaaggcaagaaacacgaaggatcatgtggtaactgcgagagcttgctgaggggtgggagagccagctgtggggtccagacttgttggggcttccctgcccctcctggtctgtgtcagtattaccaccagactgactccaggactcactgccctccagaaaacagaggtgacaaatgtgagggacactggggcctttcttctccttgtaggggtctctcagaggttctttccacaggccatcctcttattccgttctggggcccaggaagtggggaagagtaggttctcggtacttaggacttgatcctgtggttggccactggccatgctgctgcccagctctacccctcccagggacctacccctcccagggaccgacccctggcccaagctccccttgctggcgggcgctgcgtgggccctgcacttgctgaggttccccatcatgggcaaggaagggaattcccacagccctccagtgtactgagggtactggcctagccatgtggaattccctaccctgactccttccccaaacccagggaaaagagctctcaattttttatttttaatttttgtttgaaataaagtccttagttagcc

SEQ ID NO: 1679 - DNA, 3934 bp, Homo sapiens
  source 1..3934: mol_type = genomic DNA
ccccgcccccttttctatttctgaacaggcatgttccaggcagctcacccgactccttagattactatggaatcggtagggtcctgaccgctggggaagcaggaaagcgtatcctgggaagaaaggcttggcttggactccggagaagaatactacatcgagacctgctggggaattttattttattttattatttttttggtcttggttgtactgagggaggaagaagaggttgtgtggcccggtcgaacttgtggcagcctgaaggccccctcaggcggcgccgcgggcagccccgcagccggggcctggtgcagcctccgcggccgctgtcagggaagcgcaggcggccaatggaacccgggagcggtcgctgctgctgaggcggcagtgtcggcagtccaaccgcgactgcccgcaccccctccgcgggggtcccccagagcttggaagctcgaagtctggctgtggccatgggagatacagtagtggagcctgcccccttgaagccaacttctgagcccacttctggcccaccagggaataatggggggtccctgctaagtgtcatcacggagggggtcggggaactatcagtgattgaccctgaggtggcccagaaggcctgccaggaggtgttggagaaagtcaagcttttgcatggaggcgtggcagtctctagcagaggcaccccactggagttggtcaatggggatggtgtggacagtgagatccgttgcctagatgatccacctgcccagatcagggaggaggaagatgagatgggggccgctgtggcctcaggcacagccaaaggagcaagaagacggcggcagaacaactcagctaaacagtcttggctgctgaggctgtttgagtcaaaactgtttgacatctccatggccatttcatacctgtataactccaaggagcctggagtacaagcctacattggcaaccggctcttctgctttcgcaacgaggacgtggacttctatctgccccagttgcttaacatgtacatccacatggatgaggatgtgggtgatgccattaagccctacatagtccaccgttgccgccagagcattaacttttccctccagtgtgccctgttgcttggggcctattcttcagacatgcacatttccactcaacgacactcccgtgggaccaagctacggaagctgatcctctcagatgagctaaagccagctcacaggaagagggagctgccctccttgagcccggcccctgacacagggctgtctccctccaaaaggactcaccagcgctctaagtcagatgccactgccagcataagtctcagcagcaacctgaaacgaacagccagcaaccctaaagtggagaatgaggatgagcctgttcgactggctcctgagagagaattcatcaagtccctgatggcgatcggcaagcggctggccacgctccccaccaaagagcagaaaacacagaggctgatctcagagctctccctgctcaaccataagctccctgcccgagtctggctgcccactgctggctttgaccaccacgtggtccgtgtaccccacacacaggctgttgtcctcaactccaaggacaaggctccctacctgatttatgtggaagtccttgaatgtgaaaactttgacaccaccagtgtccctgcccggatccccgagaaccgaattcggagtacgaggtccgtagaaaacttgcccgaatgtggtattacccatgagcagcgagctggcagcttcagcactgtgcccaactatgacaacgatgatgaggcctggtcggtggatgacataggcgagctgcaagtggagctccccgaagtgcataccaacagctgtgacaacatctcccagttctctgtggacagcatcaccagccaggagagcaaggagcctgtgttcattgcagcaggggacatccgccggcgcctttcggaacagctggctcataccccgacagccttcaaacgagacccagaagatccttctgcagttgctctcaaagagccctggcaggagaaagtacggcggatcagagagggctccccctacggccatctccccaattggcggctcctgtcagtcattgtcaagtgtggggatgaccttcggcaagagcttctggcctttcaggtgttgaagcaactgcagtccatttgggaacaggagcgagtgcccctttggatcaagccatacaagattcttgtgatttcggctgatagtggcatgattgaaccagtggtcaatgctgtgtccatccatcaggtgaagaaacagtcacagctctccttgctcgattacttcctacaggagcacggcagttacaccactgaggcattcctcagtgcacagcgcaattttgtgcaaagttgtgctgggtactgcttggtctgctacctgctgcaagtcaaggacagacacaatgggaatatccttttggacgcagaaggccacatcatccacatcgactttggcttcatcctctccagctcaccccgaaatctgggctttgagacgtcagcctttaagctgaccacagagtttgtggatgtgatgggcggcctggatggcgacatgttcaactactataagatgctgatgctgcaagggctgattgccgctcggaaacacatggacaaggtggtgcagatcgtggagatcatgcagcaaggttctcagcttccttgcttccatggctccagcaccattcgaaacctcaaagagaggttccacatgagcatgactgaggagcagctgcagctgctggtggagcagatggtggatggcagtatgcggtctatcaccaccaaactctatgacggcttccagtacctcaccaacggcatcatgtgacacgctcctcagcccaggagtggtggggggtccagggcaccctccctagagggcccttgtctgagaaaccccaaaccaggaaaccccacctacccaaccatccacccaagggaaatggaaggcaagaaacacgaaggatcatgtggtaactgcgagagcttgctgaggggtgggagagccagctgtggggtccagacttgttggggcttccctgcccctcctggtctgtgtcagtattaccaccagactgactccaggactcactgccctccagaaaacagaggtgacaaatgtgagggacactggggcctttcttctccttgtaggggtctctcagaggttctttccacaggccatcctcttattccgttctggggcccaggaagtggggaagagtaggttctcggtacttaggacttgatcctgtggttggccactggccatgctgctgcccagctctacccctcccagggacctacccctcccagggaccgacccctggcccaagctccccttgctggcgggcgctgcgtgggccctgcacttgctgaggttccccatcatgggcaaggaagggaattcccacagccctccagtgtactgagggtactggcctagccatgtggaattccctaccctgactccttccccaaacccagggaaaagagctctcaattttttatttttaatttttgtttgaaataaagtccttagttagccacttgtgtcatttccaggttttctgggggagtgcagggggagatgggtgatgaggtatgaacggatgcctcagtgtccaagatacaaaaggcactacatagaagtttgctttttccctgcctgtcttggtcactaccacctcttccctgagaagggcgggccttccatgttctctcacccgcttcaactccacattgtccaagtcacagaaaaagagaggcctgaatggagattcgaccacaaacagttttaatggtctggttttctccctagttccccaactgtttgttagtattattattactacaagaataaaggattcctgagagcctgtc

SEQ ID NO: 1680 - DNA, 3983 bp, Homo sapiens
  source 1..3983: mol_type = genomic DNA
agattactatggaatcggtagggtcctgaccgctggggaagcaggaaagcgtatcctgggaagaaaggcttggcttggactccggagaagaatactacatcgagacctgctggggaattttattttattttattatttttttggtcttggttgtactgagggaggaagaagaggttgtgtggcccggtcgaacttgtggcagcctgaaggccccctcaggcggcgccgcgggcagccccgcagccggggcctggtgcagcctccgcggccgctgtcagggaagcgcaggcggccaatggaacccgggagcggtcgctgctgctgaggcggcagtgtcggcagtccaaccgcgactgcccgcaccccctccgcgggggtcccccagaggatcaactaaaccttgaactaagaagaaaaatgtgttgtgagcagggggagcctcagctgcctcaggccgttcaggacagaagggtgtttctgaaggccggagcaagttttgaagaagtccctatcagattacacttggttgactactccggagcagccactaagagggatgaacaggcctgcgtggaaattgaatgagattcttggaagctcgaagtctggctgtggccatgggagatacagtagtggagcctgcccccttgaagccaacttctgagcccacttctggcccaccagggaataatggggggtccctgctaagtgtcatcacggagggggtcggggaactatcagtgattgaccctgaggtggcccagaaggcctgccaggaggtgttggagaaagtcaagcttttgcatggaggcgtggcagtctctagcagaggcaccccactggagttggtcaatggggatggtgtggacagtgagatccgttgcctagatgatccacctgcccagatcagggaggaggaagatgagatgggggccgctgtggcctcaggcacagccaaaggagcaagaagacggcggcagaacaactcagctaaacagtcttggctgctgaggctgtttgagtcaaaactgtttgacatctccatggccatttcatacctgtataactccaaggagcctggagtacaagcctacattggcaaccggctcttctgctttcgcaacgaggacgtggacttctatctgccccagttgcttaacatgtacatccacatggatgaggatgtgggtgatgccattaagccctacatagtccaccgttgccgccagagcattaacttttccctccagtgtgccctgttgcttggggcctattcttcagacatgcacatttccactcaacgacactcccgtgggaccaagctacggaagctgatcctctcagatgagctaaagccagctcacaggaagagggagctgccctccttgagcccggcccctgacacagggctgtctccctccaaaaggactcaccagcgctctaagtcagatgccactgccagcataagtctcagcagcaacctgaaacgaacagccagcaaccctaaagtggagaatgaggatgaggagctctcctccagcaccgagagtattgataattcattcagttcccctgttcgactggctcctgagagagaattcatcaagtccctgatggcgatcggcaagcggctggccacgctccccaccaaagagcagaaaacacagaggctgatctcagagctctccctgctcaaccataagctccctgcccgagtctggctgcccactgctggctttgaccaccacgtggtccgtgtaccccacacacaggctgttgtcctcaactccaaggacaaggctccctacctgatttatgtggaagtccttgaatgtgaaaactttgacaccaccagtgtccctgcccggatccccgagaaccgaattcggagtacgaggtccgtagaaaacttgcccgaatgtggtattacccatgagcagcgagctggcagcttcagcactgtgcccaactatgacaacgatgatgaggcctggtcggtggatgacataggcgagctgcaagtggagctccccgaagtgcataccaacagctgtgacaacatctcccagttctctgtggacagcatcaccagccaggagagcaaggagcctgtgttcattgcagcaggggacatccgccggcgcctttcggaacagctggctcataccccgacagccttcaaacgagacccagaagatccttctgcagttgctctcaaagagccctggcaggagaaagtacggcggatcagagagggctccccctacggccatctccccaattggcggctcctgtcagtcattgtcaagtgtggggatgaccttcggcaagagcttctggcctttcaggtgttgaagcaactgcagtccatttgggaacaggagcgagtgcccctttggatcaagccatacaagattcttgtgatttcggctgatagtggcatgattgaaccagtggtcaatgctgtgtccatccatcaggtgaagaaacagtcacagctctccttgctcgattacttcctacaggagcacggcagttacaccactgaggcattcctcagtgcacagcgcaattttgtgcaaagttgtgctgggtactgcttggtctgctacctgctgcaagtcaaggacagacacaatgggaatatccttttggacgcagaaggccacatcatccacatcgactttggcttcatcctctccagctcaccccgaaatctgggctttgagacgtcagcctttaagctgaccacagagtttgtggatgtgatgggcggcctggatggcgacatgttcaactactataagatgctgatgctgcaagggctgattgccgctcggaaacacatggacaaggtggtgcagatcgtggagatcatgcagcaaggttctcagcttccttgcttccatggctccagcaccattcgaaacctcaaagagaggttccacatgagcatgactgaggagcagctgcagctgctggtggagcagatggtggatggcagtatgcggtctatcaccaccaaactctatgacggcttccagtacctcaccaacggcatcatgtgacacgctcctcagcccaggagtggtggggggtccagggcaccctccctagagggcccttgtctgagaaaccccaaaccaggaaaccccacctacccaaccatccacccaagggaaatggaaggcaagaaacacgaaggatcatgtggtaactgcgagagcttgctgaggggtgggagagccagctgtggggtccagacttgttggggcttccctgcccctcctggtctgtgtcagtattaccaccagactgactccaggactcactgccctccagaaaacagaggtgacaaatgtgagggacactggggcctttcttctccttgtaggggtctctcagaggttctttccacaggccatcctcttattccgttctggggcccaggaagtggggaagagtaggttctcggtacttaggacttgatcctgtggttggccactggccatgctgctgcccagctctacccctcccagggacctacccctcccagggaccgacccctggcccaagctccccttgctggcgggcgctgcgtgggccctgcacttgctgaggttccccatcatgggcaaggaagggaattcccacagccctccagtgtactgagggtactggcctagccatgtggaattccctaccctgactccttccccaaacccagggaaaagagctctcaattttttatttttaatttttgtttgaaataaagtccttagttagccacttgtgtcatttccaggttttctgggggagtgcagggggagatgggtgatgaggtatgaacggatgcctcagtgtccaagatacaaaaggcactacatagaagtttgctttttccctgcctgtcttggtcactaccacctcttccctgagaagggcgggccttccatgttctctcacccgcttcaactccacat

SEQ ID NO: 1681 - DNA, 1333 bp, Homo sapiens
  source 1..1333: mol_type = genomic DNA
gagcgacgggccaattggaggagttgttgttaggccgtcccggagacccggtcgggagggaggaaggtggcaagatggtgttggaaagcactatggtgtgtgtggacaacagtgagtatatgcggaatggagacttcttacccaccaggctgcaggcccagcaggatgctgtcaacatagtttgtcattcaaagacccgcagcaaccctgagaacaacgtgggccttatcacactggctaatgactgtgaagtgctgaccacactcaccccagacactggccgtatcctgtccaagctacatactgtccaacccaagggcaagatcaccttctgcacgggcatccgcgtggcccatctggctctgaagcaccgacaaggcaagaatcacaagatgcgcatcattgcctttgtgggaagcccagtggaggacaatgagaaggatctggtgaaactggctaaacgcctcaagaaggagaaagtaaatgttgacattatcaattttggggaagaggaggtgaacacagaaaagctgacagcctttgtaaacacgttgaatggcaaagatggaaccggttctcatctggtgacagtgcctcctgggcccagtttggctgatgctctcatcagttctccgattttggctggtgaaggtggtgccatgctgggtcttggtgccagtgactttgaatttggagtagatcccagtgctgatcctgagctggccttggcccttcgtgtatctatggaagagcagcggcagcggcaggaggaggaggcccggcgggcagctgcagcttctgctgctgaggccgggattgctacgactgggactgaaggtgaaagagactcagacgatgccctgctgaagatgaccatcagccagcaagagtttggccgcactgggcttcctgacctaagcagtatgactgaggaagagcagattgcttatgccatgcagatgtccctgcagggagcagagtttggccaggcggaatcagcagacattgatgccagctcagctatggacacatctgagccagccaaggaggaggatgattacgacgtgatgcaggaccccgagttccttcagagtgtcctagagaacctcccaggtgtggatcccaacaatgaagccattcgaaatgctatgggctccctggcctcccaggccaccaaggacggcaagaaggacaagaaggaggaagacaagaagtgagactggagggaaagggtagctgagtctgcttaggggactgcatgggaagcacggaatatagggttagatgtgtgttatctgtaaccattacagcctaaataaagcttggcaacttt

SEQ ID NO: 1682 - DNA, 1350 bp, Homo sapiens
  source 1..1350: mol_type = genomic DNA
ggtgaagagcgacgggccaattggaggagttgttgttaggccgtcccggagacccggtcgggagggaggaaggtggcaagatggtgttggaaagcactatggtgtgtgtggacaacagtgagtatatgcggaatggagacttcttacccaccaggctgcaggcccagcaggatgctgtcaacatagtttgtcattcaaagacccgcagcaaccctgagaacaacgtgggccttatcacactggctaatgactgtgaagtgctgaccacactcaccccagacactggccgtatcctgtccaagctacatactgtccaacccaagggcaagatcaccttctgcacgggcatccgcgtggcccatctggctctgaagcaccgacaaggcaagaatcacaagatgcgcatcattgcctttgtgggaagcccagtggaggacaatgagaaggatctggtgaaactggctaaacgcctcaagaaggagaaagtaaatgttgacattatcaattttggggaagaggaggtgaacacagaaaagctgacagcctttgtaaacacgttgaatggcaaagatggaaccggttctcatctggtgacagtgcctcctgggcccagtttggctgatgctctcatcagttctccgattttggctggtgaaggtggtgccatgctgggtcttggtgccagtgactttgaatttggagtagatcccagtgctgatcctgagctggccttggcccttcgtgtatctatggaagagcagcggcagcggcaggaggaggaggcccggcgggcagctgcagcttctgctgctgaggccgggattgctacgactgggactgaagactcagacgatgccctgctgaagatgaccatcagccagcaagagtttggccgcactgggcttcctgacctaagcagtatgactgaggaagagcagattgcttatgccatgcagatgtccctgcagggagcagagtttggccaggcggaatcagcagacattgatgccagctcagctatggacacatctgagccagccaaggaggaggatgattacgacgtgatgcaggaccccgagttccttcagagtgtcctagagaacctcccaggtgtggatcccaacaatgaagccattcgaaatgctatgggctccctggcctcccaggccaccaaggacggcaagaaggacaagaaggaggaagacaagaagtgagactggagggaaagggtagctgagtctgcttaggggactgcatgggaagcacggaatatagggttagatgtgtgttatctgtaaccattacagcctaaataaagcttggcaactttttttccttttttgcttcaaa

SEQ ID NO: 1683 - DNA, 1953 bp, Homo sapiens
  source 1..1953: mol_type = genomic DNA
ctctgtctctcagggcatgagaccagccaggcactgggaaacaaggtttggtgccagagattttggtggcttccaagactgctttttcagagacaggctcatggacacagcacggattgcagttgtcggggcaggtgtggtggggctctccacggctgtgtgcatctccaaactggtgccccgatgctccgttaccatcatttcagacaagtttactccagataccaccagtgatgtggcagccggaatgcttattcctcacacttatccagatacacccattcacacgcagaagcagtggttcagagaaacctttaatcacctctttgcaattgccaattctgcagaagctggagatgctggtgttcatttggtatcagggataaagggaagtggaggctggacactcactcggcgaatagaagacctgtgggaacttcatccgtcctttgacatcgtggtcaactgttcaggccttggaagcagacagcttgcaggagactcaaagattttccctgtaaggggccaagtcctccaagttcaggctccctgggtggagcattttatccgagatggcagtgggctgacatatatttatcctggtacatcccatgtaaccctaggtggaactaggcaaaaaggggactggaatctgtccccggatgcagaaaatagcagagagattctttcccgatgctgtgctctggagccctccctccacggagcctgcaacatcagggagaaggtgggcttgaggccctacaggccaggcgtgcgactgcagacagagctccttgcgcgagatggacagaggctgcctgtagtccaccactatggccatgggagtgggggcatctcagtgcactggggcactgctctggaggccgccaggctggtgagcgagtgtgtccatgccctcaggacccccattcccaagtcaaacctgtagatgacataaaatgacagcaaagagactgagagactgttgatcaaagcacagaacaggttcaaataacttttccactgcatgaaagtttaattagacatttctttgttttcaacattagaagtggtgtaacatgtaagctgagcacggtggcatgcctatagtcccagctacttgagaggctgaggcaggaggattgttgagcccaggagtttgagtgcaatctgggtaacattttttagaggtgccagttcccacctctaaaaaaaacaccaacaacaaaagaaatgatgcaacatgtaggcttacttaggaagtccagcattaatggcatagggcataaagctctattttttgttaaaaatacttcttatagagtaaaatttatttagaactgatgtccaaggacctatgcagatttatatgaatgttggaagctatagagattttgatatcatttggcttataaatccacaggaggagataatgtatggaaaacatttaaatcactgtcaattgcagagctgcctgtgatcttcttaggttatagccaagtcagcaacataattcctctaaataaaattacattgtgctcacacagtgctggattattacatttaattgaagacaaagcatgcttgctcctagtactagcagcaagcttttcctcccctcagctggtaatgatggtaggagacagagatgaagttgcctatgtatgtcatatcaattcaatagctgcctggggtcaaacacctaggggttgtacattccattactgtaaatgattgagagctggtttgtggtatggttggctttgcctaagcatttttgaagatgaacagcatgtgcagccaaagaactaatttgctaattaaggtggaacaatcattctgaatgaaatataatcagagtactccgcagtttgttaagaagtattggggaggaggggaatgtgtctcacaataaaatgagttggaattgttgagttaaatgaatttaacctg

SEQ ID NO: 1684 - DNA, 2130 bp, Homo sapiens
  source 1..2130: mol_type = genomic DNA
ctctgtctctcagggcatgagaccagccaggcactgggaaacaaggtttggtgccagagattttggtggcttccaagactgctttttcagagacaggctcatggacacagcacggattgcagttgtcggggcaggtgtggtggggctctccacggctgtgtgcatctccaaactggtgccccgatgctccgttaccatcatttcagacaagtttactccagataccaccagtgatgtggcagccggaatgcttattcctcacacttatccagatacacccattcacacgcagaagcagtggttcagagaaacctttaatcacctctttgcaattgccaattctgcagaagctggagatgctggtgttcatttggtatcaggttggcagatatttcagagcactccgactgaagaagtgccattctgggctgacgtggttctgggatttcgaaagatgactgaggctgagctgaagaaattcccccagtatgtgtttggtcaggcttttacaaccctgaaatgtgaatgccctgcctacctcccgtggttggagaaaaggataaagggaagtggaggctggacactcactcggcgaatagaagacctgtgggaacttcatccgtcctttgacatcgtggtcaactgttcaggccttggaagcagacagcttgcaggagactcaaagattttccctgtaaggggccaagtcctccaagttcaggctccctgggtggagcattttatccgagatggcagtgggctgacatatatttatcctggtacatcccatgtaaccctaggtggaactaggcaaaaaggggactggaatctgtccccggatgcagaaaatagcagagagattctttcccgatgctgtgctctggagccctccctccacggagcctgcaacatcagggagaaggtgggcttgaggccctacaggccaggcgtgcgactgcagacagagctccttgcgcgagatggacagaggctgcctgtagtccaccactatggccatgggagtgggggcatctcagtgcactggggcactgctctggaggccgccaggctggtgagcgagtgtgtccatgccctcaggacccccattcccaagtcaaacctgtagatgacataaaatgacagcaaagagactgagagactgttgatcaaagcacagaacaggttcaaataacttttccactgcatgaaagtttaattagacatttctttgttttcaacattagaagtggtgtaacatgtaagctgagcacggtggcatgcctatagtcccagctacttgagaggctgaggcaggaggattgttgagcccaggagtttgagtgcaatctgggtaacattttttagaggtgccagttcccacctctaaaaaaaacaccaacaacaaaagaaatgatgcaacatgtaggcttacttaggaagtccagcattaatggcatagggcataaagctctattttttgttaaaaatacttcttatagagtaaaatttatttagaactgatgtccaaggacctatgcagatttatatgaatgttggaagctatagagattttgatatcatttggcttataaatccacaggaggagataatgtatggaaaacatttaaatcactgtcaattgcagagctgcctgtgatcttcttaggttatagccaagtcagcaacataattcctctaaataaaattacattgtgctcacacagtgctggattattacatttaattgaagacaaagcatgcttgctcctagtactagcagcaagcttttcctcccctcagctggtaatgatggtaggagacagagatgaagttgcctatgtatgtcatatcaattcaatagctgcctggggtcaaacacctaggggttgtacattccattactgtaaatgattgagagctggtttgtggtatggttggctttgcctaagcatttttgaagatgaacagcatgtgcagccaaagaactaatttgctaattaaggtggaacaatcattctgaatgaaatataatcagagtactccgcagtttgttaagaagtattggggaggaggggaatgtgtctcacaataaaatgagttggaattgttgagttaaatgaatttaacctg

SEQ ID NO: 1685 - DNA, 2090 bp, Homo sapiens
  source 1..2090: mol_type = genomic DNA
ggagcaggtggtcagcagtctcttgaaaccaaagtttactgctttttcagagacaggctcatggacacagcacggattgcagttgtcggggcaggtgtggtggggctctccacggctgtgtgcatctccaaactggtgccccgatgctccgttaccatcatttcagacaagtttactccagataccaccagtgatgtggcagccggaatgcttattcctcacacttatccagatacacccattcacacgcagaagcagtggttcagagaaacctttaatcacctctttgcaattgccaattctgcagaagctggagatgctggtgttcatttggtatcaggttggcagatatttcagagcactccgactgaagaagtgccattctgggctgacgtggttctgggatttcgaaagatgactgaggctgagctgaagaaattcccccagtatgtgtttggtcaggcttttacaaccctgaaatgtgaatgccctgcctacctcccgtggttggagaaaaggataaagggaagtggaggctggacactcactcggcgaatagaagacctgtgggaacttcatccgtcctttgacatcgtggtcaactgttcaggccttggaagcagacagcttgcaggagactcaaagattttccctgtaaggggccaagtcctccaagttcaggctccctgggtggagcattttatccgagatggcagtgggctgacatatatttatcctggtacatcccatgtaaccctaggtggaactaggcaaaaaggggactggaatctgtccccggatgcagaaaatagcagagagattctttcccgatgctgtgctctggagccctccctccacggagcctgcaacatcagggagaaggtgggcttgaggccctacaggccaggcgtgcgactgcagacagagctccttgcgcgagatggacagaggctgcctgtagtccaccactatggccatgggagtgggggcatctcagtgcactggggcactgctctggaggccgccaggctggtgagcgagtgtgtccatgccctcaggacccccattcccaagtcaaacctgtagatgacataaaatgacagcaaagagactgagagactgttgatcaaagcacagaacaggttcaaataacttttccactgcatgaaagtttaattagacatttctttgttttcaacattagaagtggtgtaacatgtaagctgagcacggtggcatgcctatagtcccagctacttgagaggctgaggcaggaggattgttgagcccaggagtttgagtgcaatctgggtaacattttttagaggtgccagttcccacctctaaaaaaaacaccaacaacaaaagaaatgatgcaacatgtaggcttacttaggaagtccagcattaatggcatagggcataaagctctattttttgttaaaaatacttcttatagagtaaaatttatttagaactgatgtccaaggacctatgcagatttatatgaatgttggaagctatagagattttgatatcatttggcttataaatccacaggaggagataatgtatggaaaacatttaaatcactgtcaattgcagagctgcctgtgatcttcttaggttatagccaagtcagcaacataattcctctaaataaaattacattgtgctcacacagtgctggattattacatttaattgaagacaaagcatgcttgctcctagtactagcagcaagcttttcctcccctcagctggtaatgatggtaggagacagagatgaagttgcctatgtatgtcatatcaattcaatagctgcctggggtcaaacacctaggggttgtacattccattactgtaaatgattgagagctggtttgtggtatggttggctttgcctaagcatttttgaagatgaacagcatgtgcagccaaagaactaatttgctaattaaggtggaacaatcattctgaatgaaatataatcagagtactccgcagtttgttaagaagtattggggaggaggggaatgtgtctcacaataaaatgagttggaattgttgagttaaatgaatttaacctg

SEQ ID NO: 1686 - DNA, 2143 bp, Homo sapiens
  source 1..2143: mol_type = genomic DNA
gaagatgaggttacctcccttccacacctccctccttggaggcaagagctacaacagctgagacagaaaagaggtaaggaagtgttgggggctgggacaaccagctccccaacaactcctaggtgtttaaagaaggaggcaggaagacttgtgaagatgggaactatacaagaggcaggaaaaaagacagatgttggggtcagggagattgcagaagcaccagaactaggagcagccctgagacatggggagttggagctgaaggaggaatggcaggatgaagaattccctagattgcttcctgaggaggctggcacttctgaagatcctgaagaccctaaaggagattcacaggcagctgcaggtacccccagcactttagccctgtgtggccagcgccccatgcgcaagcgtctttctgccccagagttgcggctgagtctgactaaggggcctggaaatgatggagcttcacccacccagtctgcaccttcctctcctgatggcagttctgacctggagatagacgaattggagacaccttcagactcggagcagctggacagtggacatgaatttgaatgggaagatgaactaccccgggcagagggtctgggcaccagtgagacagctgaaaggctgggccgaggttgtatgtgggatgtgactggagaagatggacatcactggagggtgttccgaatgggaccacgggagcagcgcgtagacatgactgtcattgagccctataagaaagtcctgtctcatggaggttaccacggtgatggcctcaatgctgtcatcctttttgcttcctgttatctacccagaagcagcatccccaactacacctatgtcatggaacacttgtttaggtatatggtgggaactctggagctgctagtagctgaaaattacctgcttgttcatttgagtggaggcacaagcagggcccaagttccacctctaagctggatacgtcagtgttaccgtaccctggatcggcggctacggaaaaacctgcgagccctggtggttgtccatgctacatggtatgtgaaagcatttctggcactgcttcggcccttcatcagttccaaattcacacgaaaaatccgttttctggacagcctgggggagctggcccaactcatatccctggatcaagtccacatccctgaagctgtcagacagctggaccgggatctccatggctcaggagggacatagcacaggactggataaaaggccttagaaccagttagtgatctgcctacacctgaatccctgaaacatctgaactgttttgtaaatcatcttatccccaacctcagtaccaccggatcttcacttctcagtgggattttgtcctttgcatgaccctactttcagcagggctttgaggctgggaaactgatctgctgggtgactttcattccagttgctgggacggaaggctgaatgtagggtcattttgtatgggatatgcagagctctgggtttttttgttttttgttttttgagacggagtctcgctctgtcgccaggctggagtgcagtggtgcgatctcggctcactgcaacctccgcctcccggttcaagccattcttctgcctcagcctcagcgagtagctgagactaccggcgcacgccaccacgcccagctaattgttttgtatttttagtagagacggggtttcaccatgttggccaggatggtctcgatctcttgacctcgtgatctgcccgcctcggcctcccaaagtgccgagattacaggtgtgagccaccgcgctcggccagagctctgggttttaatcctactttagctgtagaaccttgggcaaataacttcatctttttgggtcctaattttcctcctgtctaactggagggactgtgatccttccaccttggatggaagaggcttacctgacagccagcctgcctgctgggagccaggagagtcagctcattaaatcttgaagaaccgctgtatgccctttttccttctaagtcatgtctgctgcctgtgagcctgggaaggagtgctttcaaaacctgtatttttgccctctttagtaaatttagaactgtagaggctaataaactgcgatgagacatttaagctctgctccaaag

SEQ ID NO: 1687 - DNA, 1998 bp, Homo sapiens
  source 1..1998: mol_type = genomic DNA
attgtggggtggcggcggcggccgcgctagcgacgcggggccgggcggctgagcgttcgcggggccgaggccatggctttctgggcggggggttcgcccagcgtcgtggactatttccctagcgaggacttctaccgctgcggctactgcaagaacgagtcgggcagccgctccaatggtgccgacctttacaatttcagccttcaaaatctcacaagaaggttttgaaaaaaatgttgaaatttctagctaaaggggaggttcccaaaggaagttgtgaggatgagcccatggattccacaatggatgatgctgttgcgggtgactttgcattgataaataaactggatatacagtgtgatcttaaaacactcagtgatgacatcaaagagagtttagagagtgaaggaaaaaattcaaagaaagaagaacctcaggaattacttcagtcacaagatttcgtaggagagaagttgggctctggtgaaccgtcacattcagttaaagttcacacagttcctaagccaggcaaaggggctgatttgagtaagcctccatgtcgaaaagcaaaggaaatccggaaagaaaggaaaaggttaaaactaatgcagcagaacccagctggagaacttgagggtttccaggctcaaggtcacccaccatctttgtttccaccaaaggctaaatccaaccagccaaaatcactcgaagatttaatttttgagtctttaccagagaatgcatcacacaagttagaggtgaggttagtacctgtctcctttgaggacccagagttcaagtcgtctttcagccagtccttttctttgtatgtcaagtatcaagtggccatacaccaggatccacccgatgaatgtgggaagactgagttcacaagattcctttgcagttcacccttggaggcagagactccccctaatgggccagattgtggctatggctcctttcaccagcagtactggcttgacggaaagatcattgctgtgggggtgattgacatcctcccaaactgtgtatcatctgtgtatttgtactacgatcctgattattcgtttttgtctttgggcgtctactctgcactacgagaaattgcttttactaggcagcttcatgagaaaacttctcaactcagctattattatatgggtttctacattcattcatgtcccaagatgaaatataagggtcagtatagaccttctgatttgctgtgccctgagacatatgtttgggtacccattgagcaatgcctgccttcacttgaaaactccaagtactgccgtttcaaccaggacccagaagcagtggatgaggatcgcagtacggaacctgaccgattgcaggtgtttcacaagagagccatcatgccttacggtgtttataagaaacagcagaaagacccaagtgaggaggctgctgttctgcagtacgccagcctggtggggcagaagtgctccgagcggatgctgctgttcagaaactgacctgttcacctctgccgggaagttcctgtgttgtgctgatgatttgtgccaggatacatattcagtacctgtggggaaataactgtcaccacccacaaattagacattttttattttgactatctatggcttttaaaaaatattttgtggcaatgtatctgtgagaatctcatagttaatataaagattttaaaactgcattatgacctagcccccataattgggatttatcattttggaggattctttctagagcaagatacgctcaaattctcctgtttgtattttgtaaaatgaagaagtgaatctaagtaacttaatcacagttgtgcattttttttggttctgttagagaaattaaaacagactgtttcctcaggcccattttaaactgaacttatgctaggaaaccttaagtatggggaaggtagaaagttcatttcatcacttagaaaatatgtcttctcaagaacaaaactgtgctgttacaactcag

SEQ ID NO: 1688 - DNA, 4900 bp, Homo sapiens
  source 1..4900: mol_type = genomic DNA
cgggcggcgcgctgcattgtggggtggcggcggcggccgcgctagcgacgcggggccgggcggctgagcgttcgcggggccgaggccatggctttctgggcggggggttcgcccagcgtcgtggactatttccctagcgaggacttctaccgctgcggctactgcaagaacgagtcgggcagccgctccaatggcatgtgggcacattccatgacagtacaggattatcaggatctcatagaccgaggatggcgaagaagtggaaaatatgtgtacaaacctgtcatgaatcaaacatgttgtcctcagtacacaataaggtgccgacctttacaatttcagccttcaaaatctcacaagaaggttttgaaaaaaatgttgaaatttctagctaaaggggaggttcccaaaggaagttgtgaggatgagcccatggattccacaatggatgatgctgttgcgggtgactttgcattgataaataaactggatatacagtgtgatcttaaaacactcagtgatgacatcaaagagagtttagagagtgaaggaaaaaattcaaagaaagaagaacctcaggaattacttcagtcacaagatttcgtaggagagaagttgggctctggtgaaccgtcacattcagttaaagttcacacagttcctaagccaggcaaaggggctgatttgagtaagcctccatgtcgaaaagcaaaggaaatccggaaagaaaggaaaaggttaaaactaatgcagcagaacccagctggagaacttgagggtttccaggctcaaggtcacccaccatctttgtttccaccaaaggctaaatccaaccagccaaaatcactcgaagatttaatttttgagtctttaccagagaatgcatcacacaagttagaggtgaggttagtacctgtctcctttgaggacccagagttcaagtcgtctttcagccagtccttttctttgtatgtcaagtatcaagtggccatacaccaggatccacccgatgaatgtgggaagactgagttcacaagattcctttgcagttcacccttggaggcagagactccccctaatgggccagattgtggctatggctcctttcaccagcagtactggcttgacggaaagatcattgctgtgggggtgattgacatcctcccaaactgtgtatcatctgtgtatttgtactacgatcctgattattcgtttttgtctttgggcgtctactctgcactacgagaaattgcttttactaggcagcttcatgagaaaacttctcaactcagctattattatatgggtttctacattcattcatgtcccaagatgaaatataagggtcagtatagaccttctgatttgctgtgccctgagacatatgtttgggtacccattgagcaatgcctgccttcacttgaaaactccaagtactgccgtttcaaccaggacccagaagcagtggatgaggatcgcagtacggaacctgaccgattgcaggtgtttcacaagagagccatcatgccttacggtgtttataagaaacagcagaaagacccaagtgaggaggctgctgttctgcagtacgccagcctggtggggcagaagtgctccgagcggatgctgctgttcagaaactgacctgttcacctctgccgggaagttcctgtgttgtgctgatgatttgtgccaggatacatattcagtacctgtggggaaataactgtcaccacccacaaattagacattttttattttgactatctatggcttttaaaaaatattttgtggcaatgtatctgtgagaatctcatagttaatataaagattttaaaactgcattatgacctagcccccataattgggatttatcattttggaggattctttctagagcaagatacgctcaaattctcctgtttgtattttgtaaaatgaagaagtgaatctaagtaacttaatcacagttgtgcattttttttggttctgttagagaaattaaaacagactgtttcctcaggcccattttaaactgaacttatgctaggaaaccttaagtatggggaaggtagaaagttcatttcatcacttagaaaatatgtcttctcaagaacaaaactgtgctgttacaactcagtgttcaatgtgaaattgctgccaaatgttatgtagtttaatagagaacttgaaaaaataaaacattaaaatggagcttgtgttagcatcaggtatccatttgttcaggacagtcctgttcatgtctgttgtcttggcatagttttttcccctagaatatagtactcccttttactctaaaaaatatcccagtttggacaataaaatacataattactctagttatattatttgctttacttctaaaaatgtaagaaattgaatttttttaaagaaaaatgttggttcctgccttgatctaagtctcatccaaaggaaataaatagtcactagttttttatcttacaactcaggacatttgtctttggttattaatggaaattagtatgtgattactttcatagttatgccacaaatcacattgaagaaggaatcattccgacctctgttccaggacaagagctagaacaatccatttcttgtcctttgatttgagagtcacagtcagggtggcttctgccacccttagtaactcagagcagaggccagccccctccttccctcactttcttttgctgagtcctttgcccacctgtcaaggtggcaggcactgtgctgggtacaggaggacagtcagacatgtcccttcttagctatagtcgagctgtctgggaaacaggatgaaaaacaggagggttattttcttgtgccctctttgtcagctgatcccctcttctgctaccagctatttggccagcaagccgtttttagtccccactttgcccatttttctgttttggttcatcgtttcttaaaagccatgttataaaacatggtagtttgaatcctgttgctaattttaaactttcctctaaaatgtactgaattttgacaaaaatttgaaaatatcctcagctaactagaataaaaaggatcataaaacaatgattttaaaactgaaatctctagaaactcaacatccaagtcagccgcatttcttcattcagagtgtgtgtgtcacacctgccaaggtgctgcgtactctgctaaccgagctagagtagtgagcaaagccattttctctgatcacaagattttacatttttctgggattttgacctgcaaagtagtctcgtaagagcatttgagagacttacttggaactgccttcagaatctatagagccttttttctctttttcctctaaaatgaaaagagcttcattttatgattataacaaaagtgacactgtaagcagttagaacattaagaagtataaataaaaagtaaaaatcatctacaaccctaccatactcagaaggagaaaagaactgtcatgtatgtatacacacatacctatgtaattttaatataaatagaattatgttctacatgctgttttatttcctcaacagtaaattatggacatgtctgaaatgtgaaataaatttcaaaataaggcttcagaaagtgtagtaagtaatctctgcattattaaaaataagcagggtagggctggtacttggctcgcttagcatttgaatgtccaacttggtgttatcactgtatcttccctccatttgtctttgtgattagcatgtaaaatggtattcataaagatcacaacccttgaatatcagatgaagagaaaacttgactccaacatcttaccacaactctggtttcttcctgcagaattcattttcagaggaaaatgatgaatcatccctgtctgtgaaccactgtgctttccttgagggtggcattgtaggttgacaccagcaaagactcagagtgacttgagcattggagatccttctacttggctgctgtattcatgcattatgttggtttgagaatagctagtgtattgatccaagtagtcaaagtgtcttaaaaggacacctatttgtccttttgagccccagctgagtgaatactgatagtggactagaaaagcatagtcaagaaaagtgacccaccttgttacttgaccagcagtctagctgagagatctgattttatgttcgtaactttctgtaaagaaagacacaaggacttttcaaagacagtttatatctttccaaggcaggaagctttgcatttgcaatcttagtgttgtgtccctttctgattttcaaatacatcacacctgccttcctgttttgggagcaaagatgtaatttcaattccccttgctaccgtccttatttaaattatttccattctaagagatttttgttatttttttaaatgtaatctgagcacttttttgtattctaaaagatagatgatatcagataaatatgttgtacatttgattaaaattatttagataaatattactatgttgacttttaaatagctttatcctatttttcattcattttgcaaatatttgttgtgtgtagtttcttaacgtgtcagaatctattatgtaaaagaacctttccagatttctgaacagtatatgctttgattttataggctttatattatttcagtatgaataaagataaggaatatgaaacagttaactaaaatgtatctgtcgttgctaacttgaaaaatgaagtagaaacagttggaaaatgtttgaattagaagttattcaagtgcacactcttttctaaaagaaagccaatgactataaggcaaaagaagtttgactgcatgtggtattttttgctcttgtatatgctttttgaacaagctatttgataaagcctgaatggaaaaaataaagctgtttctatctgca

SEQ ID NO: 1689 - DNA, 4656 bp, Homo sapiens
  source 1..4656: mol_type = genomic DNA
gcgtgatcggtttccggtcagtggtgtggtaccgggtacccggagacgtgtatcggacggtgggccgcagccatggccgagagaaaacctaacggtggcagcggcggcgcctccacttcctcatcgggcactaacttacttttctcctcctcggccacggagttcagcttcaatgtgcccttcatcccagtcacccaggcctccgcttctccggcctccctgctcttaccgggagaggattccacagatgttggtgaggaggacagcttccttggtcagacttctattcacacatctgccccacagacatttagttacttctctcaggtatcaagcagcagtgatccttttgggaatattggacagtcaccattaacaactgcagcaacctcagttggacaatcaggattccccaagcccctgactgctctcccttttacaactggatcccaagatgtctcgaatgcattttcaccatccatttcgaaggctcaacctggtgctccaccttcctcactgatgggaataaattcttatctgccttctcagccaagtagtctccctccttcatattttgggaaccaaccccaaggaattccccaaccaggatacaatccatatcgccatacccctggcagcagcagggctaatccttacattgcaccaccccagctgcagcagtgccaaacaccaggccctcctgctcatcctccaccttctggaccccctgttcagatgtaccagatgcctccaggatctttgccaccggttccttcttcagtgcagtcaccggcacagcagcaggtacctgccagacctggggctccctctgttcaagtgccatctccttttctacttcaaaaccaatatgagcctgttcagccccactggttttactgcaaggaggtagaatacaaacaactgtggatgccttttagtgtgttcgactctttgaatcttgaagaaatctataattcagttcagccagatccggagagcgtggttcttggcacggatggagggcgctacgatgtttacctctatgaccgaataaggaaggctgcctactgggaagaggagccagccgaagtgagacgctgtacttggttttacaagggggacacagatagtcgatttattccctatactgaggagttcagtgaaaaactagaggctgaatataaaaaagctgtaaccactaatcagtggcaccgaagattagagtttccaagtggagagacaattgttatgcacaatccaaaggttattgttcagttccagccctcctcagtgccagatgaatggggcaccacgcaagatggacagacaaggcccagggttgtaaagcgtggaattgatgataaccttgatgaaattcccgacggggagatgcctcaagttgaccatttggtgtttgtggtgcatggcattggacctgtgtgtgacttacgctttaggagcattattgagtgtgtggatgattttagggtggtttctctcaaattgctgcggacacatttcaagaaatctttagatgacgggaaagtaagcagagtggagttccttccagttcattggcatagttctttgggtggggacgccacaggtgtggacaggaatattaagaaaatcactttgccaagtattggtcgatttcgtcactttaccaatgaaactttgctagatattttattttataacagccccacctactgtcagacaattgtggaaaaagtaggaatggagataaaccatctgcatgcactctttatgagtcggaacccagacttcaaaggaggtgtctctgttgctggtcacagtttaggttctttaatattgtttgacatcctgtctaatcaaaaagatttgaatttatcaaagtgccctggacctcttgctgttgctaatggagttgtgaagcagctacattttcaggaaaagcagatgcctgaagagccaaagctgactttggatgagtcgtatgaccttgttgttgaaaataaagaagtcctaactttgcaagaaactctggaagcacttagcctctctgaatattttagcacttttgaaaaggaaaagattgatatggagtccctgcttatgtgtacagttgatgacctgaaggaaatggggataccccttggacccagaaagaagatagctaactttgtagaacataaagcagccaaactgaaaaaagcagcgtcagaaaagaaggcagtggcggccacttctacaaaaggacaagagcaaagtgcccagaagactaaagacatggcttccctcccctcagaatccaatgagccaaagaggaaacttccagttggtgcttgcgtgtcttctgtgtgtgtgaattatgaatcttttgaagttggcgccggacaggtttctgttgcttacaactcattagattttgaaccagagatattctttgccttggggtctccaattgctatgtttctcactattcgaggagttgataggatagatgagaattacagccttcctacctgtaaagggttcttcaatatttatcatccgcttgatccagtggcatatagattagaacctatgattgttccagatttggacctaaaagctgttctcattccacatcacaaaggcagaaaaagacttcatttagaattgaaagagagtctctctcgtatgggatctgatttgaagcagggttttattagctctctcaaaagtgcttggcagacattaaatgagtttgcccgtgctcatacgtcttcaacccagttgcaagaagaattggagaaggtggccaatcagatcaaagaagaagaagaaaagcaagtagttgaagcagaaaaggttgttgaaagtccagatttttccaaggatgaggactacttaggaaaggttggaatgttaaatggaggccgccgaattgactacgttctccaagaaaaaccaatagagagttttaatgaataccttttcgctcttcagagtcacttatgctattgggaatctgaagatactgctctgttactacttaaagaaatttatcgaacaatgaacattagtccagaacagccccagcattgatcaaacttcagttttactgtactttcttgtctgcacagaaagtcccagtacaacttccattgctgagaaaatcctcagaggactttcccacttcgctcctgtgatggatgacagaagagtgattcattaacaattgctcagccacaattctcggatatagggattcaaaagacaggacacagaactaacacagtgaaaaaaatcagtaccacatttggacagtataggtgagaaaacataattataaaaatgatgccatgaaaaattccacagatcagtttagttgtatagttgtcaaagttatatgtgatatcaatgaagaaatatttgtagcatgtaaacggttatttctgtttcttaaaaagtattgttagtgggctattaaacttggatttttctttttattaatgcagtatgttctttttattcaagtatgaacttgttgagaaactatagtaatatgatttttaagagatttatgttctacttaaaatgtgaattgtacttctgagctgccttaatgcaaggtcatttatatttgttaagaggaaataatcaagatcactcatatcccaactgaatctgaggttttataaatccctcaaacgattgctgagagcctgattgtggaaagaagtgagatgcaccttattttcaagaagtcctgggaagcgctctcctagcacgtccatttccaggaggagaagcaagcagatgagaggttttccattttgtcatccaaggtagctgtgcacttgccttgttgctgaagttccaataatgtgaaaaccaaagtagaggtttttttcttcttctttttgttttctattaatttcacttataccaaagtgtttgaaagtatgaaatgtgttgcttctgagttatataaggctacttcatgacaagactgctttgtaatatttcactttgttttactacaaattcagatcactttgttttactataaattcagattatccaaatattttcctaatactatgtgggaatgctgattttcttttgttacgtagtggaaacattttgcattgtttacatagttctcatggaacatggaaatttttgaaagtgatatatgatacacattttttgtgtatgtattctaattagtgtgaataaagcagtaacattaatgcattttttaagcagcaaacttatgtatttctcttgtcttccttaaaagtgtccccatgaactcagtgtttattcccttttcattttgagtacctgcttatatggtcagtatgtaacgttagcattggctcctaatggtagaattagaacagcaagattgtagagctgtaattgactccagacaacatagatttcagccacctcattctacagctgaggccaggacaataaatgcctttcccagactgggtagtggcagatctgggatggaatatggttttcttgattccctttcagccttcatttctctctctcaggactactactttttaattacttttcacttaatttcccaatactgatgaaataaagaaaaatgagggttatttatatacatttcaataaaatccaatttgatttttcaactta

SEQ ID NO: 1690 - DNA, 785 bp, Homo sapiens
  source 1..785: mol_type = genomic DNA
actataaagacagtaaaaagatcagtggttatctttgcagacgccaccatcactgtgagccctgtactatcagccatggtcaactccgtcgtcttttttgacatcaccgtcgacggcaagcccttgggccgcatctccatcaaactgtttgcagacaagattctaaagacagcggaaaactttcgtgctctgagcactggagagaaaggatttcgttataagggttcctgctttcacagaattattccagggtttatgtgtcagggtggtgacttcacacgccataatggcactggtgacaagtccatctatggggagaaatttgatgatgagaacctcatccgaaagcatacaggttctggcatcttgtccatggcaaatgctggacccaacacaaatggttcccagtttttcatctgtgctgccaagactgagtggttggatggcaagcatgtggcctttggcaaggtgaaagaacgtgtgaatattgtggaagccatggagcactttgggtacaggaatagcaagaccagcaagaagatcaccattgctgactgtggacaattctaatgagtttgacttgtgttttattttcaccaccagacccattccttctgtagctcaggagagcacccctccaccacatttgcttgcaatatcctagaatcttggtgctcttgctgcagttccctttgggttccatgttttccttgttcccttccatgcctagctggattgcagagttgagttaagtttatgattatgaaataaaaactaagtaacaa

SEQ ID NO: 1691 - DNA, 646 bp, Homo sapiens
  source 1..646: mol_type = genomic DNA
cagccaggaaaacctttgttggggatgaagattcttgacgttggctgtggtggtgggctgttaactgaacccggtggttctttattcattactacaatcaacaaaacacaactttcctatgccttgggaattgttttttcagagcaaattgcaagtattgtaccaaaaggtactcatacatgggagaagtttgtttcacctgaaacactagagagcattctggaatcaaatggtctgtcagttcaaacagtggtaggaatgctctataaccccttctcaggttactggcattggagtgaaaataccagccttaactatgcagcttatgctgtgaaatccagggtccaggaacacccagcctctgctgagtttgttttaaagggagaaacagaagagctccaagctaatgcctgcaccaatccagctgtgcatgaaaagctgaagaaatgaattgtttctgagaactatagtaatatggcttggatatctgatgttttcaaatacaaaaatgtacaatttatcctttgagagagaatcatgaagaaaagaaggtcaataaaaagggctaaaaccttggacaaaagtttttgttatttcgtctaatagctactttcaagggattctgtgaataaaaagttttgtcaag

SEQ ID NO: 1692 - DNA, 1092 bp, Homo sapiens
  source 1..1092: mol_type = genomic DNA
aaaagaggtgggatcgtttgtcgcgatgtggagtggccgtaagctgggctcctccgggggttggtttttaagagtgctggggcctggaggctgtaatacaaaagctgcgcgtcccttaatttcctcggcggtttatgtgaagaaccagctcagtgggactctacagattaaaccaggggttttcaatgaatacagaaccatatggttcaaatcctacaggacgatcttttcctgtttgaacagaataaagagtttcaggtacccttgggcgagactgtacagtacttcccaaaccactgtcgacagcggtgaggtaaaaaccttcttggccctggctcacaaatggtgggatgaacaaggagtatatgcacctcttcattccatgaatgacctgagggtgccatttattagggacaatcttctgaaaacaattcctaatcaccagccaggaaaacctttgttggggatgaagattcttgacgttggctgtggtggtgggctgttaactgaacccggtggttctttattcattactacaatcaacaaaacacaactttcctatgccttgggaattgttttttcagagcaaattgcaagtattgtaccaaaaggtactcatacatgggagaagtttgtttcacctgaaacactagagagcattctggaatcaaatggtctgtcagttcaaacagtggtaggaatgctctataaccccttctcaggttactggcattggagtgaaaataccagccttaactatgcagcttatgctgtgaaatccagggtccaggaacacccagcctctgctgagtttgttttaaagggagaaacagaagagctccaagctaatgcctgcaccaatccagctgtgcatgaaaagctgaagaaatgaattgtttctgagaactatagtaatatggcttggatatctgatgttttcaaatacaaaaatgtacaatttatcctttgagagagaatcatgaagaaaagaaggtcaataaaaagggctaaaaccttggacaaaagtttttgttatttcgtctaatagctactttcaagggattctgtgaataaaaagttttgtcaagatat

SEQ ID NO: 1693 - DNA, 7606 bp, Homo sapiens
  source 1..7606: mol_type = genomic DNA
gtcattgagctgatgtgcttttgcaaggggtctctttagaagtggtaggggcagggtcgagagaagaaggggatgcagaatctgtacatgaggaaggagccagagtcactcaggaaactcctcattcttcctgcgctggctgtggcacacccaccggtggcacacccctccctcgggtccagttcagcccacagactcctgggaggagagccagggccccagcctctcctttgaggagtgttgcagcctttctgtgtgccagatgcctagtgaagaaaagctgaaaccctggagctttgtgcatgttaatgaccttggaaatgactgagctcacggaccctcatcacaccatgggagactacaaagtggcccaccctcaggaccctcaccacccatcagagaagcctgtcattcactgccataaatgtggggagccttgcaagggtgaagtgcttcgggtccagaccaaacatttccacatcaagtgtttcacctgcaaagtgtgtggctgtgacctggcacaagggggcttcttcataaagaacggagagtatctctgcaccctggactaccagcggatgtacgggacacgctgccatggctgtggggagttcgtggagggcgaagtggtgactgctctgggcaagacctaccatcccaattgctttgcttgtactatctgcaagcgcccgtttccacccggagaccgagtcacattcaatgggagagactgcctttgtcaactctgtgcacagccgatgtcgtccagtccgaaagaaaccaccttctccagcaattgtgccggctgcggaagagatatcaagaatgggcaggcgctgctggcgctggataagcagtggcacttggggtgctttaaatgcaagtcctgcgggaaggtcctcaccggggagtacatcagcaaggatggtgctccgtactgtgaaaaggactaccagggactctttggggtgaaatgtgaggcgtgtcaccagtttatcacagggaaagtcctggaggcaggtgacaaacattaccaccccagctgtgcacgatgcagcagatgcaaccagatgttcacagaaggagaggaaatgtatcttcaaggctccaccgtttggcatcccgactgtaagcaatctacgaagaccgaggaaaagctgcggcctaccaggacatcctcggaaagtatttattctaggccaggctccagtattcctggctcaccaggtcatactatctatgcaaaagtagacaatgagatcctggattacaaggatttagcagccattccgaaggtcaaggcaatttatgacattgaacgtccagatcttattacctatgagcctttctacacttcgggctatgatgacaaacaggagagacagagccttggagagtctccgaggactttgtctcctactccatcagcagaagggtaccaggatgttcgggatcggatgatccatcggtccacgagccagggctccatcaactcccctgtgtacagccgccacagctacactccaaccacgtcccgctctccccagcatttccacagacctggcaatgagccgtccagcggccggaactcccctctcccttaccggccagacagccgccctctaactccaacttacgctcaggcccctaaacatttccatgttccagatcaaggaatcaacatttaccgaaagccacccatctacaaacagcatgctgccttggcagcccagagcaagtcctcagaagatatcatcaagttttccaagttcccagcagcccaggcaccagaccccagcgagacaccaaagattgagacggaccactggcctggtcccccctcatttgctgtcgtaggacctgacatgaaacgcagatctagtggcagagaggaagatgatgaggaacttctgagacgtcggcagcttcaagaagagcaattaatgaagcttaactcaggcctgggacagttgatcttgaaagaagagatggagaaagagagccgggaaaggtcatctctgttagccagtcgctacgattctcccatcaactcagcttcacatattccatcatctaaaactgcatctctccctggctatggaagaaatgggcttcaccggcctgtttctaccgacttcgctcagtataacagctatggggatgtcagcgggggagtgcgagattaccagacactcccagatggccacatgcctgcaatgagaatggaccgaggagtgtctatgcccaacatgttggaaccaaagatatttccatatgaaatgctcatggtgaccaacagagggcgaaacaaaatcctcagagaggtggacagaaccaggctggagcgccacttagcccctgaagtgtttcgggaaatctttggaatgtccatacaggagtttgacaggttacctctttggagacgcaacgacatgaagaaaaaagcaaaactcttctaagtcccactcgtgaatggcaattagagaaaggactgacagtggcggtgccccataggatgtcatattgaggcccaaacttgattggagaatttgcaaactaccgtcgctcagcaacaccaaaaagagaaagtctggttaaaacaccatgagtcaaatgtcgggccagccaacagtaacacttgccaagaagcatggcgtagaaatttctatgttccgaaacacagagtagtgtccacatgtgagcttttcacattaccttatgtatacaacaggagctgcgttgttttcttctttttcttttcctttatctgttgtccaacaacagtgctgactgtccggataagagctggcaagtgcccttaggatgccgcatgggaaaaatcggttatcataatttcaaagtataaatatatttattaagtagcgctgcggctaagaaggaagagtgaggggtctgtccatggggtggcagtgatttcacacccgcctttcttgaatggcttcgtgttactcagccgtgccctggcaggaatggaactccatcagggaacagggcagctctgtttgaatggggtgaaaaacagcaaaattaattcttagcaagctccttgttctctactgttcaccgggacctggctggcaaatgacttagctattagtatatttaaaaactgttcaaaagcaaaagagaaggaacaggaatgaaaggaaaccttcccttaactctttctgcttcccatagcaggtctggttcctgctccccgcctaggacaggagctgtctggagctccacctttgcaaagaaaggaaaaacacaaattgcccccagattggcccagtggcatgccattaggtgattttgcataggggccatatcattcatggccaaaaaaaaccaaaaagcaaaaaacaaaaacaagtcccatgtcctactgactctagttcttccagtcgttatcctctgctgtctctctggcatcctatgaatcagatcaagcccatgctgttgttggtttttaaggtttctttcaataataggctaaggaaagacatgtttttctcttttaaatctctgcaactccaaagtagactccttcgaacgtatttaatttggccttttcagctttcttcttgcccagctctgtcgaattcatgggtgtgtgtgcacatgttggtttcactcacccagagtaattttgtgagcatgcatgtgctttttaatttctgcttgaatgtttgtcctgctgtgttgcagcttctaaagacattgtcaccgagtgtgtgtgactcaaagatcaagagtgaggctaaactgcgaccccaacatcacttccttcatggaaaggtgttggcgctgatgtagctcatggaaggatcagactgggaaccacagaggaaggatgaggtgggatgtggaggtcagagcatctcacgagagtccctcaggctctgcaacactagattcgaatatgagcctagggtttccccaacacgtgcgtgcatatgaaaccacatcatgattcccgacgtgagttagatgagggagagtttgtgtaactccacacccaggagggtaagccactttattatcatgctttggggctgtgcttaagaatttaagctctgttttaaagccgaagaagaaaacatttgaatttaccttcatatgccactaagaacaaaagctctgaagttcttcctgctggcaccaaatattaggattacaagctgtctctctgacaccagtggtaaaaaagcaagtagaatagtttctgagtctgtgttgcagcctctgacacgtggctcaccgctgtcatttgggggatggaatgaacagtcactgttctatagcatcctcctgtgctcttacctaaggaatctaaattgtcctagccttccattgctatgcactgaatgaggactactctcgtgtgtgtgtgtgtgtgtgtgtgtgtgtgtgtgtgtgtgtgtgtgtgtgttggatctactaacatgtttagcaaatggctctgacagggtggccatgagcagatgagaccagctcttgcttggttggaagccacactgcagtttgcagtttagcctttggtgtctcagtggcttcttgcttattccatgctttttctatcccatcctctctctgtgccctcctgcaatggcagccttggcacaatgcctgggtgtcctcatccttgctttactctggaaagtgtggggatggagaggatggtgcatttccagtgcttccttacctgtcaataacaatggtggccacctgggtcccagcacttggctggtggagagatttttttcattatggagctaataaagggtccctacgttttacattgattaatgaattatcacccagacatgtgcagatgaaatgtcaatataagaaaaatcaaggtatttgggaaacatgggcataatcaggtagttttgctaaaattcctcttccttggtctacataaagaagacatgggtctgtcatagaatggggacattagactgaaaactgggacaacccccttccttattttatagagactaggagttaaggggcctgcctaagattgcagtgataaagaactgaaccctaaatcagctcccactaatgaaaccctgctttccttgtatcttttaaactcagttctgcatccaacttgagaagaaaaaaagcttctttccatatcaagtaccatatgagttcatttaaactgcaccttgcagaaatgcattgccagaaagcaccagtagcctcctatctgcaagcagagtagtgctctgctctggggaggggtcattggaaaccataatgcagagtgggccccctactccatttcccagcaaaaggctccagctggagggatgggttgtggggcaacctggttcctgctaactgccagattgaatgtgtgggctagaatgcctgcacatttagttaaactgggctcagcatgcttgtcctcaaaatgtccatcctggtcacagcacacaagatggctattggtctgcttttaccctaccctgtactatacatgaaaattccagttattaacacactcaaactggtggagcttgttcaccctaggaaggggattgtatatatggcaggcttccctggtgccgatgtaaagggctacatttgggaacatttgacttccttgggactcttaagtgcataatgatggcatgaagtaaaaggggcctcaatgatgataggaaaatcagttcttttaaaatttcttcaagaaaatccaggctatcacatagtctttctgtgtgacttattaggagataggaagagcattgggaaacttgcacagctagctatgcatctacattttggtttggggttagttatgaaatgttcttaatatgacgtgttcaataacttcacataaacttcctgttctccaaaacctcaaagagatagagttaatgagttgttgtttttttttaaatgggggtagttttctatctgtcatgggctctagcatctactccgctacccaattctgtcatctccaagctgagtttcctcttctgaggcagaggctggagcagttctttttcagttctcatcctctccatcccaatccagtatatcaatcaactctaactcggagacgtctagctggcaatgtttctaaaactttcactggatttctttagacattgaagcaaacatttttttctaagaattgcttctcagatgatgatatcaaatgtatatgcttttgcaagtttgaaaagttcaaattaaccacttttgactaggtaagtctttctaaaaaccatttaaagctaactgggtcttagcatcctcctgtgtatggaagagacaggtgaccgctccaggttgggtgctcacagaacccttttcctgactctcatggaagatggtggaaggaaaatagactgtctcatcaaccctcctgtgtcctctgaagcaatctcagtttttattaaccacctcttctgtgtttctggtagctatttaacctgtatttaatctgtacttcctatgccagcctcaattttatttgatttttacaattattctcttctaaccaatgaagtgtttgtcagtatgccccaaagcttgctcttttgtgctcccttttgaataactttctatccagaaaaagagattatttgggacttgagatttgcagtgataccaacttatagcaatgatgtactttaagggaactacccaactatgttgtgatagaagaaagagaaaccttcactttggcatttttttttaatcactgtttatttttctgtttgcggcccaggaagcagtgggaggtggtggcagatatgctttgcatatggattgttatgtttttatttgggcaagtttaatcatggaaaactcaaaaagaaggggggaaatggtcagtttaagccaaaagaaactttctaaacaatgtataggtacacagcaaaattaaacaaatccaacaatttctgaagcttagtgtaattgagtggtggttgttattcaataaaattattcccaaaagtgtttctcctaagagtgcagttcccatgagtcacttcctgaacccattgaccaaaggtggacagagacaatcctgtagaccttgacattcagaaagatgtgagctgcttactgatcatatatgcatacgtttctttacagcagaggaaaccattgtccacaaaactgatgttcttttggggttttatgtacagacttgtccaatcatgtgtgtggttcctgcgagttgctgatgactccgcattgaagctctctgagttctttgattttaagttgggtttatggaattttttcaaatgttggaaggtgtgtggttcttcctgccctccctccccttttggaaatatgaaagcaaatgtttagaagaattccttttgaaaagctgtgtcgtgttccctgtgaaactgagcaggtgtgtgttggcgcgctaagtgccacatgcttgtgtgtagaggaggaggtggccctgccggctccgcgctgctgtgcctgtgatccctacctgctccccgctcctgttgccagcagcactcactgcactcctttgtcatatactctgcatcactgtcatactcacaacttcgtgaataaagttgtgtgctttattcgt

SEQ ID NO: 1694 - DNA, 1747 bp, Homo sapiens
  source 1..1747: mol_type = genomic DNA
gcacaaaccatcgcactttggccatagcaggtgacaaacattaccaccccagctgtgcacgatgcagcagatgcaaccagatgttcacagaaggagaggaaatgtatcttcaaggctccaccgtttggcatcccgactgtaagcaatctacgaagaccgaggaaaagctgcggctgccaaacattcggcgttcttcatccgatttcttttattccaaaagtctgattcgacgcacaggacggtctccgtctctgcagcctaccaggacatcctcggaaagtatttattctaggccaggctccagtattcctggctcaccaggtcatactatctatgcaaaagtagacaatgagatcctggattacaaggatttagcagccattccgaaggtcaaggcaatttatgacattgaacgtccagatcttattacctatgagcctttctacacttcgggctatgatgacaaacaggagagacagagccttggagagtctccgaggactttgtctcctactccatcagcagaagggtaccaggatgttcgggatcggatgatccatcggtccacgagccagggctccatcaactcccctgtgtacagccgccacagctacactccaaccacgtcccgctctccccagcatttccacagacctgagcttttgtctcctggtgtgcagaggttgtcgtacctgcgcaccagcagcctcagccccacccacagcgactcccgccccaacccccctttccgacaccacttcattccccatatcaaaggcaatgagccgtccagcggccggaactcccctctcccttaccggccagacagccgccctctaactccaacttacgctcaggcccctaaacatttccatgttccagatcaaggaatcaacatttaccgaaagccacccatctacaaacagcatgctgccttggcagcccagagcaagtcctcagaagatatcatcaagttttccaagttcccagcagcccaggcaccagaccccagcgagacaccaaagattgagacggaccactggcctggtcccccctcatttgctgtcgtaggacctgacatgaaacgcagatctagtggcagagaggaagatgatgaggaacttctgagacgtcggcagcttcaagaagagcaattaatgaagcttaactcaggcctgggacagttgatcttgaaagaagagatggagaaagagagccgggaaaggtcatctctgttagccagtcgctacgattctcccatcaactcagcttcacatattccatcatctaaaactgcatctctccctggctatggaagaaatgggcttcaccggcctgtttctaccgacttcgctcagtataacagctatggggatgtcagcgggggagtgcgagattaccagacactcccagatggccacatgcctgcaatgagaatggaccgaggagtgtctatgcccaacatgttggaaccaaagatatttccatatgaaatgctcatggtgaccaacagagggcgaaacaaaatcctcagagaggtggacagaaccaggctggagcgccacttagcccctgaagtgtttcgggaaatctttggaatgtccatacaggagtttgacaggttacctctttggagacgcaacgacatgaagaaaaaagcaaaactcttctaagtcccactcgtgaatggcaattagagaaaggactgacagtggcggtgccccataggatgtcatattgaggccca

SEQ ID NO: 1695 - DNA, 3983 bp, Homo sapiens
  source 1..3983: mol_type = genomic DNA
gcttccactcccagagtttattcctcgttccttcttcagtcctgctcgtcggaggacccggttgccatggtgaaggaaaaagtggcccaccctcaggaccctcaccacccatcagagaagcctgtcattcactgccataaatgtggggagccttgcaagggtgaagtgcttcgggtccagaccaaacatttccacatcaagtgtttcacctgcaaagtgtgtggctgtgacctggcacaagggggcttcttcataaagaacggagagtatctctgcaccctggactaccagcggatgtacgggacacgctgccatggctgtggggagttcgtggagggcgaagtggtgactgctctgggcaagacctaccatcccaattgctttgcttgtactatctgcaagcgcccgtttccacccggagaccgagtcacattcaatgggagagactgcctttgtcaactctgtgcacagccgatgtcgtccagtccgaaagaaaccaccttctccagcaattgtgccggctgcggaagagatatcaagaatgggcaggcgctgctggcgctggataagcagtggcacttggggtgctttaaatgcaagtcctgcgggaaggtcctcaccggggagtacatcagcaaggatggtgctccgtactgtgaaaaggactaccagggactctttggggtgaaatgtgaggcgtgtcaccagtttatcacagggaaagtcctggaggcaggtgacaaacattaccaccccagctgtgcacgatgcagcagatgcaaccagatgttcacagaaggagaggaaatgtatcttcaaggctccaccgtttggcatcccgactgtaagcaatctacgaagaccgaggaaaagctgcggcctaccaggacatcctcggaaagtatttattctaggccaggctccagtattcctggctcaccaggtcatactatctatgcaaaagtagacaatgagatcctggattacaaggatttagcagccattccgaaggtcaaggcaatttatgacattgaacgtccagatcttattacctatgagcctttctacacttcgggctatgatgacaaacaggagagacagagccttggagagtctccgaggactttgtctcctactccatcagcagaagggtaccaggatgttcgggatcggatgatccatcggtccacgagccagggctccatcaactcccctgtgtacagccgccacagctacactccaaccacgtcccgctctccccagcatttccacagacctggcaatgagccgtccagcggccggaactcccctctcccttaccggccagacagccgccctctaactccaacttacgctcaggcccctaaacatttccatgttccagatcaaggaatcaacatttaccgaaagccacccatctacaaacagcatgctgccttggcagcccagagcaagtcctcagaagatatcatcaagttttccaagttcccagcagcccaggcaccagaccccagcgagacaccaaagattgagacggaccactggcctggtcccccctcatttgctgtcgtaggacctgacatgaaacgcagatctagtggcagagaggaagatgatgaggaacttctgagacgtcggcagcttcaagaagagcaattaatgaagcttaactcaggcctgggacagttgatcttgaaagaagagatggagaaagagagccgggaaaggtcatctctgttagccagtcgctacgattctcccatcaactcagcttcacatattccatcatctaaaactgcatctctccctggctatggaagaaatgggcttcaccggcctgtttctaccgacttcgctcagtataacagctatggggatgtcagcgggggagtgcgagattaccagacactcccagatggccacatgcctgcaatgagaatggaccgaggagtgtctatgcccaacatgttggaaccaaagatatttccatatgaaatgctcatggtgaccaacagagggcgaaacaaaatcctcagagaggtggacagaaccaggctggagcgccacttagcccctgaagtgtttcgggaaatctttggaatgtccatacaggagtttgacaggttacctctttggagacgcaacgacatgaagaaaaaagcaaaactcttctaagtcccactcgtgaatggcaattagagaaaggactgacagtggcggtgccccataggatgtcatattgaggcccaaacttgattggagaatttgcaaactaccgtcgctcagcaacaccaaaaagagaaagtctggttaaaacaccatgagtcaaatgtcgggccagccaacagtaacacttgccaagaagcatggcgtagaaatttctatgttccgaaacacagagtagtgtccacatgtgagcttttcacattaccttatgtatacaacaggagctgcgttgttttcttctttttcttttcctttatctgttgtccaacaacagtgctgactgtccggataagagctggcaagtgcccttaggatgccgcatgggaaaaatcggttatcataatttcaaagtataaatatatttattaagtagcgctgcggctaagaaggaagagtgaggggtctgtccatggggtggcagtgatttcacacccgcctttcttgaatggcttcgtgttactcagccgtgccctggcaggaatggaactccatcagggaacagggcagctctgtttgaatggggtgaaaaacagcaaaattaattcttagcaagctccttgttctctactgttcaccgggacctggctggcaaatgacttagctattagtatatttaaaaactgttcaaaagcaaaagagaaggaacaggaatgaaaggaaaccttcccttaactctttctgcttcccatagcaggtctggttcctgctccccgcctaggacaggagctgtctggagctccacctttgcaaagaaaggaaaaacacaaattgcccccagattggcccagtggcatgccattaggtgattttgcataggggccatatcattcatggccaaaaaaaaccaaaaagcaaaaaacaaaaacaagtcccatgtcctactgactctagttcttccagtcgttatcctctgctgtctctctggcatcctatgaatcagatcaagcccatgctgttgttggtttttaaggtttctttcaataataggctaaggaaagacatgtttttctcttttaaatctctgcaactccaaagtagactccttcgaacgtatttaatttggccttttcagctttcttcttgcccagctctgtcgaattcatgggtgtgtgtgcacatgttggtttcactcacccagagtaattttgtgagcatgcatgtgctttttaatttctgcttgaatgtttgtcctgctgtgttgcagcttctaaagacattgtcaccgagtgtgtgtgactcaaagatcaagagtgaggctaaactgcgaccccaacatcacttccttcatggaaaggtgttggcgctgatgtagctcatggaaggatcagactgggaaccacagaggaaggatgaggtgggatgtggaggtcagagcatctcacgagagtccctcaggctctgcaacactagattcgaatatgagcctagggtttccccaacacgtgcgtgcatatgaaaccacatcatgattcccgacgtgagttagatgagggagagtttgtgtaactccacacccaggagggtaagccactttattatcatgctttggggctgtgcttaagaatttaagctctgttttaaagccgaagaagaaaacatttgaatttaccttcatatgccactaagaacaaaagctctgaagttcttcctgctggcaccaaatattaggattacaagctgtctctctgacaccagtggtaaaaaagcaagtagaatagtttctgagtctgtgttgcagcctctgacacgtggctcac

SEQ ID NO: 1696 - DNA, 6583 bp, Homo sapiens
  source 1..6583: mol_type = genomic DNA
cgagcttcggagagaagcctgatatgtaacccaggcaggtgggagcctcagtctgtcgggctgaggtctggcatctacaaagcctcttggccgtgttctgaacttgaagcctggaggagttctctgctcagcacagccaaggaacagaattagaagaaaaggaaccctggcctgaggcaggtgacaaacattaccaccccagctgtgcacgatgcagcagatgcaaccagatgttcacagaaggagaggaaatgtatcttcaaggctccaccgtttggcatcccgactgtaagcaatctacgaagaccgaggaaaagctgcgggcaaaagtagacaatgagatcctggattacaaggatttagcagccattccgaaggtcaaggcaatttatgacattgaacgtccagatcttattacctatgagcctttctacacttcgggctatgatgacaaacaggagagacagagccttggagagtctccgaggactttgtctcctactccatcagcagaagggtaccaggatgttcgggatcggatgatccatcggtccacgagccagggctccatcaactcccctgtgtacagccgccacagctacactccaaccacgtcccgctctccccagcatttccacagacctgatcaaggaatcaacatttaccgaaagccacccatctacaaacagcatgctgccttggcagcccagagcaagtcctcagaagatatcatcaagttttccaagttcccagcagcccaggcaccagaccccagcgagacaccaaagattgagacggaccactggcctggtcccccctcatttgctgtcgtaggacctgacatgaaacgcagatctagtggcagagaggaagatgatgaggaacttctgagacgtcggcagcttcaagaagagcaattaatgaagcttaactcaggcctgggacagttgatcttgaaagaagagatggagaaagagagccgggaaaggtcatctctgttagccagtcgctacgattctcccatcaactcagcttcacatattccatcatctaaaactgcatctctccctggctatggaagaaatgggcttcaccggcctgtttctaccgacttcgctcagtataacagctatggggatgtcagcgggggagtgcgagattaccagacactcccagatggccacatgcctgcaatgagaatggaccgaggagtgtctatgcccaacatgttggaaccaaagatatttccatatgaaatgctcatggtgaccaacagagggcgaaacaaaatcctcagagaggtggacagaaccaggctggagcgccacttagcccctgaagtgtttcgggaaatctttggaatgtccatacaggagtttgacaggttacctctttggagacgcaacgacatgaagaaaaaagcaaaactcttctaagtcccactcgtgaatggcaattagagaaaggactgacagtggcggtgccccataggatgtcatattgaggcccaaacttgattggagaatttgcaaactaccgtcgctcagcaacaccaaaaagagaaagtctggttaaaacaccatgagtcaaatgtcgggccagccaacagtaacacttgccaagaagcatggcgtagaaatttctatgttccgaaacacagagtagtgtccacatgtgagcttttcacattaccttatgtatacaacaggagctgcgttgttttcttctttttcttttcctttatctgttgtccaacaacagtgctgactgtccggataagagctggcaagtgcccttaggatgccgcatgggaaaaatcggttatcataatttcaaagtataaatatatttattaagtagcgctgcggctaagaaggaagagtgaggggtctgtccatggggtggcagtgatttcacacccgcctttcttgaatggcttcgtgttactcagccgtgccctggcaggaatggaactccatcagggaacagggcagctctgtttgaatggggtgaaaaacagcaaaattaattcttagcaagctccttgttctctactgttcaccgggacctggctggcaaatgacttagctattagtatatttaaaaactgttcaaaagcaaaagagaaggaacaggaatgaaaggaaaccttcccttaactctttctgcttcccatagcaggtctggttcctgctccccgcctaggacaggagctgtctggagctccacctttgcaaagaaaggaaaaacacaaattgcccccagattggcccagtggcatgccattaggtgattttgcataggggccatatcattcatggccaaaaaaaaccaaaaagcaaaaaacaaaaacaagtcccatgtcctactgactctagttcttccagtcgttatcctctgctgtctctctggcatcctatgaatcagatcaagcccatgctgttgttggtttttaaggtttctttcaataataggctaaggaaagacatgtttttctcttttaaatctctgcaactccaaagtagactccttcgaacgtatttaatttggccttttcagctttcttcttgcccagctctgtcgaattcatgggtgtgtgtgcacatgttggtttcactcacccagagtaattttgtgagcatgcatgtgctttttaatttctgcttgaatgtttgtcctgctgtgttgcagcttctaaagacattgtcaccgagtgtgtgtgactcaaagatcaagagtgaggctaaactgcgaccccaacatcacttccttcatggaaaggtgttggcgctgatgtagctcatggaaggatcagactgggaaccacagaggaaggatgaggtgggatgtggaggtcagagcatctcacgagagtccctcaggctctgcaacactagattcgaatatgagcctagggtttccccaacacgtgcgtgcatatgaaaccacatcatgattcccgacgtgagttagatgagggagagtttgtgtaactccacacccaggagggtaagccactttattatcatgctttggggctgtgcttaagaatttaagctctgttttaaagccgaagaagaaaacatttgaatttaccttcatatgccactaagaacaaaagctctgaagttcttcctgctggcaccaaatattaggattacaagctgtctctctgacaccagtggtaaaaaagcaagtagaatagtttctgagtctgtgttgcagcctctgacacgtggctcaccgctgtcatttgggggatggaatgaacagtcactgttctatagcatcctcctgtgctcttacctaaggaatctaaattgtcctagccttccattgctatgcactgaatgaggactactctcgtgtgtgtgtgtgtgtgtgtgtgtgtgtgtgtgtgtgtgtgtgtgtgtgttggatctactaacatgtttagcaaatggctctgacagggtggccatgagcagatgagaccagctcttgcttggttggaagccacactgcagtttgcagtttagcctttggtgtctcagtggcttcttgcttattccatgctttttctatcccatcctctctctgtgccctcctgcaatggcagccttggcacaatgcctgggtgtcctcatccttgctttactctggaaagtgtggggatggagaggatggtgcatttccagtgcttccttacctgtcaataacaatggtggccacctgggtcccagcacttggctggtggagagatttttttcattatggagctaataaagggtccctacgttttacattgattaatgaattatcacccagacatgtgcagatgaaatgtcaatataagaaaaatcaaggtatttgggaaacatgggcataatcaggtagttttgctaaaattcctcttccttggtctacataaagaagacatgggtctgtcatagaatggggacattagactgaaaactgggacaacccccttccttattttatagagactaggagttaaggggcctgcctaagattgcagtgataaagaactgaaccctaaatcagctcccactaatgaaaccctgctttccttgtatcttttaaactcagttctgcatccaacttgagaagaaaaaaagcttctttccatatcaagtaccatatgagttcatttaaactgcaccttgcagaaatgcattgccagaaagcaccagtagcctcctatctgcaagcagagtagtgctctgctctggggaggggtcattggaaaccataatgcagagtgggccccctactccatttcccagcaaaaggctccagctggagggatgggttgtggggcaacctggttcctgctaactgccagattgaatgtgtgggctagaatgcctgcacatttagttaaactgggctcagcatgcttgtcctcaaaatgtccatcctggtcacagcacacaagatggctattggtctgcttttaccctaccctgtactatacatgaaaattccagttattaacacactcaaactggtggagcttgttcaccctaggaaggggattgtatatatggcaggcttccctggtgccgatgtaaagggctacatttgggaacatttgacttccttgggactcttaagtgcataatgatggcatgaagtaaaaggggcctcaatgatgataggaaaatcagttcttttaaaatttcttcaagaaaatccaggctatcacatagtctttctgtgtgacttattaggagataggaagagcattgggaaacttgcacagctagctatgcatctacattttggtttggggttagttatgaaatgttcttaatatgacgtgttcaataacttcacataaacttcctgttctccaaaacctcaaagagatagagttaatgagttgttgtttttttttaaatgggggtagttttctatctgtcatgggctctagcatctactccgctacccaattctgtcatctccaagctgagtttcctcttctgaggcagaggctggagcagttctttttcagttctcatcctctccatcccaatccagtatatcaatcaactctaactcggagacgtctagctggcaatgtttctaaaactttcactggatttctttagacattgaagcaaacatttttttctaagaattgcttctcagatgatgatatcaaatgtatatgcttttgcaagtttgaaaagttcaaattaaccacttttgactaggtaagtctttctaaaaaccatttaaagctaactgggtcttagcatcctcctgtgtatggaagagacaggtgaccgctccaggttgggtgctcacagaacccttttcctgactctcatggaagatggtggaaggaaaatagactgtctcatcaaccctcctgtgtcctctgaagcaatctcagtttttattaaccacctcttctgtgtttctggtagctatttaacctgtatttaatctgtacttcctatgccagcctcaattttatttgatttttacaattattctcttctaaccaatgaagtgtttgtcagtatgccccaaagcttgctcttttgtgctcccttttgaataactttctatccagaaaaagagattatttgggacttgagatttgcagtgataccaacttatagcaatgatgtactttaagggaactacccaactatgttgtgatagaagaaagagaaaccttcactttggcatttttttttaatcactgtttatttttctgtttgcggcccaggaagcagtgggaggtggtggcagatatgctttgcatatggattgttatgtttttatttgggcaagtttaatcatggaaaactcaaaaagaaggggggaaatggtcagtttaagccaaaagaaactttctaaacaatgtataggtacacagcaaaattaaacaaatccaacaatttctgaagcttagtgtaattgagtggtggttgttattcaataaaattattcccaaaagtgtttctcctaagagtgcagttcccatgagtcacttcctgaacccattgaccaaaggtggacagagacaatcctgtagaccttgacattcagaaagatgtgagctgcttactgatcatatatgcatacgtttctttacagcagaggaaaccattgtccacaaaactgatgttcttttggggttttatgtacagacttgtccaatcatgtgtgtggttcctgcgagttgctgatgactccgcattgaagctctctgagttctttgattttaagttgggtttatggaattttttcaaatgttggaaggtgtgtggttcttcctgccctccctccccttttggaaatatgaaagcaaatgtttagaagaattccttttgaaaagctgtgtcgtgttccctgtgaaactgagcaggtgtgtgttggcgcgctaagtgccacatgcttgtgtgtagaggaggaggtggccctgccggctccgcgctgctgtgcctgtgatccctacctgctccccgctcctgttgccagcagcactcactgcactcctttgtcatatactctgcatcactgtcatactcacaacttcgtgaataaagttgtgtgctttattcgt

SEQ ID NO: 1697 - DNA, 2803 bp, Homo sapiens
  source 1..2803: mol_type = genomic DNA
gcaatcatttatcagactgtgggagggggccagcgttcgggagcttttcatagcccgtcctcggtgcgaggaatacaaggtggtgtcagtgaccagagattaggacagtagaattttgcatttgttacagcagcagctgtagcgagtggtttcagccgcagggcagagtccccgagctgggcgcggctgcagctcggcgggcgggcggagaagagcgcgggggcgatagcggggcgggcatgggagcggggcccgccgaggcggggcgggactcgagaccacagccccggacctcacaagcggatgccggggcttctcctggctgccccagcgcccgcggatctgtctgccgaggcgcgcttccactcccagagtttattcctcgttccttcttcagtcctgctcgtcggaggacccggttgccatggtgaaggaaaaagtggcccaccctcaggaccctcaccacccatcagagaagcctgtcattcactgccataaatgtggggagccttgcaagggtgaagtgcttcgggtccagaccaaacatttccacatcaagtgtttcacctgcaaagtgtgtggctgtgacctggcacaagggggcttcttcataaagaacggagagtatctctgcaccctggactaccagcggatgtacgggacacgctgccatggctgtggggagttcgtggagggcgaagtggtgactgctctgggcaagacctaccatcccaattgctttgcttgtactatctgcaagcgcccgtttccacccggagaccgagtcacattcaatgggagagactgcctttgtcaactctgtgcacagccgatgtcgtccagtccgaaagaaaccaccttctccagcaattgtgccggctgcggaagagatatcaagaatgggcaggcgctgctggcgctggataagcagtggcacttggggtgctttaaatgcaagtcctgcgggaaggtcctcaccggggagtacatcagcaaggatggtgctccgtactgtgaaaaggactaccagggactctttggggtgaaatgtgaggcgtgtcaccagtttatcacagggaaagtcctggaggcaggtgacaaacattaccaccccagctgtgcacgatgcagcagatgcaaccagatgttcacagaaggagaggaaatgtatcttcaaggctccaccgtttggcatcccgactgtaagcaatctacgaagaccgaggaaaagctgcggcctaccaggacatcctcggaaagtatttattctaggccaggctccagtattcctggctcaccaggtcatactatctatgcaaaagtagacaatgagatcctggattacaaggatttagcagccattccgaaggtcaaggcaatttatgacattgaacgtccagatcttattacctatgagcctttctacacttcgggctatgatgacaaacaggagagacagagccttggagagtctccgaggactttgtctcctactccatcagcagaagggtaccaggatgttcgggatcggatgatccatcggtccacgagccagggctccatcaactcccctgtgtacagccgccacagctacactccaaccacgtcccgctctccccagcatttccacagacctggcaatgagccgtccagcggccggaactcccctctcccttaccggccagacagccgccctctaactccaacttacgctcaggcccctaaacatttccatgttccagatcaaggaatcaacatttaccgaaagccacccatctacaaacagcatggacctgacatgaaacgcagatctagtggcagagaggaagatgatgaggaacttctgagacgtcggcagcttcaagaagagcaattaatgaagcttaactcaggcctgggacagttgatcttgaaagaagagatggagaaagagagccgggaaaggtcatctctgttagccagtcgctacgattctcccatcaactcagcttcacatattccatcatctaaaactgcatctctccctggctatggaagaaatgggcttcaccggcctgtttctaccgacttcgctcagtataacagctatggggatgtcagcgggggagtgcgagatttccagacactcccagatggccacatgcctgcaatgagaatggaccgaggagtgtctatgcccaacatgttggaaccaaagatatttccatatgaaatgctcatggtgaccaacagagggcgaaacaaaatcctcagagaggtggacagaaccaggctggagcgccacttagcccctgaagtgtttcgggaaatctttggaatgtccatacaggagtttgacaggttacctctttggagacgcaacgacatgaagaaaaaagcaaaactcttctaagtcccactcgtgaatggcaattagagaaaggactgacagtggcggtgccccataggatgtcatattgaggcccaaacttgattggagaatttgcaaactaccgtcgctcagcaacaccaaaaagagaaagtctggttaaaacaccatgagtcaaatgtcgggccagccaacagtaacacttgccaagaagcatggcgtagaaatttctatgttccgaaacacagagtagtgtccacatgtgagcttttcacattaccttatgtatacaacaggagctgcgttgttttcttctttttcttttcctttatctgttgtccaacaacagtgctgactgtccggataagagctggcaagtgcccttaggatgccgcatgggaaaaatcggttatcataatttcaaagtataaatat

SEQ ID NO: 1698 - DNA, 7688 bp, Homo sapiens
  source 1..7688: mol_type = genomic DNA
atgcctgccttccttggtctaaagtgtctggggaaattgtgcagctctgagaaaagcaaagtcacctcatctgagagaaccagtgccaggggctcgaacagaaagagactgattgttgaggaccggagggtctctgggacctccttcaccgctcataggcgtgccactatcactcatttgctgtatctctgtcccaaggactactgcccacgtgggcgtgtatgtaacagcgttgatccttttgtggcccaccctcaggaccctcaccacccatcagagaagcctgtcattcactgccataaatgtggggagccttgcaagggtgaagtgcttcgggtccagaccaaacatttccacatcaagtgtttcacctgcaaagtgtgtggctgtgacctggcacaagggggcttcttcataaagaacggagagtatctctgcaccctggactaccagcggatgtacgggacacgctgccatggctgtggggagttcgtggagggcgaagtggtgactgctctgggcaagacctaccatcccaattgctttgcttgtactatctgcaagcgcccgtttccacccggagaccgagtcacattcaatgggagagactgcctttgtcaactctgtgcacagccgatgtcgtccagtccgaaagaaaccaccttctccagcaattgtgccggctgcggaagagatatcaagaatgggcaggcgctgctggcgctggataagcagtggcacttggggtgctttaaatgcaagtcctgcgggaaggtcctcaccggggagtacatcagcaaggatggtgctccgtactgtgaaaaggactaccagggactctttggggtgaaatgtgaggcgtgtcaccagtttatcacagggaaagtcctggaggcaggtgacaaacattaccaccccagctgtgcacgatgcagcagatgcaaccagatgttcacagaaggagaggaaatgtatcttcaaggctccaccgtttggcatcccgactgtaagcaatctacgaagaccgaggaaaagctgcggctgccaaacattcggcgttcttcatccgatttcttttattccaaaagtctgattcgacgcacaggacggtctccgtctctgcagcctaccaggacatcctcggaaagtatttattctaggccaggctccagtattcctggctcaccaggtcatactatctatgcaaaagtagacaatgagatcctggattacaaggatttagcagccattccgaaggtcaaggcaatttatgacattgaacgtccagatcttattacctatgagcctttctacacttcgggctatgatgacaaacaggagagacagagccttggagagtctccgaggactttgtctcctactccatcagcagaagggtaccaggatgttcgggatcggatgatccatcggtccacgagccagggctccatcaactcccctgtgtacagccgccacagctacactccaaccacgtcccgctctccccagcatttccacagacctgagcttttgtctcctggtgtgcagaggttgtcgtacctgcgcaccagcagcctcagccccacccacagcgactcccgccccaacccccctttccgacaccacttcattccccatatcaaaggcaatgagccgtccagcggccggaactcccctctcccttaccggccagacagccgccctctaactccaacttacgctcaggcccctaaacatttccatgttccagatcaaggaatcaacatttaccgaaagccacccatctacaaacagcatgctgccttggcagcccagagcaagtcctcagaagatatcatcaagttttccaagttcccagcagcccaggcaccagaccccagcgagacaccaaagattgagacggaccactggcctggtcccccctcatttgctgtcgtaggacctgacatgaaacgcagatctagtggcagagaggaagatgatgaggaacttctgagacgtcggcagcttcaagaagagcaattaatgaagcttaactcaggcctgggacagttgatcttgaaagaagagatggagaaagagagccgggaaaggtcatctctgttagccagtcgctacgattctcccatcaactcagcttcacatattccatcatctaaaactgcatctctccctggctatggaagaaatgggcttcaccggcctgtttctaccgacttcgctcagtataacagctatggggatgtcagcgggggagtgcgagaatatcagacactcccagatggccacatgcctgcaatgagaatggaccgaggagtgtctatgcccaacatgttggaaccaaagatatttccatatgaaatgctcatggtgaccaacagagggcgaaacaaaatcctcagagaggtggacagaaccaggctggagcgccacttagcccctgaagtgtttcgggaaatctttggaatgtccatacaggagtttgacaggttacctctttggagacgcaacgacatgaagaaaaaagcaaaactcttctaagtcccactcgtgaatggcaattagagaaaggactgacagtggcggtgccccataggatgtcatattgaggcccaaacttgattggagaatttgcaaactaccgtcgctcagcaacaccaaaaagagaaagtctggttaaaacaccatgagtcaaatgtcgggccagccaacagtaacacttgccaagaagcatggcgtagaaatttctatgttccgaaacacagagtagtgtccacatgtgagcttttcacattaccttatgtatacaacaggagctgcgttgttttcttctttttcttttcctttatctgttgtccaacaacagtgctgactgtccggataagagctggcaagtgcccttaggatgccgcatgggaaaaatcggttatcataatttcaaagtataaatatatttattaagtagcgctgcggctaagaaggaagagtgaggggtctgtccatggggtggcagtgatttcacacccgcctttcttgaatggcttcgtgttactcagccgtgccctggcaggaatggaactccatcagggaacagggcagctctgtttgaatggggtgaaaaacagcaaaattaattcttagcaagctccttgttctctactgttcaccgggacctggctggcaaatgacttagctattagtatatttaaaaactgttcaaaagcaaaagagaaggaacaggaatgaaaggaaaccttcccttaactctttctgcttcccatagcaggtctggttcctgctccccgcctaggacaggagctgtctggagctccacctttgcaaagaaaggaaaaacacaaattgcccccagattggcccagtggcatgccattaggtgattttgcataggggccatatcattcatggccaaaaaaaaccaaaaagcaaaaaacaaaaacaagtcccatgtcctactgactctagttcttccagtcgttatcctctgctgtctctctggcatcctatgaatcagatcaagcccatgctgttgttggtttttaaggtttctttcaataataggctaaggaaagacatgtttttctcttttaaatctctgcaactccaaagtagactccttcgaacgtatttaatttggccttttcagctttcttcttgcccagctctgtcgaattcatgggtgtgtgtgcacatgttggtttcactcacccagagtaattttgtgagcatgcatgtgctttttaatttctgcttgaatgtttgtcctgctgtgttgcagcttctaaagacattgtcaccgagtgtgtgtgactcaaagatcaagagtgaggctaaactgcgaccccaacatcacttccttcatggaaaggtgttggcgctgatgtagctcatggaaggatcagactgggaaccacagaggaaggatgaggtgggatgtggaggtcagagcatctcacgagagtccctcaggctctgcaacactagattcgaatatgagcctagggtttccccaacacgtgcgtgcatatgaaaccacatcatgattcccgacgtgagttagatgagggagagtttgtgtaactccacacccaggagggtaagccactttattatcatgctttggggctgtgcttaagaatttaagctctgttttaaagccgaagaagaaaacatttgaatttaccttcatatgccactaagaacaaaagctctgaagttcttcctgctggcaccaaatattaggattacaagctgtctctctgacaccagtggtaaaaaagcaagtagaatagtttctgagtctgtgttgcagcctctgacacgtggctcaccgctgtcatttgggggatggaatgaacagtcactgttctatagcatcctcctgtgctcttacctaaggaatctaaattgtcctagccttccattgctatgcactgaatgaggactactctcgtgtgtgtgtgtgtgtgtgtgtgtgtgtgtgtgtgtgtgtgtgtgtgtgttggatctactaacatgtttagcaaatggctctgacagggtggccatgagcagatgagaccagctcttgcttggttggaagccacactgcagtttgcagtttagcctttggtgtctcagtggcttcttgcttattccatgctttttctatcccatcctctctctgtgccctcctgcaatggcagccttggcacaatgcctgggtgtcctcatccttgctttactctggaaagtgtggggatggagaggatggtgcatttccagtgcttccttacctgtcaataacaatggtggccacctgggtcccagcacttggctggtggagagatttttttcattatggagctaataaagggtccctacgttttacattgattaatgaattatcacccagacatgtgcagatgaaatgtcaatataagaaaaatcaaggtatttgggaaacatgggcataatcaggtagttttgctaaaattcctcttccttggtctacataaagaagacatgggtctgtcatagaatggggacattagactgaaaactgggacaacccccttccttattttatagagactaggagttaaggggcctgcctaagattgcagtgataaagaactgaaccctaaatcagctcccactaatgaaaccctgctttccttgtatcttttaaactcagttctgcatccaacttgagaagaaaaaaagcttctttccatatcaagtaccatatgagttcatttaaactgcaccttgcagaaatgcattgccagaaagcaccagtagcctcctatctgcaagcagagtagtgctctgctctggggaggggtcattggaaaccataatgcagagtgggccccctactccatttcccagcaaaaggctccagctggagggatgggttgtggggcaacctggttcctgctaactgccagattgaatgtgtgggctagaatgcctgcacatttagttaaactgggctcagcatgcttgtcctcaaaatgtccatcctggtcacagcacacaagatggctattggtctgcttttaccctaccctgtactatacatgaaaattccagttattaacacactcaaactggtggagcttgttcaccctaggaaggggattgtatatatggcaggcttccctggtgccgatgtaaagggctacatttgggaacatttgacttccttgggactcttaagtgcataatgatggcatgaagtaaaaggggcctcaatgatgataggaaaatcagttcttttaaaatttcttcaagaaaatccaggctatcacatagtctttctgtgtgacttattaggagataggaagagcattgggaaacttgcacagctagctatgcatctacattttggtttggggttagttatgaaatgttcttaatatgacgtgttcaataacttcacataaacttcctgttctccaaaacctcaaagagatagagttaatgagttgttgtttttttttaaatgggggtagttttctatctgtcatgggctctagcatctactccgctacccaattctgtcatctccaagctgagtttcctcttctgaggcagaggctggagcagttctttttcagttctcatcctctccatcccaatccagtatatcaatcaactctaactcggagacgtctagctggcaatgtttctaaaactttcactggatttctttagacattgaagcaaacatttttttctaagaattgcttctcagatgatgatatcaaatgtatatgcttttgcaagtttgaaaagttcaaattaaccacttttgactaggtaagtctttctaaaaaccatttaaagctaactgggtcttagcatcctcctgtgtatggaagagacaggtgaccgctccaggttgggtgctcacagaacccttttcctgactctcatggaagatggtggaaggaaaatagactgtctcatcaaccctcctgtgtcctctgaagcaatctcagtttttattaaccacctcttctgtgtttctggtagctatttaacctgtatttaatctgtacttcctatgccagcctcaattttatttgatttttacaattattctcttctaaccaatgaagtgtttgtcagtatgccccaaagcttgctcttttgtgctcccttttgaataactttctatccagaaaaagagattatttgggacttgagatttgcagtgataccaacttatagcaatgatgtactttaagggaactacccaactatgttgtgatagaagaaagagaaaccttcactttggcatttttttttaatcactgtttatttttctgtttgcggcccaggaagcagtgggaggtggtggcagatatgctttgcatatggattgttatgtttttatttgggcaagtttaatcatggaaaactcaaaaagaaggggggaaatggtcagtttaagccaaaagaaactttctaaacaatgtataggtacacagcaaaattaaacaaatccaacaatttctgaagcttagtgtaattgagtggtggttgttattcaataaaattattcccaaaagtgtttctcctaagagtgcagttcccatgagtcacttcctgaacccattgaccaaaggtggacagagacaatcctgtagaccttgacattcagaaagatgtgagctgcttactgatcatatatgcatacgtttctttacagcagaggaaaccattgtccacaaaactgatgttcttttggggttttatgtacagacttgtccaatcatgtgtgtggttcctgcgagttgctgatgactccgcattgaagctctctgagttctttgattttaagttgggtttatggaattttttcaaatgttggaaggtgtgtggttcttcctgccctccctccccttttggaaatatgaaagcaaatgtttagaagaattccttttgaaaagctgtgtcgtgttccctgtgaaactgagcaggtgtgtgttggcgcgctaagtgccacatgcttgtgtgtagaggaggaggtggccctgccggctccgcgctgctgtgcctgtgatccctacctgctccccgctcctgttgccagcagcactcactgcactcctttgtcatatactctgcatcactgtcatactcacaacttcgtgaataaagttgtgtgctttattcgt

SEQ ID NO: 1699 - DNA, 7256 bp, Homo sapiens
  source 1..7256: mol_type = genomic DNA
atggtgccagaccctgtggcccaccctcaggaccctcaccacccatcagagaagcctgtcattcactgccataaatgtggggagccttgcaagggtgaagtgcttcgggtccagaccaaacatttccacatcaagtgtttcacctgcaaagtgtgtggctgtgacctggcacaagggggcttcttcataaagaacggagagtatctctgcaccctggactaccagcggatgtacgggacacgctgccatggctgtggggagttcgtggagggcgaagtggtgactgctctgggcaagacctaccatcccaattgctttgcttgtactatctgcaagcgcccgtttccacccggagaccgagtcacattcaatgggagagactgcctttgtcaactctgtgcacagccgatgtcgtccagtccgaaagaaaccaccttctccagcaattgtgccggctgcggaagagatatcaagaatgggcaggcgctgctggcgctggataagcagtggcacttggggtgctttaaatgcaagtcctgcgggaaggtcctcaccggggagtacatcagcaaggatggtgctccgtactgtgaaaaggactaccagggactctttggggtgaaatgtgaggcgtgtcaccagtttatcacagggaaagtcctggaggcaggtgacaaacattaccaccccagctgtgcacgatgcagcagatgcaaccagatgttcacagaaggagaggaaatgtatcttcaaggctccaccgtttggcatcccgactgtaagcaatctacgaagaccgaggaaaagctgcggcctaccaggacatcctcggaaagtatttattctaggccaggctccagtattcctggctcaccaggtcatactatctatgcaaaagtagacaatgagatcctggattacaaggatttagcagccattccgaaggtcaaggcaatttatgacattgaacgtccagatcttattacctatgagcctttctacacttcgggctatgatgacaaacaggagagacagagccttggagagtctccgaggactttgtctcctactccatcagcagaagggtaccaggatgttcgggatcggatgatccatcggtccacgagccagggctccatcaactcccctgtgtacagccgccacagctacactccaaccacgtcccgctctccccagcatttccacagacctggcaatgagccgtccagcggccggaactcccctctcccttaccggccagacagccgccctctaactccaacttacgctcaggcccctaaacatttccatgttccagatcaaggaatcaacatttaccgaaagccacccatctacaaacagcatgctgccttggcagcccagagcaagtcctcagaagatatcatcaagttttccaagttcccagcagcccaggcaccagaccccagcgagacaccaaagattgagacggaccactggcctggtcccccctcatttgctgtcgtaggacctgacatgaaacgcagatctagtggcagagaggaagatgatgaggaacttctgagacgtcggcagcttcaagaagagcaattaatgaagcttaactcaggcctgggacagttgatcttgaaagaagagatggagaaagagagccgggaaaggtcatctctgttagccagtcgctacgattctcccatcaactcagcttcacatattccatcatctaaaactgcatctctccctggctatggaagaaatgggcttcaccggcctgtttctaccgacttcgctcagtataacagctatggggatgtcagcgggggagtgcgagaatatcagacactcccagatggccacatgcctgcaatgagaatggaccgaggagtgtctatgcccaacatgttggaaccaaagatatttccatatgaaatgctcatggtgaccaacagagggcgaaacaaaatcctcagagaggtggacagaaccaggctggagcgccacttagcccctgaagtgtttcgggaaatctttggaatgtccatacaggagtttgacaggttacctctttggagacgcaacgacatgaagaaaaaagcaaaactcttctaagtcccactcgtgaatggcaattagagaaaggactgacagtggcggtgccccataggatgtcatattgaggcccaaacttgattggagaatttgcaaactaccgtcgctcagcaacaccaaaaagagaaagtctggttaaaacaccatgagtcaaatgtcgggccagccaacagtaacacttgccaagaagcatggcgtagaaatttctatgttccgaaacacagagtagtgtccacatgtgagcttttcacattaccttatgtatacaacaggagctgcgttgttttcttctttttcttttcctttatctgttgtccaacaacagtgctgactgtccggataagagctggcaagtgcccttaggatgccgcatgggaaaaatcggttatcataatttcaaagtataaatatatttattaagtagcgctgcggctaagaaggaagagtgaggggtctgtccatggggtggcagtgatttcacacccgcctttcttgaatggcttcgtgttactcagccgtgccctggcaggaatggaactccatcagggaacagggcagctctgtttgaatggggtgaaaaacagcaaaattaattcttagcaagctccttgttctctactgttcaccgggacctggctggcaaatgacttagctattagtatatttaaaaactgttcaaaagcaaaagagaaggaacaggaatgaaaggaaaccttcccttaactctttctgcttcccatagcaggtctggttcctgctccccgcctaggacaggagctgtctggagctccacctttgcaaagaaaggaaaaacacaaattgcccccagattggcccagtggcatgccattaggtgattttgcataggggccatatcattcatggccaaaaaaaaccaaaaagcaaaaaacaaaaacaagtcccatgtcctactgactctagttcttccagtcgttatcctctgctgtctctctggcatcctatgaatcagatcaagcccatgctgttgttggtttttaaggtttctttcaataataggctaaggaaagacatgtttttctcttttaaatctctgcaactccaaagtagactccttcgaacgtatttaatttggccttttcagctttcttcttgcccagctctgtcgaattcatgggtgtgtgtgcacatgttggtttcactcacccagagtaattttgtgagcatgcatgtgctttttaatttctgcttgaatgtttgtcctgctgtgttgcagcttctaaagacattgtcaccgagtgtgtgtgactcaaagatcaagagtgaggctaaactgcgaccccaacatcacttccttcatggaaaggtgttggcgctgatgtagctcatggaaggatcagactgggaaccacagaggaaggatgaggtgggatgtggaggtcagagcatctcacgagagtccctcaggctctgcaacactagattcgaatatgagcctagggtttccccaacacgtgcgtgcatatgaaaccacatcatgattcccgacgtgagttagatgagggagagtttgtgtaactccacacccaggagggtaagccactttattatcatgctttggggctgtgcttaagaatttaagctctgttttaaagccgaagaagaaaacatttgaatttaccttcatatgccactaagaacaaaagctctgaagttcttcctgctggcaccaaatattaggattacaagctgtctctctgacaccagtggtaaaaaagcaagtagaatagtttctgagtctgtgttgcagcctctgacacgtggctcaccgctgtcatttgggggatggaatgaacagtcactgttctatagcatcctcctgtgctcttacctaaggaatctaaattgtcctagccttccattgctatgcactgaatgaggactactctcgtgtgtgtgtgtgtgtgtgtgtgtgtgtgtgtgtgtgtgtgtgtgtgtgttggatctactaacatgtttagcaaatggctctgacagggtggccatgagcagatgagaccagctcttgcttggttggaagccacactgcagtttgcagtttagcctttggtgtctcagtggcttcttgcttattccatgctttttctatcccatcctctctctgtgccctcctgcaatggcagccttggcacaatgcctgggtgtcctcatccttgctttactctggaaagtgtggggatggagaggatggtgcatttccagtgcttccttacctgtcaataacaatggtggccacctgggtcccagcacttggctggtggagagatttttttcattatggagctaataaagggtccctacgttttacattgattaatgaattatcacccagacatgtgcagatgaaatgtcaatataagaaaaatcaaggtatttgggaaacatgggcataatcaggtagttttgctaaaattcctcttccttggtctacataaagaagacatgggtctgtcatagaatggggacattagactgaaaactgggacaacccccttccttattttatagagactaggagttaaggggcctgcctaagattgcagtgataaagaactgaaccctaaatcagctcccactaatgaaaccctgctttccttgtatcttttaaactcagttctgcatccaacttgagaagaaaaaaagcttctttccatatcaagtaccatatgagttcatttaaactgcaccttgcagaaatgcattgccagaaagcaccagtagcctcctatctgcaagcagagtagtgctctgctctggggaggggtcattggaaaccataatgcagagtgggccccctactccatttcccagcaaaaggctccagctggagggatgggttgtggggcaacctggttcctgctaactgccagattgaatgtgtgggctagaatgcctgcacatttagttaaactgggctcagcatgcttgtcctcaaaatgtccatcctggtcacagcacacaagatggctattggtctgcttttaccctaccctgtactatacatgaaaattccagttattaacacactcaaactggtggagcttgttcaccctaggaaggggattgtatatatggcaggcttccctggtgccgatgtaaagggctacatttgggaacatttgacttccttgggactcttaagtgcataatgatggcatgaagtaaaaggggcctcaatgatgataggaaaatcagttcttttaaaatttcttcaagaaaatccaggctatcacatagtctttctgtgtgacttattaggagataggaagagcattgggaaacttgcacagctagctatgcatctacattttggtttggggttagttatgaaatgttcttaatatgacgtgttcaataacttcacataaacttcctgttctccaaaacctcaaagagatagagttaatgagttgttgtttttttttaaatgggggtagttttctatctgtcatgggctctagcatctactccgctacccaattctgtcatctccaagctgagtttcctcttctgaggcagaggctggagcagttctttttcagttctcatcctctccatcccaatccagtatatcaatcaactctaactcggagacgtctagctggcaatgtttctaaaactttcactggatttctttagacattgaagcaaacatttttttctaagaattgcttctcagatgatgatatcaaatgtatatgcttttgcaagtttgaaaagttcaaattaaccacttttgactaggtaagtctttctaaaaaccatttaaagctaactgggtcttagcatcctcctgtgtatggaagagacaggtgaccgctccaggttgggtgctcacagaacccttttcctgactctcatggaagatggtggaaggaaaatagactgtctcatcaaccctcctgtgtcctctgaagcaatctcagtttttattaaccacctcttctgtgtttctggtagctatttaacctgtatttaatctgtacttcctatgccagcctcaattttatttgatttttacaattattctcttctaaccaatgaagtgtttgtcagtatgccccaaagcttgctcttttgtgctcccttttgaataactttctatccagaaaaagagattatttgggacttgagatttgcagtgataccaacttatagcaatgatgtactttaagggaactacccaactatgttgtgatagaagaaagagaaaccttcactttggcatttttttttaatcactgtttatttttctgtttgcggcccaggaagcagtgggaggtggtggcagatatgctttgcatatggattgttatgtttttatttgggcaagtttaatcatggaaaactcaaaaagaaggggggaaatggtcagtttaagccaaaagaaactttctaaacaatgtataggtacacagcaaaattaaacaaatccaacaatttctgaagcttagtgtaattgagtggtggttgttattcaataaaattattcccaaaagtgtttctcctaagagtgcagttcccatgagtcacttcctgaacccattgaccaaaggtggacagagacaatcctgtagaccttgacattcagaaagatgtgagctgcttactgatcatatatgcatacgtttctttacagcagaggaaaccattgtccacaaaactgatgttcttttggggttttatgtacagacttgtccaatcatgtgtgtggttcctgcgagttgctgatgactccgcattgaagctctctgagttctttgattttaagttgggtttatggaattttttcaaatgttggaaggtgtgtggttcttcctgccctccctccccttttggaaatatgaaagcaaatgtttagaagaattccttttgaaaagctgtgtcgtgttccctgtgaaactgagcaggtgtgtgttggcgcgctaagtgccacatgcttgtgtgtagaggaggaggtggccctgccggctccgcgctgctgtgcctgtgatccctacctgctccccgctcctgttgccagcagcactcactgcactcctttgtcatatactctgcatcactgtcatactcacaacttcgtgaataaagttgtgtgctttattcgt

SEQ ID NO: 1700 - DNA, 6836 bp, Homo sapiens
  source 1..6836: mol_type = genomic DNA
gaggagaggaggcgtgagagagcgtgcctgcccgccgcacacggggctggtttccggagtgcgtctctagagggatgcacgttgccttagccgagcttcggagagaagcctgatatgtaacccaggcaggtgggagcctcagtctgtcgggctgaggtctggcatctacaaagcctcttggccgtgttctgaacttgaagcctggaggagttctctgctcagcacagccaaggaacagaattagaagaaaaggaaccctggcctgaggcaggtgacaaacattaccaccccagctgtgcacgatgcagcagatgcaaccagatgttcacagaaggagaggaaatgtatcttcaaggctccaccgtttggcatcccgactgtaagcaatctacgaagaccgaggaaaagctgcggctgccaaacattcggcgttcttcatccgatttcttttattccaaaagtctgattcgacgcacaggacggtctccgtctctgcagcctaccaggacatcctcggaaagtatttattctaggccaggctccagtattcctggctcaccaggtcatactatctatgcaaaagtagacaatgagatcctggattacaaggatttagcagccattccgaaggtcaaggcaatttatgacattgaacgtccagatcttattacctatgagcctttctacacttcgggctatgatgacaaacaggagagacagagccttggagagtctccgaggactttgtctcctactccatcagcagaagggtaccaggatgttcgggatcggatgatccatcggtccacgagccagggctccatcaactcccctgtgtacagccgccacagctacactccaaccacgtcccgctctccccagcatttccacagacctgatcaaggaatcaacatttaccgaaagccacccatctacaaacagcatgctgccttggcagcccagagcaagtcctcagaagatatcatcaagttttccaagttcccagcagcccaggcaccagaccccagcgagacaccaaagattgagacggaccactggcctggtcccccctcatttgctgtcgtaggacctgacatgaaacgcagatctagtggcagagaggaagatgatgaggaacttctgagacgtcggcagcttcaagaagagcaattaatgaagcttaactcaggcctgggacagttgatcttgaaagaagagatggagaaagagagccgggaaaggtcatctctgttagccagtcgctacgattctcccatcaactcagcttcacatattccatcatctaaaactgcatctctccctggctatggaagaaatgggcttcaccggcctgtttctaccgacttcgctcagtataacagctatggggatgtcagcgggggagtgcgagatttccagacactcccagatggccacatgcctgcaatgagaatggaccgaggagtgtctatgcccaacatgttggaaccaaagatatttccatatgaaatgctcatggtgaccaacagagggcgaaacaaaatcctcagagaggtggacagaaccaggctggagcgccacttagcccctgaagtgtttcgggaaatctttggaatgtccatacaggagtttgacaggttacctctttggagacgcaacgacatgaagaaaaaagcaaaactcttctaagtcccactcgtgaatggcaattagagaaaggactgacagtggcggtgccccataggatgtcatattgaggcccaaacttgattggagaatttgcaaactaccgtcgctcagcaacaccaaaaagagaaagtctggttaaaacaccatgagtcaaatgtcgggccagccaacagtaacacttgccaagaagcatggcgtagaaatttctatgttccgaaacacagagtagtgtccacatgtgagcttttcacattaccttatgtatacaacaggagctgcgttgttttcttctttttcttttcctttatctgttgtccaacaacagtgctgactgtccggataagagctggcaagtgcccttaggatgccgcatgggaaaaatcggttatcataatttcaaagtataaatatatttattaagtagcgctgcggctaagaaggaagagtgaggggtctgtccatggggtggcagtgatttcacacccgcctttcttgaatggcttcgtgttactcagccgtgccctggcaggaatggaactccatcagggaacagggcagctctgtttgaatggggtgaaaaacagcaaaattaattcttagcaagctccttgttctctactgttcaccgggacctggctggcaaatgacttagctattagtatatttaaaaactgttcaaaagcaaaagagaaggaacaggaatgaaaggaaaccttcccttaactctttctgcttcccatagcaggtctggttcctgctccccgcctaggacaggagctgtctggagctccacctttgcaaagaaaggaaaaacacaaattgcccccagattggcccagtggcatgccattaggtgattttgcataggggccatatcattcatggccaaaaaaaaccaaaaagcaaaaaacaaaaacaagtcccatgtcctactgactctagttcttccagtcgttatcctctgctgtctctctggcatcctatgaatcagatcaagcccatgctgttgttggtttttaaggtttctttcaataataggctaaggaaagacatgtttttctcttttaaatctctgcaactccaaagtagactccttcgaacgtatttaatttggccttttcagctttcttcttgcccagctctgtcgaattcatgggtgtgtgtgcacatgttggtttcactcacccagagtaattttgtgagcatgcatgtgctttttaatttctgcttgaatgtttgtcctgctgtgttgcagcttctaaagacattgtcaccgagtgtgtgtgactcaaagatcaagagtgaggctaaactgcgaccccaacatcacttccttcatggaaaggtgttggcgctgatgtagctcatggaaggatcagactgggaaccacagaggaaggatgaggtgggatgtggaggtcagagcatctcacgagagtccctcaggctctgcaacactagattcgaatatgagcctagggtttccccaacacgtgcgtgcatatgaaaccacatcatgattcccgacgtgagttagatgagggagagtttgtgtaactccacacccaggagggtaagccactttattatcatgctttggggctgtgcttaagaatttaagctctgttttaaagccgaagaagaaaacatttgaatttaccttcatatgccactaagaacaaaagctctgaagttcttcctgctggcaccaaatattaggattacaagctgtctctctgacaccagtggtaaaaaagcaagtagaatagtttctgagtctgtgttgcagcctctgacacgtggctcaccgctgtcatttgggggatggaatgaacagtcactgttctatagcatcctcctgtgctcttacctaaggaatctaaattgtcctagccttccattgctatgcactgaatgaggactactctcgtgtgtgtgtgtgtgtgtgtgtgtgtgtgtgtgtgtgtgtgtgtgtgtgttggatctactaacatgtttagcaaatggctctgacagggtggccatgagcagatgagaccagctcttgcttggttggaagccacactgcagtttgcagtttagcctttggtgtctcagtggcttcttgcttattccatgctttttctatcccatcctctctctgtgccctcctgcaatggcagccttggcacaatgcctgggtgtcctcatccttgctttactctggaaagtgtggggatggagaggatggtgcatttccagtgcttccttacctgtcaataacaatggtggccacctgggtcccagcacttggctggtggagagatttttttcattatggagctaataaagggtccctacgttttacattgattaatgaattatcacccagacatgtgcagatgaaatgtcaatataagaaaaatcaaggtatttgggaaacatgggcataatcaggtagttttgctaaaattcctcttccttggtctacataaagaagacatgggtctgtcatagaatggggacattagactgaaaactgggacaacccccttccttattttatagagactaggagttaaggggcctgcctaagattgcagtgataaagaactgaaccctaaatcagctcccactaatgaaaccctgctttccttgtatcttttaaactcagttctgcatccaacttgagaagaaaaaaagcttctttccatatcaagtaccatatgagttcatttaaactgcaccttgcagaaatgcattgccagaaagcaccagtagcctcctatctgcaagcagagtagtgctctgctctggggaggggtcattggaaaccataatgcagagtgggccccctactccatttcccagcaaaaggctccagctggagggatgggttgtggggcaacctggttcctgctaactgccagattgaatgtgtgggctagaatgcctgcacatttagttaaactgggctcagcatgcttgtcctcaaaatgtccatcctggtcacagcacacaagatggctattggtctgcttttaccctaccctgtactatacatgaaaattccagttattaacacactcaaactggtggagcttgttcaccctaggaaggggattgtatatatggcaggcttccctggtgccgatgtaaagggctacatttgggaacatttgacttccttgggactcttaagtgcataatgatggcatgaagtaaaaggggcctcaatgatgataggaaaatcagttcttttaaaatttcttcaagaaaatccaggctatcacatagtctttctgtgtgacttattaggagataggaagagcattgggaaacttgcacagctagctatgcatctacattttggtttggggttagttatgaaatgttcttaatatgacgtgttcaataacttcacataaacttcctgttctccaaaacctcaaagagatagagttaatgagttgttgtttttttttaaatgggggtagttttctatctgtcatgggctctagcatctactccgctacccaattctgtcatctccaagctgagtttcctcttctgaggcagaggctggagcagttctttttcagttctcatcctctccatcccaatccagtatatcaatcaactctaactcggagacgtctagctggcaatgtttctaaaactttcactggatttctttagacattgaagcaaacatttttttctaagaattgcttctcagatgatgatatcaaatgtatatgcttttgcaagtttgaaaagttcaaattaaccacttttgactaggtaagtctttctaaaaaccatttaaagctaactgggtcttagcatcctcctgtgtatggaagagacaggtgaccgctccaggttgggtgctcacagaacccttttcctgactctcatggaagatggtggaaggaaaatagactgtctcatcaaccctcctgtgtcctctgaagcaatctcagtttttattaaccacctcttctgtgtttctggtagctatttaacctgtatttaatctgtacttcctatgccagcctcaattttatttgatttttacaattattctcttctaaccaatgaagtgtttgtcagtatgccccaaagcttgctcttttgtgctcccttttgaataactttctatccagaaaaagagattatttgggacttgagatttgcagtgataccaacttatagcaatgatgtactttaagggaactacccaactatgttgtgatagaagaaagagaaaccttcactttggcatttttttttaatcactgtttatttttctgtttgcggcccaggaagcagtgggaggtggtggcagatatgctttgcatatggattgttatgtttttatttgggcaagtttaatcatggaaaactcaaaaagaaggggggaaatggtcagtttaagccaaaagaaactttctaaacaatgtataggtacacagcaaaattaaacaaatccaacaatttctgaagcttagtgtaattgagtggtggttgttattcaataaaattattcccaaaagtgtttctcctaagagtgcagttcccatgagtcacttcctgaacccattgaccaaaggtggacagagacaatcctgtagaccttgacattcagaaagatgtgagctgcttactgatcatatatgcatacgtttctttacagcagaggaaaccattgtccacaaaactgatgttcttttggggttttatgtacagacttgtccaatcatgtgtgtggttcctgcgagttgctgatgactccgcattgaagctctctgagttctttgattttaagttgggtttatggaattttttcaaatgttggaaggtgtgtggttcttcctgccctccctccccttttggaaatatgaaagcaaatgtttagaagaattccttttgaaaagctgtgtcgtgttccctgtgaaactgagcaggtgtgtgttggcgcgctaagtgccacatgcttgtgtgtagaggaggaggtggccctgccggctccgcgctgctgtgcctgtgatccctacctgctccccgctcctgttgccagcagcactcactgcactcctttgtcatatactctgcatcactgtcatactcacaacttcgtgaataaagttgtgtgctttattcgt

SEQ ID NO: 1701 - DNA, 7690 bp, Homo sapiens
  source 1..7690: mol_type = genomic DNA
gtcattgagctgatgtgcttttgcaaggggtctctttagaagtggtaggggcagggtcgagagaagaaggggatgcagaatctgtacatgaggaaggagccagagtcactcaggaaactcctcattcttcctgcgctggctgtggcacacccaccggtggcacacccctccctcgggtccagttcagcccacagactcctgggaggagagccagggccccagcctctcctttgaggagtgttgcagcctttctgtgtgccagatgcctagtgaagaaaagctgaaaccctggagctttgtgcatgttaatgaccttggaaatgactgagctcacggaccctcatcacaccatgggagactacaaagtggcccaccctcaggaccctcaccacccatcagagaagcctgtcattcactgccataaatgtggggagccttgcaagggtgaagtgcttcgggtccagaccaaacatttccacatcaagtgtttcacctgcaaagtgtgtggctgtgacctggcacaagggggcttcttcataaagaacggagagtatctctgcaccctggactaccagcggatgtacgggacacgctgccatggctgtggggagttcgtggagggcgaagtggtgactgctctgggcaagacctaccatcccaattgctttgcttgtactatctgcaagcgcccgtttccacccggagaccgagtcacattcaatgggagagactgcctttgtcaactctgtgcacagccgatgtcgtccagtccgaaagaaaccaccttctccagcaattgtgccggctgcggaagagatatcaagaatgggcaggcgctgctggcgctggataagcagtggcacttggggtgctttaaatgcaagtcctgcgggaaggtcctcaccggggagtacatcagcaaggatggtgctccgtactgtgaaaaggactaccagggactctttggggtgaaatgtgaggcgtgtcaccagtttatcacagggaaagtcctggaggcaggtgacaaacattaccaccccagctgtgcacgatgcagcagatgcaaccagatgttcacagaaggagaggaaatgtatcttcaaggctccaccgtttggcatcccgactgtaagcaatctacgaagaccgaggaaaagctgcggctgccaaacattcggcgttcttcatccgatttcttttattccaaaagtctgattcgacgcacaggacggtctccgtctctgcagcctaccaggacatcctcggaaagtatttattctaggccaggctccagtattcctggctcaccaggtcatactatctatgcaaaagtagacaatgagatcctggattacaaggatttagcagccattccgaaggtcaaggcaatttatgacattgaacgtccagatcttattacctatgagcctttctacacttcgggctatgatgacaaacaggagagacagagccttggagagtctccgaggactttgtctcctactccatcagcagaagggtaccaggatgttcgggatcggatgatccatcggtccacgagccagggctccatcaactcccctgtgtacagccgccacagctacactccaaccacgtcccgctctccccagcatttccacagacctggcaatgagccgtccagcggccggaactcccctctcccttaccggccagacagccgccctctaactccaacttacgctcaggcccctaaacatttccatgttccagatcaaggaatcaacatttaccgaaagccacccatctacaaacagcatgctgccttggcagcccagagcaagtcctcagaagatatcatcaagttttccaagttcccagcagcccaggcaccagaccccagcgagacaccaaagattgagacggaccactggcctggtcccccctcatttgctgtcgtaggacctgacatgaaacgcagatctagtggcagagaggaagatgatgaggaacttctgagacgtcggcagcttcaagaagagcaattaatgaagcttaactcaggcctgggacagttgatcttgaaagaagagatggagaaagagagccgggaaaggtcatctctgttagccagtcgctacgattctcccatcaactcagcttcacatattccatcatctaaaactgcatctctccctggctatggaagaaatgggcttcaccggcctgtttctaccgacttcgctcagtataacagctatggggatgtcagcgggggagtgcgagatttccagacactcccagatggccacatgcctgcaatgagaatggaccgaggagtgtctatgcccaacatgttggaaccaaagatatttccatatgaaatgctcatggtgaccaacagagggcgaaacaaaatcctcagagaggtggacagaaccaggctggagcgccacttagcccctgaagtgtttcgggaaatctttggaatgtccatacaggagtttgacaggttacctctttggagacgcaacgacatgaagaaaaaagcaaaactcttctaagtcccactcgtgaatggcaattagagaaaggactgacagtggcggtgccccataggatgtcatattgaggcccaaacttgattggagaatttgcaaactaccgtcgctcagcaacaccaaaaagagaaagtctggttaaaacaccatgagtcaaatgtcgggccagccaacagtaacacttgccaagaagcatggcgtagaaatttctatgttccgaaacacagagtagtgtccacatgtgagcttttcacattaccttatgtatacaacaggagctgcgttgttttcttctttttcttttcctttatctgttgtccaacaacagtgctgactgtccggataagagctggcaagtgcccttaggatgccgcatgggaaaaatcggttatcataatttcaaagtataaatatatttattaagtagcgctgcggctaagaaggaagagtgaggggtctgtccatggggtggcagtgatttcacacccgcctttcttgaatggcttcgtgttactcagccgtgccctggcaggaatggaactccatcagggaacagggcagctctgtttgaatggggtgaaaaacagcaaaattaattcttagcaagctccttgttctctactgttcaccgggacctggctggcaaatgacttagctattagtatatttaaaaactgttcaaaagcaaaagagaaggaacaggaatgaaaggaaaccttcccttaactctttctgcttcccatagcaggtctggttcctgctccccgcctaggacaggagctgtctggagctccacctttgcaaagaaaggaaaaacacaaattgcccccagattggcccagtggcatgccattaggtgattttgcataggggccatatcattcatggccaaaaaaaaccaaaaagcaaaaaacaaaaacaagtcccatgtcctactgactctagttcttccagtcgttatcctctgctgtctctctggcatcctatgaatcagatcaagcccatgctgttgttggtttttaaggtttctttcaataataggctaaggaaagacatgtttttctcttttaaatctctgcaactccaaagtagactccttcgaacgtatttaatttggccttttcagctttcttcttgcccagctctgtcgaattcatgggtgtgtgtgcacatgttggtttcactcacccagagtaattttgtgagcatgcatgtgctttttaatttctgcttgaatgtttgtcctgctgtgttgcagcttctaaagacattgtcaccgagtgtgtgtgactcaaagatcaagagtgaggctaaactgcgaccccaacatcacttccttcatggaaaggtgttggcgctgatgtagctcatggaaggatcagactgggaaccacagaggaaggatgaggtgggatgtggaggtcagagcatctcacgagagtccctcaggctctgcaacactagattcgaatatgagcctagggtttccccaacacgtgcgtgcatatgaaaccacatcatgattcccgacgtgagttagatgagggagagtttgtgtaactccacacccaggagggtaagccactttattatcatgctttggggctgtgcttaagaatttaagctctgttttaaagccgaagaagaaaacatttgaatttaccttcatatgccactaagaacaaaagctctgaagttcttcctgctggcaccaaatattaggattacaagctgtctctctgacaccagtggtaaaaaagcaagtagaatagtttctgagtctgtgttgcagcctctgacacgtggctcaccgctgtcatttgggggatggaatgaacagtcactgttctatagcatcctcctgtgctcttacctaaggaatctaaattgtcctagccttccattgctatgcactgaatgaggactactctcgtgtgtgtgtgtgtgtgtgtgtgtgtgtgtgtgtgtgtgtgtgtgtgtgttggatctactaacatgtttagcaaatggctctgacagggtggccatgagcagatgagaccagctcttgcttggttggaagccacactgcagtttgcagtttagcctttggtgtctcagtggcttcttgcttattccatgctttttctatcccatcctctctctgtgccctcctgcaatggcagccttggcacaatgcctgggtgtcctcatccttgctttactctggaaagtgtggggatggagaggatggtgcatttccagtgcttccttacctgtcaataacaatggtggccacctgggtcccagcacttggctggtggagagatttttttcattatggagctaataaagggtccctacgttttacattgattaatgaattatcacccagacatgtgcagatgaaatgtcaatataagaaaaatcaaggtatttgggaaacatgggcataatcaggtagttttgctaaaattcctcttccttggtctacataaagaagacatgggtctgtcatagaatggggacattagactgaaaactgggacaacccccttccttattttatagagactaggagttaaggggcctgcctaagattgcagtgataaagaactgaaccctaaatcagctcccactaatgaaaccctgctttccttgtatcttttaaactcagttctgcatccaacttgagaagaaaaaaagcttctttccatatcaagtaccatatgagttcatttaaactgcaccttgcagaaatgcattgccagaaagcaccagtagcctcctatctgcaagcagagtagtgctctgctctggggaggggtcattggaaaccataatgcagagtgggccccctactccatttcccagcaaaaggctccagctggagggatgggttgtggggcaacctggttcctgctaactgccagattgaatgtgtgggctagaatgcctgcacatttagttaaactgggctcagcatgcttgtcctcaaaatgtccatcctggtcacagcacacaagatggctattggtctgcttttaccctaccctgtactatacatgaaaattccagttattaacacactcaaactggtggagcttgttcaccctaggaaggggattgtatatatggcaggcttccctggtgccgatgtaaagggctacatttgggaacatttgacttccttgggactcttaagtgcataatgatggcatgaagtaaaaggggcctcaatgatgataggaaaatcagttcttttaaaatttcttcaagaaaatccaggctatcacatagtctttctgtgtgacttattaggagataggaagagcattgggaaacttgcacagctagctatgcatctacattttggtttggggttagttatgaaatgttcttaatatgacgtgttcaataacttcacataaacttcctgttctccaaaacctcaaagagatagagttaatgagttgttgtttttttttaaatgggggtagttttctatctgtcatgggctctagcatctactccgctacccaattctgtcatctccaagctgagtttcctcttctgaggcagaggctggagcagttctttttcagttctcatcctctccatcccaatccagtatatcaatcaactctaactcggagacgtctagctggcaatgtttctaaaactttcactggatttctttagacattgaagcaaacatttttttctaagaattgcttctcagatgatgatatcaaatgtatatgcttttgcaagtttgaaaagttcaaattaaccacttttgactaggtaagtctttctaaaaaccatttaaagctaactgggtcttagcatcctcctgtgtatggaagagacaggtgaccgctccaggttgggtgctcacagaacccttttcctgactctcatggaagatggtggaaggaaaatagactgtctcatcaaccctcctgtgtcctctgaagcaatctcagtttttattaaccacctcttctgtgtttctggtagctatttaacctgtatttaatctgtacttcctatgccagcctcaattttatttgatttttacaattattctcttctaaccaatgaagtgtttgtcagtatgccccaaagcttgctcttttgtgctcccttttgaataactttctatccagaaaaagagattatttgggacttgagatttgcagtgataccaacttatagcaatgatgtactttaagggaactacccaactatgttgtgatagaagaaagagaaaccttcactttggcatttttttttaatcactgtttatttttctgtttgcggcccaggaagcagtgggaggtggtggcagatatgctttgcatatggattgttatgtttttatttgggcaagtttaatcatggaaaactcaaaaagaaggggggaaatggtcagtttaagccaaaagaaactttctaaacaatgtataggtacacagcaaaattaaacaaatccaacaatttctgaagcttagtgtaattgagtggtggttgttattcaataaaattattcccaaaagtgtttctcctaagagtgcagttcccatgagtcacttcctgaacccattgaccaaaggtggacagagacaatcctgtagaccttgacattcagaaagatgtgagctgcttactgatcatatatgcatacgtttctttacagcagaggaaaccattgtccacaaaactgatgttcttttggggttttatgtacagacttgtccaatcatgtgtgtggttcctgcgagttgctgatgactccgcattgaagctctctgagttctttgattttaagttgggtttatggaattttttcaaatgttggaaggtgtgtggttcttcctgccctccctccccttttggaaatatgaaagcaaatgtttagaagaattccttttgaaaagctgtgtcgtgttccctgtgaaactgagcaggtgtgtgttggcgcgctaagtgccacatgcttgtgtgtagaggaggaggtggccctgccggctccgcgctgctgtgcctgtgatccctacctgctccccgctcctgttgccagcagcactcactgcactcctttgtcatatactctgcatcactgtcatactcacaacttcgtgaataaagttgtgtgctttattcgt

SEQ ID NO: 1702 - DNA, 3560 bp, Homo sapiens
  source 1..3560: mol_type = genomic DNA
tctttggtgctgggaggcgggccgcagggtagctgttggcgccgccgcgtttctgggcctggccaactcacgtgaccgacgcgggctctgaagcggtgggccgcaccgaggcggcggcggcggcgacgactgcagctcgggaggtagcggcctggcgagggacgggccggctgccctctcggacggccgcggcggagggcaaaaatggcggaggcttcggcggccggggcggactcgggcgccgctgtagccgcccaccggtttttctgccacttttgcaagggcgaggtcagccccaaactaccggaatatatatgtcccagatgtgaatcaggctttattgaagaagtgacagatgattccagttttttaggtggtggcggcagtcggatagacaataccacaacaacacattttgcagagctttggggccatttggatcacacgatgttttttcaagattttagaccctttctaagtagcagtccactggaccaagataatagagccaatgaaaggggtcaccagactcacactgacttctggggagcaagacctccacggttgccattgggtcggagatacagatctcgaggaagttctcgtcctgacagatctccagctattgaaggaatactacaacacatctttgcaggattctttgcaaattctgccattcctggatctccacaccctttttcctggagcgggatgctgcactccaaccctggggactatgcctggggtcagacagggcttgatgccattgtaacccagcttttaggacaactggaaaacacaggccctcccccagctgacaaggaaaagatcacatctcttccaacagtgacagtaactcaggaacaagttgatatgggtttagagtgtccagtatgcaaagaagattacacagttgaagaggaagtccggcagttaccttgcaatcacttctttcacagcagttgtattgtgccgtggctagaactgcatgacacatgtcctgtatgtaggaagagcttaaatggtgaggactctactcggcaaagccagagcactgaggcctctgcaagcaacagatttagcaatgacagtcagctacatgaccgatggactttctgaagctaaagaccacacctgaatcagggctgtggtaatcatcttaccatagctgtaaattgtatcaaaacaaaaaattagtagatggatttaggaatatgtaagaaactcaacacataatataaatgcaatgaatgtttttcttctttaaatttaaagttagtatctacagatggaattgtatctacaaccaaatgcctcttatccctgaattcagagtgataattttataagtgtgaaacttaattatgtagggctccccccgtctgaatagaattaattccttaaagtctagttagggtcctgctgtctgtcatgttgccttgtaacggatgtttccacctccttctccaacctctaccccaccattagtgtattttactataaaaacagtggaaccacagccctaaagtcctgctgatataaagtccttttgtcttaattgtatttaaaaaaaaaaaaaaactactcttgatcacattagctatgaggcgaggtcaaattcaggtatctaagactaatgattttgttttgtcttgatccccagagagcaaatcaaagaaaaattacagcaagaagagaaaagtggtttatcattgtgtgctttggttttcttattttaattttttttgttttttttttttgagatggagtctcgctctgtcgcctaggctggagtgcagtggcacgatcttggctcattgcaaactctgcctcctgagttcaagcgattctcctacctcagcctccagagtagctgggaccacaggcatttgttaccatgcccagctaattttttgtatatttagtagagatggggtttcaccgtgttagccaggatggtctcaatctcctgaccttgtgctccgcctgcctcagcctcccaaagtgctgggattacaggcgtgagccactgcgcctggcctcttattttaatttttaaagactacttcagttgatgcagtttcccaagaaacctacataacatatattgggagccttatgttgataggaatctgattcccattcctttttgggaatgagttgggcagcatacaggcacagaaagacagatgtttgagacctttgcttctgagattttaaaaaatgattaccgctgggcgcggtggctcacgcctgtaatcccagcactttgggaggccgaggcaggcggatcacaaggtcaagagatcaagaccagcctggccaacaaggtaaaaccttgtctctactaaaaatataaaattagctgggcctggtggtgcatgcctgtaatcccagctactcatgaggctgaggtgggagaatcgcttgaacccaggaggtggaggttgcggtgagccggatcataccaatgcactccagtctgggcaacaagagcgaaactccatctcaaaaaaaaaaaaaaaatccccaactcactgctttttttgtttgtttctgtcgcctaggctggagtgcagtggcacgatctcagctcaccacagcctcgacctcccaggctcaagtgatcctcccacctcagcctaccaagtggctgggactacaggcgtgtgccaccatgcctgggtaatttttgtatttttgtagagatagggttttgccgtgttgcccaggctggtctcaaactcctgggctcaagtgatctgcctgcctcaacctctcaaagtgctcaactcattgtttactgtcttttttcctagtaatcttaaaataatttgcctcacagaaatagagacagtaagtgtctgcagccagttcactgtttttggtaattcattggtcttcaggagttaagattttacattgtcacattttaatttttaagcctatttttcatctctgaaactttccttttctccttggttctggctatacttggactcaaactgatcagtgtgatcatgtccaaaacagcttggcctggaagaggtaggccttattttttcagcctagtagtgtcccatgcacatgctctttgtagcattcaagtgtttaacattggataaattaagaaggtcaagaatgttgttgaaacttcaaggtctcaaaaggaaatgatggggacatagaacaactgttggtgtaccaaaaaaaggtacagaggggcaccatttgtattgtcacacaacaatgatcagaatgatcagtttagaatgatcagaacaaaaacaccactctttaatgggtctttttcttggctagaagtctttcctcagtttttgttgactatcatacgctgatttgtgggtgacggaagggggctagagataacgtttctctgtactttggtaaaggatgaaggagtcagagagggaacagaaaaagtgagagagtggcctgctgaaataatagcctgcctctaaaagttgtgaccagaaagtatgattcatttgggcccagagggaataaaatatgttttttcatatacctcccatattaca

SEQ ID NO: 1703 - DNA, 5506 bp, Homo sapiens
  source 1..5506: mol_type = genomic DNA
aatgctgagacagactcccagaagatctgagcgagtcgcgtagctgagcccggcaggggctggggtggtgctgctgctatgagctgcaccatcgagaagatcctgacagacgccaagacgctgctggagaggctacgggagcacgatgcggccgccgagtcgctggtggatcagtcggcggcgctgcaccggcgggtagcagctatgcgggaggcggggacagcgcttccggaccaggtcaggcagaggtatcaagaggatgcatccgatatgaaggacatgtccaaatacaaacctcacattctgctgtcccaagagaacacacagattagagacttgcaacaggaaaacagagagctatggatttccttggaggaacaccaggatgctttggaacttatcatgagcaaatatcggaaacagatgttacagttaatggttgctaaaaaagcggtggatgctgaaccagtcctgaaagctcaccagtctcactctgcagaaattgagagtcagattgacagaatctgtgaaatgggagaagtgatgaggaaagcagttcaggtggatgatgaccagttttgtaagattcaggaaaaattagcccaattagagcttgaaaataaggaacttcgagaattattgtccatcagcagtgagtctcttcaagccagaaaggaaaactcaatggacactgcttcccaagccatcaaataactgaactctgaatgatggctggagattgtctatcaaggaaggaagttactgtcttcccattcaagtactgtccattaagtgtcttgcctcagatttgatttaatcttaattaaaggtatcaggtggcaatttagaattccagtcaatattggctgtccacagttctcagatgtgttaatgtgaatactacatgctgaatttcaccattcctttctcaaagagactacttttaattttcatttctgggaccttgatttatataaactatgttttcagttctttgttatttttcacatctctgaaactttgagcattttttataagccagcaatttattttacatagcattgtaaaatacacttctaggaaattttaggaaagatttaactgtttaaatctatttggcataaaccttgattttttttttccatttgacaaaaataatacaattccacagaactagatcagcagattctctgatttgtaatgtcattcacctgtgacattttaagtctctctggtgctaagaattggcactttatagcctggtgcctttacttttaatttgagagaacctactgctagtcccaggaaacacacttggaaataagtcagctattttttttgcccagtgatgctatagttgtcatattgtccaaagttcatattgttcaaagctgaggagcttgtcctgtgtatgtgaatgcacacatgtgcacttagttcaaatactaaaagtagcttttattaaatataatcagccaaaaacacacacaaaataaaaaaaacaaatataagtagtcagtttttcaatgttatcctactagttctacattctattttaatttttatacaatttccattttatagttaagaaccatcacttacttggattggatgtctttcattcctagcactaatagttggctttctttttttttgtttacatagaagcagggtttttttttatcttttttctttttttttgtttaagctatataaaaaggtgaggaagcagttttgttacctaatgaaaattattacactcataatgctgtgtaggcaacattgagattcaaatgcccagtggtcaactgggttcactcatcaactcattcccgtcccagtttactcacatttcaaatttataaatttcttcatgttatactattctatttagatttgcccagaattagttgaaataatgctaaacctgtcaatattttccagtaacattaagcaccatactgcatgggagagacacagtactaaaaagagttgttagtgctttatgtgagtgatatttctttcgtaatgctataaagaactacagttaaaataacaaaatattttaaagatgtcctaaaagcatctgatcccagtaataactaatggatgtcatctagagcagtgggtgttaatgaataggtatatgtcatttaagaatttttcaaatttctgtttgatatcctgcatagaatttgacaaaaaaaacacttccaagtgtgagcattttttatttcatttcccaagagtaagtaagtaactattagcccagccatctgcctcgaagtataccttaagtgaccccataaatccattcaagaggcaggtactctataccatttggcagccacggccaaacctaccatggccagatttcagtgaaaatgatgaagtaatcaaatcaaggtataatatggtgtccctttatgtgctttatgttcctttagagctgtttataaagttctttatatctcaagtgttaggataaatcgacatactaacttttccccctgcaaaattaaaagcctgaggtacaagtctaagaagcttttagtgctctacataatataaattctggctggtgttaatgctatgaagataatatgtagttagaaaattgagtcggggaggaatgctcttcattttaagtggattttaaagtttctccttgagtggatgaagaacttgcctggtttgcaaaaatcttagttcaaaattatattttctaacaaaaactgcattttgagaagataagctaattttactcagtagtaagtcaaatgaggaagtgcagagggtttttttacatatatatagcaaccttgtcaagtggtcctcacaagagtcataaatactttgtaattagcacagtatattcagcagtgtataactctacaaatagtaccttatattagtgtagtattatatcaatatcttatgtataattcttatattaataccttatgcataattggattcaaacattgaaggtctattttagtgttcttcaaaatgtgcttccctgacctactgaaatagaaacttggtgatgaagttcaagaatttgtattctaatcatctcaaacaattcctaaagacactgattttaaaatatctagtctaggccccattgtgtaatagttagcactctaaaagatgaaaaagaaaatagtctatgtgccaaccacttcattagtacttatgaatttaaaaatgaaaaagtctggtacaggagacaagtatatatataaaattataatgcagtgtgataaatccattatagtatgtataagatacagaagagggactttaaacttgagaattcaatagagataataaatgggtaggagggaaatagaaaactttggtgccacaaaagcaaagtatgtatggtattgccaataatagctaccatctattgagtgctttactacctgtcaggtactgtattatataaactccattttaactgtacctcattttgcagatactcaggcacaaggaggtggttatttgtccaaactggaaccaagattcaaacccagacagagtcttaagcacatttttaatcactaactaacttgagatgcctaaatgccaaatactgttgggagttcaagtggttcttgattagcaaaatctatttttattagtgcaaaagaaacaccacagcttataaagtattatgaattcaataaatggagtcttaactaatgagatattattttctagaatggtgtagctgagagtatgtgtgattcaactgaaaggaataatgtttaatcagtgactcttactatatacaggaaaaggtgcagttctgtctttcaaatctgcctccttaccatattggcttacatccctcatgctgttttcttgtgtttgctagaaagttgttgccaagccaaatgtcatggccatgttgaaggcaaggaagaaaaaatggaaatggcctgtgccagctatatatatcgccttttatgagggaaagcaaagctttctcagaaatcccaaatggattttcccttgacttaattgcctgaccagttaaatggccactggtacctgcaaagaaagcagggtacatagctgtcccaaataaaatcagtattagcaagaagaaagaatattgagaaagcaattaacagtgtctgtgactgtgacatgtctgtgactttatattgtcaagtcctttccccttgaatatagttttggaagaattagctgaaggagtgtgttgacattgaatggccaagagaatgggctgtagcagacatctgtcatttctcttttggctgcccagtatcctaactcctgtgtttaaggaatccctcacctaatgaggcagagcatttcttcctcctaaagaatttgaaagtaccaggtaatgttttctcagcctccttttgcagctaaggaagaaacatctgccttcaattttaaaattagtgatacaaagaaggagggaaccatgcagattcctttgaagatggtgattaacaacactactgcattcatctccacagaggtacagcaaaagtgatttagttagcgataacctctaattctatttttttatttttattttttgagacagtcttgctctgtcaaccaggctggagtgcagtagcactgtcttaactcactgcaacctccacctcctgggttcaagcgattctcctgcctcagcctcccaagtcgctgggattacaagtgcccaccaccatgcacagctaatttttgtgtttttagtagatggggtttctccatgttggccaggctggtctcgaacttatgacttcaggtgatccgcccgccttggcctcccaaagtgctgggattataggcgtgagccactgtgcctggcctgtaacctctaattcttgtttgctggctgtcctagagatcctgagaattacttttaataaaatcatttttttgctgttattaaaactaacctgaattgcctaaaaccaagaactctgcttgataaaataagcatagttttaggaacagccatgcagatataaattttatcaacactttatacataatttgggacttatatttaaatgtaatatttgatgcttataaaagggtaaatggggaatgcaaataaattatcaagcataataactcatcacctaacttaagaataacattatgagtgcttgtattttatctatttgagctcttctcctatctttgccgacccccccgctctctttttaatagatttgttcgaatgtagaaagacctaaaatacatatgtatccctaaagtgacttattttatagttttctttctttttgaacttcaaaaaaattgtatcatactctatgtagtctaaggatttggtttttttcactcaacatgtctctagaattcacaagttttattgttttatagctgtcattttcattgatgtatatttcattgttgggttatacaacatattgttaaggaatacatacatatataataaattatacattttttaaaaaaa

SEQ ID NO: 1704 - DNA, 2883 bp, Homo sapiens
  source 1..2883: mol_type = genomic DNA
agattgtttcacatcaccagtgtatcctcagctcctaacactgtgtctggtacacattgtttgatggttttgatgtttcagattcgttatatttcacaaacacaaggcttgccagctgaatatcttctcagtgccggaacaaaaacaaccaggtttttcaacagagatcctaatttggggtacccactgtggaggcttaagacacctgaagaacatgaactggagactggaataaaatcaaaagaagctcggaagtacatttttaattgcttagatgacatggctcaggtgaatatgtctacagacctggagggaacagacatgttggcagagaaggcagaccgaagagaatacattgatctgttaaagaaaatgctcacaattgatgcagataagagaattacccctctaaaaactcttaaccatcagtttgtgacaatgactcaccttttggattttccacatagcaatcatgttaagtcttgttttcagaacatggagatctgcaagcggagggttcacatgtatgatacagtgagtcagatcaagagtcccttcactacacatgttgccccaaatacaagcacaaatctaaccatgagcttcagcaatcagctcaatacagtgcacaatcaggccagtgttctagcttccagttctactgcagcagctgctactctttctctggctaattcagatgtctcactactaaactaccagtcagctttgtacccatcatctgctgcaccagttcctggagttgcccagcagggtgtttccttgcagcctggaaccacccagatttgcactcagacagatccattccaacagacatttatagtatgtccacctgcgtttcaaactggactacaagcaacaacaaagcattctggattccctgtgaggatggataatgctgtaccgattgtaccccaggcaccagctgctcagccactacagattcagtcaggagttctcacgcagggaagctgtacaccactaatggtagcaactctccaccctcaagtagccaccatcacaccgcagtatgcggtgccctttactctgagctgcgcagccggccggccggcgctggttgaacagactgccgctgtactgcaggcgtggcctggagggactcagcaaattctcctgccttcaacttggcaacagttgcctggggtagctctacacaactctgtccagcccacagcaatgattccagaggccatggggagtggacagcagctagctgactggaggaatgcccactctcatggcaaccagtacagcactatcatgcagcagccatccttgctgactaaccatgtgacattggccactgctcagcctctgaatgttggtgttgcccatgttgtcagacaacaacaatccagttccctcccttcgaagaagaataagcagtcagctccagtctcttccaagtcctctctagatgttctgccttcccaagtctattctctggttgggagcagtcccctccgcaccacatcttcttataattccttggtccctgtccaagatcagcatcagcccatcatcattccagatactcccagccctcctgtgagtgtcatcactatccgaagtgacactgatgaggaagaggacaacaaatacaagcccagtagctctggactgaagccaaggtctaatgtcatcagttatgtcactgtcaatgattctccagactctgactcttctttgagcagcccttattccactgataccctgagtgctctccgaggcaatagtggatccgttttggaggggcctggcagagttgtggcagatggcactggcacccgcactatcattgtgcctccactgaaaactcagcttggtgactgcactgtagcaacccaggcctcaggtctcctgagcaataagactaagccagtcgcttcagtgagtgggcagtcatctggatgctgtatcacccccacagggtatcgagctcaacgcggggggaccagtgcagcacaaccactcaatcttagccagaaccagcagtcatcggcggctccaacctcacaggagagaagcagcaacccagccccccgcaggcagcaggcgtttgtggcccctctctcccaagccccctacaccttccagcatggcagcccgctacactcgacagggcacccacaccttgccccggcccctgctcacctgccaagccaggctcatctgtatacgtatgctgccccgacttctgctgctgcactgggctcaaccagctccattgctcatcttttctccccacagggttcctcaaggcatgctgcagcctataccactcaccctagcactttggtgcaccaggtccctgtcagtgttgggcccagcctcctcacttctgccagcgtggcccctgctcagtaccaacaccagtttgccacccaatcctacattgggtcttcccgaggctcaacaatttacactggatacccgctgagtcctaccaagatcagccagtattcctacttatagttggtgagcatgagggaggaggaatcatggctaccttctcctggccctgcgttcttaatattgggctatggagagatcctcctttaccctcttgaaatttcttagccagcaacttgttctgcaggggcccactgaagcagaaggtttttctctgggggaacctgtctcagtgttgactgcattgttgtagtcttcccaaagtttgccctatttttaaattcattatttttgtgacagtaattttggtacttggaagagttcagatgcccatcttctgcagttaccaaggaagagagattgttctgaagttaccctctgaaaaatattttgtctctctgacttgatttctataaatgcttttaaaaacaa

SEQ ID NO: 1705 - DNA, 7947 bp, Homo sapiens
  source 1..7947: mol_type = genomic DNA
gcagagtctgcagtgcggagggggcgggaagtccaggccccgcactcgatccacgctggctccctacggaggcccacctactcgaggcccaccgactcctactgcaatcagtactatgcgatcgtcctagagagtccattcagctgcacttccgcctcagtatggcatcacagctgcaagtgttttcgcccccatcagtgtcgtcgagtgccttctgcagtgcgaagaaactgaaaatagagccctctggctgggatgtttcaggacagagtagcaacgacaaatattatacccacagcaaaaccctcccagccacacaagggcaagccaactcctctcaccaggtagcaaatttcaacatccctgcttacgaccagggcctcctcctcccagctcctgcagtggagcatattgttgtaacagccgctgatagctcgggcagtgctgctacatcaaccttccaaagcagccagaccctgactcacagaagcaacgtttctttgcttgagccatatcaaaaatgtggattgaaacgaaaaagtgaggaagttgacagcaacggtagtgtgcagatcatagaagaacatccccctctcatgctgcaaaacaggactgtggtgggtgctgctgccacaaccaccactgtgaccacaaagagtagcagttccagcggagaaggggattaccagctggtccagcatgagatcctttgctctatgaccaatagctatgaagtcttggagttcctaggccgggggacatttggacaggtggctaagtgctggaagaggagcaccaaggaaattgtggctattaaaatcttgaagaaccacccctcctatgccagacaaggacagattgaagtgagcatcctttcccgcctaagcagtgaaaatgctgatgagtataattttgtccgttcatacgagtgctttcagcataagaatcacacctgccttgtttttgaaatgttggagcagaacttatatgattttctaaagcaaaacaaatttagcccactgccactcaagtacatcagaccaatcttgcagcaggtggccacagccttgatgaagctcaagagtcttggtctgatccacgctgaccttaagcctgaaaacatcatgctggttgatccagttcgccagccctaccgagtgaaggtcattgactttggttctgctagtcacgtttccaaagctgtgtgctcaacctacttacagtcacgttactacagagctcctgaaattattcttgggttaccattttgtgaagctattgatatgtggtcactgggctgtgtgatagctgagctgttcctgggatggcctctttatcctggtgcttcagaatatgatcagattcgttatatttcacaaacacaaggcttgccagctgaatatcttctcagtgccggaacaaaaacaaccaggtttttcaacagagatcctaatttggggtacccactgtggaggcttaagacacctgaagaacatgaactggagactggaataaaatcaaaagaagctcggaagtacatttttaattgcttagatgacatggctcaggtgaatatgtctacagacctggagggaacagacatgttggcagagaaggcagaccgaagagaatacattgatctgttaaagaaaatgctcacaattgatgcagataagagaattacccctctaaaaactcttaaccatcagtttgtgacaatgactcaccttttggattttccacatagcaatcatgttaagtcttgttttcagaacatggagatctgcaagcggagggttcacatgtatgatacagtgagtcagatcaagagtcccttcactacacatgttgccccaaatacaagcacaaatctaaccatgagcttcagcaatcagctcaatacagtgcacaatcaggccagtgttctagcttccagttctactgcagcagctgctactctttctctggctaattcagatgtctcactactaaactaccagtcagctttgtacccatcatctgctgcaccagttcctggagttgcccagcagggtgtttccttgcagcctggaaccacccagatttgcactcagacagatccattccaacagacatttatagtatgtccacctgcgtttcaaactggactacaagcaacaacaaagcattctggattccctgtgaggatggataatgctgtaccgattgtaccccaggcaccagctgctcagccactacagattcagtcaggagttctcacgcagcaggcgtggcctggagggactcagcaaattctcctgccttcaacttggcaacagttgcctggggtagctctacacaactctgtccagcccacagcaatgattccagaggccatggggagtggacagcagctagctgactggaggaatgcccactctcatggcaaccagtacagcactatcatgcagcagccatccttgctgactaaccatgtgacattggccactgctcagcctctgaatgttggtgttgcccatgttgtcagacaacaacaatccagttccctcccttcgaagaagaataagcagtcagctccagtctcttccaagtcctctctagatgttctgccttcccaagtctattctctggttgggagcagtcccctccgcaccacatcttcttataattccttggtccctgtccaagatcagcatcagcccatcatcattccagatactcccagccctcctgtgagtgtcatcactatccgaagtgacactgatgaggaagaggacaacaaatacaagcccagtagctctggactgaagccaaggtctaatgtcatcagttatgtcactgtcaatgattctccagactctgactcttctttgagcagcccttattccactgataccctgagtgctctccgaggcaatagtggatccgttttggaggggcctggcagagttgtggcagatggcactggcacccgcactatcattgtgcctccactgaaaactcagcttggtgactgcactgtagcaacccaggcctcaggtctcctgagcaataagactaagccagtcgcttcagtgagtgggcagtcatctggatgctgtatcacccccacagggtatcgagctcaacgcggggggaccagtgcagcacaaccactcaatcttagccagaaccagcagtcatcggcggctccaacctcacaggagagaagcagcaacccagccccccgcaggcagcaggcgtttgtggcccctctctcccaagccccctacaccttccagcatggcagcccgctacactcgacagggcacccacaccttgccccggcccctgctcacctgccaagccaggctcatctgtatacgtatgctgccccgacttctgctgctgcactgggctcaaccagctccattgctcatcttttctccccacagggttcctcaaggcatgctgcagcctataccactcaccctagcactttggtgcaccaggtccctgtcagtgttgggcccagcctcctcacttctgccagcgtggcccctgctcagtaccaacaccagtttgccacccaatcctacattgggtcttcccgaggctcaacaatttacactggatacccgctgagtcctaccaagatcagccagtattcctacttatagttggtgagcatgagggaggaggaatcatggctaccttctcctggccctgcgttcttaatattgggctatggagagatcctcctttaccctcttgaaatttcttagccagcaacttgttctgcaggggcccactgaagcagaaggtttttctctgggggaacctgtctcagtgttgactgcattgttgtagtcttcccaaagtttgccctatttttaaattcattatttttgtgacagtaattttggtacttggaagagttcagatgcccatcttctgcagttaccaaggaagagagattgttctgaagttaccctctgaaaaatattttgtctctctgacttgatttctataaatgcttttaaaaacaagtgaagcccctctttatttcattttgtgttattgtgattgctggtcaggaaaaatgctgatagaaggagttgaaatctgatgacaaaaaaagaaaaattactttttgtttgtttataaactcagacttgcctattttattttaaaagcggcttacacaatctcccttttgtttattggacatttaaacttacagagtttcagttttgttttaatgtcatattatacttaatgggcaattgttatttttgcaaaactggttacgtattactctgtgttactattgagattctctcaattgctcctgtgtttgttataaagtagtgtttaaaaggcagctcaccatttgctggtaacttaatgtgagagaatccatatctgcgtgaaaacaccaagtattctttttaaatgaagcaccatgaattcttttttaaattattttttaaaagtctttctctctctgattcagcttaaatttttttatcgaaaaagccattaaggtggttattattacatggtggtggtggttttattatatgcaaaatctctgtctattatgagatactggcattgatgagctttgcctaaagattagtatgaattttcagtaatacacctctgttttgctcatctctcccttctgttttatgtgatttgtttggggagaaagctaaaaaaacctgaaaccagataagaacatttcttgtgtatagcttttatacttcaaagtagcttcctttgtatgccagcagcaaattgaatgctctcttattaagacttatataataagtgcatgtaggaattgcaaaaaatattttaaaaatttattactgaatttaaaaatattttagaagttttgtaatggtggtgttttaatattttacataattaaatatgtacatattgattagaaaaatataacaagcaatttttcctgctaacccaaaatgttatttgtaatcaaatgtgtagtgattacacttgaattgtgtacttagtgtgtatgtgatcctccagtgttatcccggagatggattgatgtctccattgtatttaaaccaaaatgaactgatacttgttggaatgtatgtgaactaattgcaattatattagagcatattactgtagtgctgaatgagcaggggcattgcctgcaaggagaggagacccttggaattgttttgcacaggtgtgtctggtgaggagtttttcagtgtgtgtctcttccttccctttcttcctccttcccttattgtagtgccttatatgataatgtagtggttaatagagtttacagtgagcttgccttaggatggaccagcaagcccccgtggaccctaagttgttcaccgggatttatcagaacaggattagtagctgtattgtgtaatgcattgttctcagtttccctgccaacattgaaaaataaaaacagcagcttttctcctttaccaccacctctacccctttccattttggattctcggctgagttctcacagaagcattttccccatgtggctctctcactgtgcgttgctaccttgcttctgtgagaattcaggaagcaggtgagaggagtcaagccaatattaaatatgcattcttttaaagtatgtgcaatcacttttagaatgaatttttttttccttttcccatgtggcagtccttcctgcacatagttgacattcctagtaaaatatttgcttgttgaaaaaaacatgttaacagatgtgtttataccaaagagcctgttgtattgcttaccatgtccccatactatgaggagaagttttgtggtgccgctggtgacaaggaactcacagaaaggtttcttagctggtgaagaatatagagaaggaaccaaagcctgttgagtcattgaggcttttgaggtttcttttttaacagcttgtatagtcttggggcccttcaagctgtgaaattgtccttgtactctcagctcctgcatggatctgggtcaagtagaaggtactggggatggggacattcctgcccataaaggatttggggaaagaagattaatcctaaaatacaggtgtgttccatctgaattgaaaatgatatatttgagatataattttaggactggttctgtgtagatagagatggtgtcaaggaggtgcaggatggagatgggagatttcatggagcctggtcagccagctctgtaccaggttgaacaccgaggagctgtcaaagtatttggagtttcttcattgtaaggagtaagggcttccaagatggggcaggtagtccgtacagcctaccaggaacatgttgtgttttctttattttttaaaatcattatattgagttgtgttttcagcactatattggtcaagatagccaagcagtttgtataatttctgtcactagtgtcatacagttttctggtcaacatgtgtgatctttgtgtctcctttttgccaagcacattctgattttcttgttggaacacaggtctagtttctaaaggacaaattttttgttccttgtcttttttctgtaagggacaagatttgttgtttttgtaagaaatgagatgcaggaaagaaaaccaaatcccattcctgcaccccagtccaataagcagataccacttaagataggagtctaaactccacagaaaaggataataccaagagcttgtattgttaccttagtcacttgcctagcagtgtgtggctttaaaaactagagatttttcagtcttagtctgcaaactggcatttccgattttccagcataaaaatccacctgtgtctgctgaatgtgtatgtatgtgctcactgtggctttagattctgtccctggggttagccctgttggccctgacaggaagggaggaagcctggtgaatttagtgagcagctggcctgggtcacagtgacctgacctcaaaccagcttaaggctttaagtcctctctcagaacttggcatttccaacttcttcctttccgggtgagagaagaagcggagaagggttcagtgtagccactctgggctcatagggacacttggtcactccagagtttttaatagctcccaggaggtgatattattttcagtgctcagctgaaataccaaccccaggaataagaactccatttcaaacagttctggccattctgagcctgcttttgtgattgctcatccattgtcctccactagaggggctaagcttgactgcccttagccaggcaagcacagtaatgtgtgttttgttcagcattattatgcaaaaattcactagttgagatggtttgttttaggataggaaatgaaattgcctctcagtgacaggagtggcccgagcctgcttcctattttgattttttttttttttaactgatagatggtgcagcatgtctacatggttgtttgttgctaaactttatataatgtgtggtttcaattcagcttgaaaaataatctcactacatgtagcagtacattatatgtacattatatgtaatgttagtatttctgctttgaatccttgatattgcaatggaattcctactttattaaatgtatttgatatgctagttattgtgtgcgatttaaactttttttgctttctccctttttttggttgtgcgctttcttttacaacaagcctctagaaacagatagtttctgagaattactgagctatgtttgtaatgcagatgtacttagggagtatgtaaaataatcattttaacaaaagaaatagatatttaaaatttaatactaactatgggaaaagggtccattgtgtaaaacatagtttatctttggattcaatgtttgtctttggttttacaaagtagcttgtattttcagtattttctacataatatggtaaaatgtagagcaattgcaatgcatcaataaaatgggtaaattttctga

SEQ ID NO: 1706 - DNA, 4099 bp, Homo sapiens
  source 1..4099: mol_type = genomic DNA
gaggcggcggcggcggcggcgggaaggggctgggtggtggagcgggagggaggctgaggaggctccccctgcgggacgggcgcggggacggctccggggggcgggggccggggcccgggccggctcgcgcggggggtatgatgacccggctgcggggccccagatctcgtctcctccgccgcctcctcacggcagccccagctcgcggctgagaaccagacacaccggcggtatggcatcacagctgcaagtgttttcgcccccatcagtgtcgtcgagtgccttctgcagtgcgaagaaactgaaaatagagccctctggctgggatgtttcaggacagagtagcaacgacaaatattatacccacagcaaaaccctcccagccacacaagggcaagccaactcctctcaccaggtagcaaatttcaacatccctgcttacgaccagggcctcctcctcccagctcctgcagtggagcatattgttgtaacagccgctgatagctcgggcagtgctgctacatcaaccttccaaagcagccagaccctgactcacagaagcaacgtttctttgcttgagccatatcaaaaatgtggattgaaacgaaaaagtgaggaagttgacagcaacggtagtgtgcagatcatagaagaacatccccctctcatgctgcaaaacaggactgtggtgggtgctgctgccacaaccaccactgtgaccacaaagagtagcagttccagcggagaaggggattaccagctggtccagcatgagatcctttgctctatgaccaatagctatgaagtcttggagttcctaggccgggggacatttggacaggtggctaagtgctggaagaggagcaccaaggaaattgtggctattaaaatcttgaagaaccacccctcctatgccagacaaggacagattgaagtgagcatcctttcccgcctaagcagtgaaaatgctgatgagtataattttgtccgttcatacgagtgctttcagcataagaatcacacctgccttgtttttgaaatgttggagcagaacttatatgattttctaaagcaaaacaaatttagcccactgccactcaagtacatcagaccaatcttgcagcaggtggccacagccttgatgaagctcaagagtcttggtctgatccacgctgaccttaagcctgaaaacatcatgctggttgatccagttcgccagccctaccgagtgaaggtcattgactttggttctgctagtcacgtttccaaagctgtgtgctcaacctacttacagtcacgttactacagagctcctgaaattattcttgggttaccattttgtgaagctattgatatgtggtcactgggctgtgtgatagctgagctgttcctgggatggcctctttatcctggtgcttcagaatatgatcagattcgttatatttcacaaacacaaggcttgccagctgaatatcttctcagtgccggaacaaaaacaaccaggtttttcaacagagatcctaatttggggtacccactgtggaggcttaagacacctgaagaacatgaactggagactggaataaaatcaaaagaagctcggaagtacatttttaattgcttagatgacatggctcaggtgaatatgtctacagacctggagggaacagacatgttggcagagaaggcagaccgaagagaatacattgatctgttaaagaaaatgctcacaattgatgcagataagagaattacccctctaaaaactcttaaccatcagtttgtgacaatgactcaccttttggattttccacatagcaatcatgttaagtcttgttttcagaacatggagatctgcaagcggagggttcacatgtatgatacagtgagtcagatcaagagtcccttcactacacatgttgccccaaatacaagcacaaatctaaccatgagcttcagcaatcagctcaatacagtgcacaatcaggccagtgttctagcttccagttctactgcagcagctgctactctttctctggctaattcagatgtctcactactaaactaccagtcagctttgtacccatcatctgctgcaccagttcctggagttgcccagcagggtgtttccttgcagcctggaaccacccagatttgcactcagacagatccattccaacagacatttatagtatgtccacctgcgtttcaaactggactacaagcaacaacaaagcattctggattccctgtgaggatggataatgctgtaccgattgtaccccaggcaccagctgctcagccactacagattcagtcaggagttctcacgcagcaggcgtggcctggagggactcagcaaattctcctgccttcaacttggcaacagttgcctggggtagctctacacaactctgtccagcccacagcaatgattccagaggccatggggagtggacagcagctagctgactggaggaatgcccactctcatggcaaccagtacagcactatcatgcagcagccatccttgctgactaaccatgtgacattggccactgctcagcctctgaatgttggtgttgcccatgttgtcagacaacaacaatccagttccctcccttcgaagaagaataagcagtcagctccagtctcttccaagtcctctctagatgttctgccttcccaagtctattctctggttgggagcagtcccctccgcaccacatcttcttataattccttggtccctgtccaagatcagcatcagcccatcatcattccagatactcccagccctcctgtgagtgtcatcactatccgaagtgacactgatgaggaagaggacaacaaatacaagcccagtagctctggactgaagccaaggtctaatgtcatcagttatgtcactgtcaatgattctccagactctgactcttctttgagcagcccttattccactgataccctgagtgctctccgaggcaatagtggatccgttttggaggggcctggcagagttgtggcagatggcactggcacccgcactatcattgtgcctccactgaaaactcagcttggtgactgcactgtagcaacccaggcctcaggtctcctgagcaataagactaagccagtcgcttcagtgagtgggcagtcatctggatgctgtatcacccccacagggtatcgagctcaacgcggggggaccagtgcagcacaaccactcaatcttagccagaaccagcagtcatcggcggctccaacctcacaggagagaagcagcaacccagccccccgcaggcagcaggcgtttgtggcccctctctcccaagccccctacaccttccagcatggcagcccgctacactcgacagggcacccacaccttgccccggcccctgctcacctgccaagccaggctcatctgtatacgtatgctgccccgacttctgctgctgcactgggctcaaccagctccattgctcatcttttctccccacagggttcctcaaggcatgctgcagcctataccactcaccctagcactttggtgcaccaggtccctgtcagtgttgggcccagcctcctcacttctgccagcgtggcccctgctcagtaccaacaccagtttgccacccaatcctacattgggtcttcccgaggctcaacaatttacactggatacccgctgagtcctaccaagatcagccagtattcctacttatagttggtgagcatgagggaggaggaatcatggctaccttctcctggccctgcgttcttaatattgggctatggagagatcctcctttaccctcttgaaatttcttagccagcaacttgttctgcaggggcccactgaagcagaaggtttttctctgggggaacctgtctcagtgttgactgcattgttgtagtcttcccaaagtttgccctatttttaaattcattatttttgtgacagtaattttggtacttggaagagttcagatgcccatcttctgcagttaccaaggaagagagattgttctgaagttaccctctgaaaaatattttgtctctctgacttgatttctataaatgcttttaaaaacaa

SEQ ID NO: 1707 - DNA, 8157 bp, Homo sapiens
  source 1..8157: mol_type = genomic DNA
gaggcggcggcggcggcggcgggaaggggctgggtggtggagcgggagggaggctgaggaggctccccctgcgggacgggcgcggggacggctccggggggcgggggccggggcccgggccggctcgcgcggggggtatgatgacccggctgcggggccccagatctcgtctcctccgccgcctcctcacggcagccccagctcgcggctgagaaccagacacaccggcggtatggcatcacagctgcaagtgttttcgcccccatcagtgtcgtcgagtgccttctgcagtgcgaagaaactgaaaatagagccctctggctgggatgtttcaggacagagtagcaacgacaaatattatacccacagcaaaaccctcccagccacacaagggcaagccaactcctctcaccaggtagcaaatttcaacatccctgcttacgaccagggcctcctcctcccagctcctgcagtggagcatattgttgtaacagccgctgatagctcgggcagtgctgctacatcaaccttccaaagcagccagaccctgactcacagaagcaacgtttctttgcttgagccatatcaaaaatgtggattgaaacgaaaaagtgaggaagttgacagcaacggtagtgtgcagatcatagaagaacatccccctctcatgctgcaaaacaggactgtggtgggtgctgctgccacaaccaccactgtgaccacaaagagtagcagttccagcggagaaggggattaccagctggtccagcatgagatcctttgctctatgaccaatagctatgaagtcttggagttcctaggccgggggacatttggacaggtggctaagtgctggaagaggagcaccaaggaaattgtggctattaaaatcttgaagaaccacccctcctatgccagacaaggacagattgaagtgagcatcctttcccgcctaagcagtgaaaatgctgatgagtataattttgtccgttcatacgagtgctttcagcataagaatcacacctgccttgtttttgaaatgttggagcagaacttatatgattttctaaagcaaaacaaatttagcccactgccactcaagtacatcagaccaatcttgcagcaggtggccacagccttgatgaagctcaagagtcttggtctgatccacgctgaccttaagcctgaaaacatcatgctggttgatccagttcgccagccctaccgagtgaaggtcattgactttggttctgctagtcacgtttccaaagctgtgtgctcaacctacttacagtcacgttactacagagctcctgaaattattcttgggttaccattttgtgaagctattgatatgtggtcactgggctgtgtgatagctgagctgttcctgggatggcctctttatcctggtgcttcagaatatgatcagattcgttatatttcacaaacacaaggcttgccagctgaatatcttctcagtgccggaacaaaaacaaccaggtttttcaacagagatcctaatttggggtacccactgtggaggcttaagacacctgaagaacatgaactggagactggaataaaatcaaaagaagctcggaagtacatttttaattgcttagatgacatggctcaggtgaatatgtctacagacctggagggaacagacatgttggcagagaaggcagaccgaagagaatacattgatctgttaaagaaaatgctcacaattgatgcagataagagaattacccctctaaaaactcttaaccatcagtttgtgacaatgactcaccttttggattttccacatagcaatcatgttaagtcttgttttcagaacatggagatctgcaagcggagggttcacatgtatgatacagtgagtcagatcaagagtcccttcactacacatgttgccccaaatacaagcacaaatctaaccatgagcttcagcaatcagctcaatacagtgcacaatcaggccagtgttctagcttccagttctactgcagcagctgctactctttctctggctaattcagatgtctcactactaaactaccagtcagctttgtacccatcatctgctgcaccagttcctggagttgcccagcagggtgtttccttgcagcctggaaccacccagatttgcactcagacagatccattccaacagacatttatagtatgtccacctgcgtttcaaactggactacaagcaacaacaaagcattctggattccctgtgaggatggataatgctgtaccgattgtaccccaggcaccagctgctcagccactacagattcagtcaggagttctcacgcagggaagctgtacaccactaatggtagcaactctccaccctcaagtagccaccatcacaccgcagtatgcggtgccctttactctgagctgcgcagccggccggccggcgctggttgaacagactgccgctgtactgcaggcgtggcctggagggactcagcaaattctcctgccttcaacttggcaacagttgcctggggtagctctacacaactctgtccagcccacagcaatgattccagaggccatggggagtggacagcagctagctgactggaggaatgcccactctcatggcaaccagtacagcactatcatgcagcagccatccttgctgactaaccatgtgacattggccactgctcagcctctgaatgttggtgttgcccatgttgtcagacaacaacaatccagttccctcccttcgaagaagaataagcagtcagctccagtctcttccaagtcctctctagatgttctgccttcccaagtctattctctggttgggagcagtcccctccgcaccacatcttcttataattccttggtccctgtccaagatcagcatcagcccatcatcattccagatactcccagccctcctgtgagtgtcatcactatccgaagtgacactgatgaggaagaggacaacaaatacaagcccagtagctctggactgaagccaaggtctaatgtcatcagttatgtcactgtcaatgattctccagactctgactcttctttgagcagcccttattccactgataccctgagtgctctccgaggcaatagtggatccgttttggaggggcctggcagagttgtggcagatggcactggcacccgcactatcattgtgcctccactgaaaactcagcttggtgactgcactgtagcaacccaggcctcaggtctcctgagcaataagactaagccagtcgcttcagtgagtgggcagtcatctggatgctgtatcacccccacagggtatcgagctcaacgcggggggaccagtgcagcacaaccactcaatcttagccagaaccagcagtcatcggcggctccaacctcacaggagagaagcagcaacccagccccccgcaggcagcaggcgtttgtggcccctctctcccaagccccctacaccttccagcatggcagcccgctacactcgacagggcacccacaccttgccccggcccctgctcacctgccaagccaggctcatctgtatacgtatgctgccccgacttctgctgctgcactgggctcaaccagctccattgctcatcttttctccccacagggttcctcaaggcatgctgcagcctataccactcaccctagcactttggtgcaccaggtccctgtcagtgttgggcccagcctcctcacttctgccagcgtggcccctgctcagtaccaacaccagtttgccacccaatcctacattgggtcttcccgaggctcaacaatttacactggatacccgctgagtcctaccaagatcagccagtattcctacttatagttggtgagcatgagggaggaggaatcatggctaccttctcctggccctgcgttcttaatattgggctatggagagatcctcctttaccctcttgaaatttcttagccagcaacttgttctgcaggggcccactgaagcagaaggtttttctctgggggaacctgtctcagtgttgactgcattgttgtagtcttcccaaagtttgccctatttttaaattcattatttttgtgacagtaattttggtacttggaagagttcagatgcccatcttctgcagttaccaaggaagagagattgttctgaagttaccctctgaaaaatattttgtctctctgacttgatttctataaatgcttttaaaaacaagtgaagcccctctttatttcattttgtgttattgtgattgctggtcaggaaaaatgctgatagaaggagttgaaatctgatgacaaaaaaagaaaaattactttttgtttgtttataaactcagacttgcctattttattttaaaagcggcttacacaatctcccttttgtttattggacatttaaacttacagagtttcagttttgttttaatgtcatattatacttaatgggcaattgttatttttgcaaaactggttacgtattactctgtgttactattgagattctctcaattgctcctgtgtttgttataaagtagtgtttaaaaggcagctcaccatttgctggtaacttaatgtgagagaatccatatctgcgtgaaaacaccaagtattctttttaaatgaagcaccatgaattcttttttaaattattttttaaaagtctttctctctctgattcagcttaaatttttttatcgaaaaagccattaaggtggttattattacatggtggtggtggttttattatatgcaaaatctctgtctattatgagatactggcattgatgagctttgcctaaagattagtatgaattttcagtaatacacctctgttttgctcatctctcccttctgttttatgtgatttgtttggggagaaagctaaaaaaacctgaaaccagataagaacatttcttgtgtatagcttttatacttcaaagtagcttcctttgtatgccagcagcaaattgaatgctctcttattaagacttatataataagtgcatgtaggaattgcaaaaaatattttaaaaatttattactgaatttaaaaatattttagaagttttgtaatggtggtgttttaatattttacataattaaatatgtacatattgattagaaaaatataacaagcaatttttcctgctaacccaaaatgttatttgtaatcaaatgtgtagtgattacacttgaattgtgtacttagtgtgtatgtgatcctccagtgttatcccggagatggattgatgtctccattgtatttaaaccaaaatgaactgatacttgttggaatgtatgtgaactaattgcaattatattagagcatattactgtagtgctgaatgagcaggggcattgcctgcaaggagaggagacccttggaattgttttgcacaggtgtgtctggtgaggagtttttcagtgtgtgtctcttccttccctttcttcctccttcccttattgtagtgccttatatgataatgtagtggttaatagagtttacagtgagcttgccttaggatggaccagcaagcccccgtggaccctaagttgttcaccgggatttatcagaacaggattagtagctgtattgtgtaatgcattgttctcagtttccctgccaacattgaaaaataaaaacagcagcttttctcctttaccaccacctctacccctttccattttggattctcggctgagttctcacagaagcattttccccatgtggctctctcactgtgcgttgctaccttgcttctgtgagaattcaggaagcaggtgagaggagtcaagccaatattaaatatgcattcttttaaagtatgtgcaatcacttttagaatgaatttttttttccttttcccatgtggcagtccttcctgcacatagttgacattcctagtaaaatatttgcttgttgaaaaaaacatgttaacagatgtgtttataccaaagagcctgttgtattgcttaccatgtccccatactatgaggagaagttttgtggtgccgctggtgacaaggaactcacagaaaggtttcttagctggtgaagaatatagagaaggaaccaaagcctgttgagtcattgaggcttttgaggtttcttttttaacagcttgtatagtcttggggcccttcaagctgtgaaattgtccttgtactctcagctcctgcatggatctgggtcaagtagaaggtactggggatggggacattcctgcccataaaggatttggggaaagaagattaatcctaaaatacaggtgtgttccatctgaattgaaaatgatatatttgagatataattttaggactggttctgtgtagatagagatggtgtcaaggaggtgcaggatggagatgggagatttcatggagcctggtcagccagctctgtaccaggttgaacaccgaggagctgtcaaagtatttggagtttcttcattgtaaggagtaagggcttccaagatggggcaggtagtccgtacagcctaccaggaacatgttgtgttttctttattttttaaaatcattatattgagttgtgttttcagcactatattggtcaagatagccaagcagtttgtataatttctgtcactagtgtcatacagttttctggtcaacatgtgtgatctttgtgtctcctttttgccaagcacattctgattttcttgttggaacacaggtctagtttctaaaggacaaattttttgttccttgtcttttttctgtaagggacaagatttgttgtttttgtaagaaatgagatgcaggaaagaaaaccaaatcccattcctgcaccccagtccaataagcagataccacttaagataggagtctaaactccacagaaaaggataataccaagagcttgtattgttaccttagtcacttgcctagcagtgtgtggctttaaaaactagagatttttcagtcttagtctgcaaactggcatttccgattttccagcataaaaatccacctgtgtctgctgaatgtgtatgtatgtgctcactgtggctttagattctgtccctggggttagccctgttggccctgacaggaagggaggaagcctggtgaatttagtgagcagctggcctgggtcacagtgacctgacctcaaaccagcttaaggctttaagtcctctctcagaacttggcatttccaacttcttcctttccgggtgagagaagaagcggagaagggttcagtgtagccactctgggctcatagggacacttggtcactccagagtttttaatagctcccaggaggtgatattattttcagtgctcagctgaaataccaaccccaggaataagaactccatttcaaacagttctggccattctgagcctgcttttgtgattgctcatccattgtcctccactagaggggctaagcttgactgcccttagccaggcaagcacagtaatgtgtgttttgttcagcattattatgcaaaaattcactagttgagatggtttgttttaggataggaaatgaaattgcctctcagtgacaggagtggcccgagcctgcttcctattttgattttttttttttttaactgatagatggtgcagcatgtctacatggttgtttgttgctaaactttatataatgtgtggtttcaattcagcttgaaaaataatctcactacatgtagcagtacattatatgtacattatatgtaatgttagtatttctgctttgaatccttgatattgcaatggaattcctactttattaaatgtatttgatatgctagttattgtgtgcgatttaaactttttttgctttctccctttttttggttgtgcgctttcttttacaacaagcctctagaaacagatagtttctgagaattactgagctatgtttgtaatgcagatgtacttagggagtatgtaaaataatcattttaacaaaagaaatagatatttaaaatttaatactaactatgggaaaagggtccattgtgtaaaacatagtttatctttggattcaatgtttgtctttggttttacaaagtagcttgtattttcagtattttctacataatatggtaaaatgtagagcaattgcaatgcatcaataaaatgggtaaattttctgactta

SEQ ID NO: 1708 - DNA, 3424 bp, Homo sapiens
  source 1..3424: mol_type = genomic DNA
gcagagtctgcagtgcggagggggcgggaagtccaggccccgcactcgatccacgctggctccctacggaggcccacctactcgaggcccaccgactcctactgcaatcagtactatgcgatcgtcctagagagtccattcagctgcacttccgcctcagtatggcatcacagctgcaagtgttttcgcccccatcagtgtcgtcgagtgccttctgcagtgcgaagaaactgaaaatagagccctctggctgggatgtttcaggacagagtagcaacgacaaatattatacccacagcaaaaccctcccagccacacaagggcaagccaactcctctcaccaggtagcaaatttcaacatccctgcttacgaccagggcctcctcctcccagctcctgcagtggagcatattgttgtaacagccgctgatagctcgggcagtgctgctacatcaaccttccaaagcagccagaccctgactcacagaagcaacgtttctttgcttgagccatatcaaaaatgtggattgaaacgaaaaagtgaggaagttgacagcaacggtagtgtgcagatcatagaagaacatccccctctcatgctgcaaaacaggactgtggtgggtgctgctgccacaaccaccactgtgaccacaaagagtagcagttccagcggagaaggggattaccagctggtccagcatgagatcctttgctctatgaccaatagctatgaagtcttggagttcctaggccgggggacatttggacaggtggctaagtgctggaagaggagcaccaaggaaattgtggctattaaaatcttgaagaaccacccctcctatgccagacaaggacagattgaagtgagcatcctttcccgcctaagcagtgaaaatgctgatgagtataattttgtccgttcatacgagtgctttcagcataagaatcacacctgccttgtttttgaaatgttggagcagaacttatatgattttctaaagcaaaacaaatttagcccactgccactcaagtacatcagaccaatcttgcagcaggtggccacagccttgatgaagctcaagagtcttggtctgatccacgctgaccttaagcctgaaaacatcatgctggttgatccagttcgccagccctaccgagtgaaggtcattgactttggttctgctagtcacgtttccaaagctgtgtgctcaacctacttacagtcacgttactacagagctcctgaaattattcttgggttaccattttgtgaagctattgatatgtggtcactgggctgtgtgatagctgagctgttcctgggatggcctctttatcctggtgcttcagaatatgatcagattcgttatatttcacaaacacaaggcttgccagctgaatatcttctcagtgccggaacaaaaacaaccaggtttttcaacagagatcctaatttggggtacccactgtggaggcttaagacacctgaagaacatgaactggagactggaataaaatcaaaagaagctcggaagtacatttttaattgcttagatgacatggctcaggtgaatatgtctacagacctggagggaacagacatgttggcagagaaggcagaccgaagagaatacattgatctgttaaagaaaatgctcacaattgatgcagataagagaattacccctctaaaaactcttaaccatcagtttgtgacaatgactcaccttttggattttccacatagcaatcatgttaagtcttgttttcagaacatggagatctgcaagcggagggttcacatgtatgatacagtgagtcagatcaagagtcccttcactacacatgttgccccaaatacaagcacaaatctaaccatgagcttcagcaatcagctcaatacagtgcacaatcaggccagtgttctagcttccagttctactgcagcagctgctactctttctctggctaattcagatgtctcactactaaactaccagtcagctttgtacccatcatctgctgcaccagttcctggagttgcccagcagggtgtttccttgcagcctggaaccacccagatttgcactcagacagatccattccaacagacatttatagtatgtccacctgcgtttcaaactggactacaagcaacaacaaagcattctggattccctgtgaggatggataatgctgtaccgattgtaccccaggcaccagctgctcagccactacagattcagtcaggagttctcacgcagggaagctgtacaccactaatggtagcaactctccaccctcaagtagccaccatcacaccgcagtatgcggtgccctttactctgagctgcgcagccggccggccggcgctggttgaacagactgccgctgtactgcaggcgtggcctggagggactcagcaaattctcctgccttcaacttggcaacagttgcctggggtagctctacacaactctgtccagcccacagcaatgattccagaggccatggggagtggacagcagctagctgactggaggaatgcccactctcatggcaaccagtacagcactatcatgcagcagccatccttgctgactaaccatgtgacattggccactgctcagcctctgaatgttggtgttgcccatgttgtcagacaacaacaatccagttccctcccttcgaagaagaataagcagtcagctccagtctcttccaagtcctctctagatgttctgccttcccaagtctattctctggttgggagcagtcccctccgcaccacatcttcttataattccttggtccctgtccaagatcagcatcagcccatcatcattccagatactcccagccctcctgtgagtgtcatcactatccgaagtgacactgatgaggaagaggacaacaaatacaagcccagtagctctggactgaagccaaggtctaatgtcatcagttatgtcactgtcaatgattctccagactctgactcttctttgagcagcccttattccactgataccctgagtgctctccgaggcaatagtggatccgttttggaggggcctggcagagttgtggcagatggcactggcacccgcactatcattgtgcctccactgaaaactcagcttggtgactgcactgtagcaacccaggcctcaggtctcctgagcaataagactaagccagtcgcttcagtgagtgggcagtcatctggatgctgtatcacccccacagggtatcgagctcaacgcggggggaccagtgcagcacaaccactcaatcttagccaggtaagtgctatgggctactgccttctgtttgggccctgcactgttgttactttctggagaaccctgcttctggctggatgctgaataaagccaaatgaagccccttttgtgtcaaacaa

SEQ ID NO: 1709 - DNA, 748 bp, Homo sapiens
  source 1..748: mol_type = genomic DNA
atcctcgtgggccctgaccttctctctgagagccgggcagaggctccggagccatgcaggccgaaggccagggcacagggggttcgacgggcgatgctgatggcccaggaggccctggcattcctgatggcccagggggcaatgctggcggcccaggagaggcgggtgccacgggcggcagaggtccccggggcgcaggggcagcaagggcctcggggccgagaggaggcgccccgcggggtccgcatggcggtgccgcttctgcgcaggatggaaggtgcccctgcggggccaggaggccggacagccgcctgcttcagttgcacatcacgatgcctttctcgtcgcccatggaagcggagctggtccgcaggatcctgtcccgggatgccgcacctctcccccgaccaggggcggttctgaaggacttcaccgtgtccggcaacctactgtttatccgactgactgctgcagaccaccgccaactgcagctctccatcagctcctgtctccagcagctttccctgttgatgtggatcacgcagtgctttctgcccgtgtttttggctcaggctccctcagggcagaggcgctaagcccagcctggcgccccttcctaggtcatgcctcctcccctagggaatggtcccagcacgagtggccagttcattgtgggggcctgattgtttgtcgctggaggaggacggcttacatgtttgtttctgtagaaaataaagctgagctacga

SEQ ID NO: 1710 - DNA, 1110 bp, Homo sapiens
  source 1..1110: mol_type = genomic DNA
tcccgaggtgaagcggaggcccaaggctgaggagcccgcctcgccggagacgcccaggcgctggccctggatcccggagccacggccgtctctcagccagagctgagcctcggcggcccggccggcgctggcctccgtgcggcggcggcaaacacggcccgcaggggaccgggtcgggtggggctgggcgccgcgcggctccctgtggagcctgcctgttggagcgcggcggggctccggcggtggtcttggagctggcgtgtggatttccacgtccgaatgatcgagttgtggcgggctttgagatgtcagaggatttagcaaagcagctggcaagctacaaagctcagctccagcaagttgaagctgcattatctggaaatggagaaaatgaagatttgctaaaattgaagaaagatttacaagaagttatagaactaaccaaagaccttctgtcaactcaaccttctgagacgcttgcaagttcagacagttttgcttctactcaacctactcattcatggaaagtaggagacaagtgtatggcagtctggagtgaagatggacagtgttatgaagcggagattgaggagatagatgaagaaaatggcaccgctgcaatcacctttgctggttatggcaatgctgaagtgactccactgttgaacctcaagcctgtagaagaaggaaggaaggcaaaggaggacagtggcaacaaacccatgtcaaaaaaagaaatgattgcccagcagcgtgaatataaaaagaagaaagctttgaaaaaagctcagagaataaaagaacttgagcaggaaagagaggaccagaaagtgaaatggcaacaattcaacaacagagcctattctaaaaacaaaaaaggccaggtaaagaggagtatttttgcttcacctgagagtgtgactggtaaagttggagtaggaacctgtggaattgctgataaacctatgacacaatatcaagatacctctaaatacaatgtcaggcatttgatgcctcaataatcagaaaaactgttggatttcatctctgcagggctttacatttacctttttatccttatatttttctaaaggtaaattatttgttaga

SEQ ID NO: 1711 - DNA, 2031 bp, Homo sapiens
  source 1..2031: mol_type = genomic DNA
tctctgtcttttcctccttccagtgcccggcgttcctcccttccccctcgccgccgaccgagttcttccttttcagaccgggtcgccttgctgtcgtcgcggtgattttcctgctactgctactgctgctgctgccaccgccactaccactgggctcatttgccccgaccccttcccgccgccccgcccccagccccacacaagatgtcagaggatttagcaaagcagctggcaagctacaaagctcagctccagcaagttgaagctgcattatctggaaatggagaaaatgaagatttgctaaaattgaagaaagatttacaagaagttatagaactaaccaaagaccttctgtcaactcaaccttctgagacgcttgcaagttcagacagttttgcttctactcaacctactcattcatggaaagtaggagacaagtgtatggcagtctggagtgaagatggacagtgttatgaagcggagattgaggagatagatgaagaaaatggcaccgctgcaatcacctttgctggttatggcaatgctgaagtgactccactgttgaacctcaagcctgtagaagaaggaaggaaggcaaaggaggacagtggcaacaaacccatgtcaaaaaaagaaatgattgcccagcagcgtgaatataaaaagaagaaagctttgaaaaaagctcagagaataaaagaacttgagcaggaaagagaggaccagaaagtgaaatggcaacaattcaacaacagagcctattctaaaaacaaaaaaggccaggtaaagaggagtatttttgcttcacctgagagtgtgactggtaaagttggagtaggaacctgtggaattgctgataaacctatgacacaatatcaagatacctctaaatacaatgtcaggcatttgatgcctcaataatcagaaaaactgttggatttcatctctgcagggctttacatttacctttttatccttatatttttctaaaggtaaattatttgttagatgagtaagcaagataccattgtcgtcattggttggcttcagtagaatgaaacgtgaagaaattgcatttgataactgctattcatttaacttttctcattatcagtaccacggttccctcaaagtttgttgaataaagcaacttttgtagatgctgtttcatacagcacttagatgaattattgatcttcctaatatcaggcgcctacttaacctatggtgtgtactttttgtaagttgtaacttgaaattttcagatgctttgaacttgacacatactctagcaattcattggaacaccaaggcaaaaacaccaacctgctaaaagagatcttttcatttttcttattttcagctttaaaacttagctgtcgttcagttaagcttaaagataggttaatttgtaaatggcaaagtttgttttgaggtttttcctcaataacttgtttcccaggcctattaggccatctctaaaattgatctagctgttttatttttatgtactcttagttttatgtaagaaaccttaggatgagctcccttttctaaggtgtttttgttttttgtatgtttgcttttttcctgttttttgttttttccatttacggcagtggtaccatgttttggatgtgtgatgtttatatgggagaacaaaaagctgatgtatagccctgtatacagtgtagatactatttttgtaaaaacacaaggctaaattaatgaacaagaatactgaatatttcatcattaaaaatttcttgtatttcttgtgcattaatctgacgataatttccctgtatattatgttcatttagctgtttgtaatttttgttaattagatcaggttgtctgcatttgttggtgtaagtgaacatcatcacagttatcctgagttgagtttaagccaaatacatgcatagaaaagggtcttcctattaatggaagaaggtaatttttaggatgtgtattatttcagttttgtatgtttaacttttattaaataaagtgtttttaaaatctcca

SEQ ID NO: 1712 - DNA, 2377 bp, Homo sapiens
  source 1..2377: mol_type = genomic DNA
gacctcagcagtgggggaggaatagaacctcagtgtagttctgaggtgtacttcagggccagggagagaggatgtgaaaatgtggcctggtctcttgggctgcgttcacattgctttctggaagctgagctccatcccctcccttggtttttgccaactaatgtgtgctctcccttaccaggtgctgcccataaactcgtgtgttatttcaccaactgggcacacagtcggccaggccctgcctcgatcttgccccatgacctggacccctttctctgcacccacctgatatttgcctttgcctcaatgaacaacaatcagattgttgctaaggatctccaggatgagaaaattctctacccagagttcaacaaactaaaggagagaatgtggcagcagctgcccaccggagtgaagaacccagctcatcaaccctctctctcacatcataggaacagagagctgaaaacactactgtccatcggcgggtggaactttggcacctcaagattcaccactatgttgtccacatttgccaaccgtgaaaagtttattgcttcagttatatcccttctgaggacacatgactttgatggtcttgaccttttcttcttatatcctggactaagaggcagccccatgcatgaccggtggacttttctcttcttaattgaagagctcctgtttgccttccggaaggaggcactgctcaccatgcgcccgaggctgctgctgtctgctgctgtttctggggtcccacacatcgtccaaacatcctatgatgtgcgctttctaggaagactcctggatttcatcaatgtcttgtcttatgacttacatggaagttgggaaaggttcacaggacataatagccccctcttctctctgcctgaagaccccaaatcttcggcatatgctatgaattattggagaaagcttggggcaccctcagagaagctcatcatggggatccccacctatggacgtacctttcgcctcctcaaagcctctaagaatgggttgcaggccagagcgatcggaccagcatctccagggaagtacaccaagcaagaaggcttcttggcttattttgagatttgttcctttgtctggggagcgaagaagcactggattgattaccagtatgtcccgtatgccaacaaggggaaagagtgggttggctatgacaatgccatcagcttcagttacaaggcatggtttataaggcgagagcattttgggggggccatggtgtggacattggacatggatgacgtcaggggcacgttctgtggcactggccctttcccccttgtctacgtattgaatgatatcctggtgcgggctgagttcagttcaacttctttaccacaattttggctgtcatctgctgtgaattcttcaagcactgaccctgaaaggctggctgtgaccacggcatggaccactgatagtaagattttgcccccaggaggagaggctggggtcactgagatccacggaaagtgtgaaaatatgactataacccctagaggtacaactgtgacccctacaaaggaaactgtatcccttggaaagcacactgtagctctaggagagaagactgagatcactggggcaatgaccatgacttctgtgggtcatcagtccatgacccctggagagaaggccctgacccctgtgggtcatcaatctgtgaccactggacagaagaccctgacctctgtgggttatcagtctgtgacccctggggaaaagaccctgacccctgtgggtcatcagtctgtgacccctgtgagtcatcagtctgtgagccctggaggaacgactatgacccctgtccattttcagactgagacccttagacagaatacagtggcccctagaaggaaggctgtggcccgtgaaaaggtgactgtcccctccagaaacatatcagtcacccctgaagggcagactatgcctttaagaggggagaatttgacttctgaggtgggcactcaccccaggatgggtaacttgggtcttcagatggaagctgaaaacaggatgatgctgtcctccagccccgtcatccagctcccggaacaaactcctctagcttttgacaaccgctttgttcccatctatggaaaccattcctctgtcaactcagtaacccctcaaacaagtcctctttctctaaaaaaagaaatcccagaaaactctgctgtggatgaagaagcctaagcccctctggtgtcagaaaccagggaaaacccttgtcttttcttctaagtgacatgttggaagccttctcatcccggggcaaagcaggcatcaaaaccagaataggccaatctcttttccattaaataaactgtaaacacaagaaccc

SEQ ID NO: 1713 - DNA, 2243 bp, Homo sapiens
  source 1..2243: mol_type = genomic DNA
agggaagctcctataaagggctgcatctctggactcacagctatcagaccattgagatgtggaagctgttgctgtgggttgggctggttcttgtgctgaaacaccacgatggtgctgcccataaactcgtgtgttatttcaccaactgggcacacagtcggccaggccctgcctcgatcttgccccatgacctggacccctttctctgcacccacctgatatttgcctttgcctcaatgaacaacaatcagattgttgctaaggatctccaggatgagaaaattctctacccagagttcaacaaactaaaggagaggaacagagagctgaaaacactactgtccatcggcgggtggaactttggcacctcaagattcaccactatgttgtccacatttgccaaccgtgaaaagtttattgcttcagttatatcccttctgaggacacatgactttgatggtcttgaccttttcttcttatatcctggactaagaggcagccccatgcatgaccggtggacttttctcttcttaattgaagagctcctgtttgccttccggaaggaggcactgctcaccatgcgcccgaggctgctgctgtctgctgctgtttctggggtcccacacatcgtccaaacatcctatgatgtgcgctttctaggaagactcctggatttcatcaatgtcttgtcttatgacttacatggaagttgggaaaggttcacaggacataatagccccctcttctctctgcctgaagaccccaaatcttcggcatatgctatgaattattggagaaagcttggggcaccctcagagaagctcatcatggggatccccacctatggacgtacctttcgcctcctcaaagcctctaagaatgggttgcaggccagagcgatcggaccagcatctccagggaagtacaccaagcaagaaggcttcttggcttattttgagatttgttcctttgtctggggagcgaagaagcactggattgattaccagtatgtcccgtatgccaacaaggggaaagagtgggttggctatgacaatgccatcagcttcagttacaaggcatggtttataaggcgagagcattttgggggggccatggtgtggacattggacatggatgacgtcaggggcacgttctgtggcactggccctttcccccttgtctacgtattgaatgatatcctggtgcgggctgagttcagttcaacttctttaccacaattttggctgtcatctgctgtgaattcttcaagcactgaccctgaaaggctggctgtgaccacggcatggaccactgatagtaagattttgcccccaggaggagaggctggggtcactgagatccacggaaagtgtgaaaatatgactataacccctagaggtacaactgtgacccctacaaaggaaactgtatcccttggaaagcacactgtagctctaggagagaagactgagatcactggggcaatgaccatgacttctgtgggtcatcagtccatgacccctggagagaaggccctgacccctgtgggtcatcaatctgtgaccactggacagaagaccctgacctctgtgggttatcagtctgtgacccctggggaaaagaccctgacccctgtgggtcatcagtctgtgacccctgtgagtcatcagtctgtgagccctggaggaacgactatgacccctgtccattttcagactgagacccttagacagaatacagtggcccctagaaggaaggctgtggcccgtgaaaaggtgactgtcccctccagaaacatatcagtcacccctgaagggcagactatgcctttaagaggggagaatttgacttctgaggtgggcactcaccccaggatgggtaacttgggtcttcagatggaagctgaaaacaggatgatgctgtcctccagccccgtcatccagctcccggaacaaactcctctagcttttgacaaccgctttgttcccatctatggaaaccattcctctgtcaactcagtaacccctcaaacaagtcctctttctctaaaaaaagaaatcccagaaaactctgctgtggatgaagaagcctaagcccctctggtgtcagaaaccagggaaaacccttgtcttttcttctaagtgacatgttggaagccttctcatcccggggcaaagcaggcatcaaaaccagaataggccaatctcttttccattaaataaactgtaaacacaagaacccac

SEQ ID NO: 1714 - DNA, 3830 bp, Homo sapiens
  source 1..3830: mol_type = genomic DNA
gcagtcaggccgttgtgcgcaggcgcagaggcggcggcggcggcggcggcggcggatgtttacggcggccgaggttggagcggcgctgctcggccgcggacacacgagggacgcgcccgaggagctgcaggtggcagcccaggcggtccgaacccgtcggccggccgagcctggagtattgcctaagtgtaatcttgaacatgggcggtgctgtgagtgctggtgaagacaatgatgagctgatagataatttgaaagaagcacagtatatccggactgagctggtagagcaggctttcagagctatcgatcgtgcagactattatcttgaagaatttaaagaaaatgcttataaagacttggcatggaagcatggaaacattcacctctcagccccgtgcatctactcggaggtgatggaagccctagatctgcagcctggactctcgtttctgaacctgggcagtggcactgggtatctcagctccatggtgggcctcattctaggtccttttggtgtgaaccatggggtggaacttcactcagatgtgatagagtatgcaaagcagaaactggacttcttcatcagaacaagtgatagttttgacaagtttgacttctgtgaaccttcctttgttactgggaattgcctggagatttctccggattgttctcagtatgatcgtgtatactgtggggctggcgtgcagaaagagcatgaagagtacatgaagaatcttctcaaagtgggagggatccttgtcatgccactggaagagaagccctgccattcagagtcaggaaaatcaagacttgtccagttaccaccagtggcagttcgcagcctccaggacttggctcgcatcgccatccggggcaccattaaaaagattattcatcaggaaactgtgagcaaaaacggaaacggactaaagaacacccccaggtttaaacgaaggagagttcgccgccgtcgaatggaaacgattgtctttttggacaaagaagtctttgccagtcggatttccaacccctcagatgacaacagctgtgaagacttggaagaggaacggagggaagaagaagagaagaccccgccggaaacaaagccagaccccccagtgaacttcctacgccagaaggtcctgagcctccctctgccagatcccctgaaatactacttgctttattacagagaaaaataagtctcctgtttgaaagggggaaataggaagagcagattgctgagtgtgaagttcgtgctgcctgtgtgctgttgaagggtcacctggaggcagacgttgtggggaagggaactgctgggctcatccacaccatggttttcttctagttcctgattgacctctaaaattctattcagttgtatgatttgtttacatagttccacaagaccttcattgcatagaagattgttttcccaaagtggagagaatcttcatagagaaaaagagaaggctgtttctttttcggctctgacgaaacactgaagtctgcgtaagagagactgtttgatgaccgtccctcatgcaacatgcacggtactcactaaaaatgaaaactgaagtggaaactaacctgtgttgcttataaagtgtgaaagcacaagcttataaatgtataaaatcttttctgggtgtgacgcacctgcgtccaagtttgaatttttatgatatgtaccacttaattactggcactgagtatcactgaatttcttagttttctagtggggaaacattattgagaagccctcccttattttaagtaagttgattaaatcttatgtgagttgccagttgtaatttttcaaaggaaaaattttgatggggtggaggaatgaattgccagataatctttctggaattccgagagaattccaaagagggtttttttttttttttttaggacatcttttgatacctttaaaagaaccactgtcaagtaatccttaaaagaatatcttggaaaaggaaacagattttttcctgtgtgtaagcaataagtgaagttacatttgccctaaccctagggatgattctttacccagttttaaagcccatcatggtattctaaggtgttgacaccctccatcctcagagcaggtcgaaaatattaaatagactggggactctatgatgggcagcctgtgctttttgacttcagtttgctatttttctgtgatcacattagtactgattcatagattctatcttttataattctggagaaaaagatttgttagttttgtaatttttttgtaagaccaaatgtatgtattttagtagctccattgcatgagaagagtgtaactcacactgacttgtgatatcagccttctctgggccttgtgtgtggagagctttctatcttaccaagtggtagggctaaaagaacaacagcctttttggtagtcacatagcagaatgatcagagttacattgcttattccaaaacattggttctttttaaaacatttttttttacccaaagaaaagaataatagaaattactaacaataaatataaattcagagtgttgatataggattcagtatccagagtttatttttaatcttaatcctcagcttcttgggagttgctgggcttcagtgtctctgtggtttcaccagcttagcttgagctctggttattttggatcttttctgctttttttaagtaactgagtcatttttaccacacagtccagtttgcatgtatagctaggaaacatgtattgctctagattgggcagtttaagtcattttaaagaaagttagttcatagttgttgccttttaactcatagtcaagcttcagtctttcaaagagaaatgtgtgattttcatttacttgctgatattttgtagtttggagatccttgtgggcattattctaactgatacgtagacacttacttggaaatttttggacattatattaaatgagtgctatctgtgaaattggttatattaggtggcttgactaatgttttttctataattgtatatggactgcatttttaaaaaaaccgcatttgcctttatgctagattgtaaaaaattatattagaatgcataagacatgtttttccttcatatgctagacttttcctagcatttcgtatttctgtgttgtcagtgtgtgatttttaaaccggaatttggtttaaaaaaaatctggtggtaatatatgtgagaaatactttggtgtttaccttatgaaaataaaggattgtaagtaaagtttcctgcgcaccttataccagaattcagtataatacactactttctgttttcaaacagataaatcataatatagtctgtattatctgtaagatctgtcttgtaaaccacattcttgacaactatttgcttttgagtagtttgtattttaatatgtgacttttgtcttgaaaagtagtaaagccatagacttgtgcaaaacaagtttcaagtttatagatattaagtttgtaatgtgagcatcaaatgtgtatgtaaaaatactttttaccagtctggaacttgggaaaatccagggaatttgaaacatagattttaatgagctggtaaacacaaatcatgtcaataaaggtagtcaggatattttatccttagcattgcttctgcatcctgtgtaggattccaattcttgaatatgttcttttcaaaatcttaagaaaagaaccttttttctttattaacatcatgtgtttactttcagcaaatatttgtattactgcttgattctgtgacagtcacaatagatgtagagaaggcattatttttcattaataaatgtgaaattggaatgg

SEQ ID NO: 1715 - DNA, 2325 bp, Homo sapiens
  source 1..2325: mol_type = genomic DNA
gttgagcggttagtgaccaggaagcctccccacccaccagagtccaaagagcacaggcgtggctgcctctgtaacctcatcaaaggcaggctctgcctgtggccactagcagagaagctgctgtccttccaccaccagcaccggaccacctgctccaagaccagcctcctggggggaccaggcacccggccttcactggcacccagggagccgtcctcagcagcgtcaacatgtcaaggcccagcagcagagccatttacttgcaccggaaggagtactcccagaacctcacctcagagcccaccctcctgcagcacagggtggagcacttgatgacatgcaagcaggggagtcagagagtccaggggcccgaggatgccttgcagaagctgttcgagatggatgcacagggccgggtgtggagccaagacttgatcctgcaggtcagggacggctggctgcagctgctggacattgagaccaaggaggagctggactcttaccgcctagacagcatccaggccatgaatgtggcgctcaacacatgttcctacaactccatcctgtccatcaccgtgcaggagccgggcctgccaggcactagcactctgctcttccagtgccaggaagtgggggcagagcgactgaagaccagcctgcagaaggctctggaggaagagctggagcaaagcagacctcgacttggaggccttcagccaggccaggacagatggagggggcctgctatggaaaggccgctccctatggagcaggcacgctatctggagccggggatccctccagaacagccccaccagaggaccctagagcacagcctcccaccatccccaaggcccctgccacgccacaccagtgcccgagaaccaagtgcctttactctgcctcctccaaggcggtcctcttcccccgaggacccagagagggacgaggaagtgctgaaccatgtcctaagggacattgagctgttcatgggaaagctggagaaggcccaggcaaagaccagcaggaagaagaaatttgggaaaaaaaacaaggaccagggaggtctcacccaggcacagtacattgactgcttccagaagatcaagcacagcttcaacctcctgggaaggctggccacctggctgaaggagacaagtgcccctgagctcgtacacatcctcttcaagtccctgaacttcatcctggccaggtgccctgaggctggcctagcagcccaagtgatctcacccctcctcacccctaaagctatcaacctgctacagtcctgtctaagcccacctgagagtaacctttggatggggttgggcccagcctggaccactagccgggccgactggacaggcgatgagcccctgccctaccaacccacattctcagatgactggcaacttccagagccctccagccaagcacccttaggataccaggaccctgtttcccttcggcggggaagtcataggttagggagcacctcacactttcctcaggagaagacacacaaccatgaccctcagcctggggaccccaactccaggccctccagccccaaacctgcccagccagccctgaaaatgcaagtcttgtacgagtttgaagctaggaacccacgggaactgactgtggtccagggagagaagctggaggttctggaccacagcaagcggtggtggctggtgaagaatgaggcgggacggagcggctacattccaagcaacatcctggagcccctacagccggggacccctgggacccagggccagtcaccctctcgggttccaatgcttcgacttagctcgaggcctgaagaggtcacagactggctgcaggcagagaacttctccactgccacggtgaggacacttgggtccctgacggggagccagctacttcgcataagacctggggagctacagatgctatgtccacaggaggccccacgaatcctgtcccggctggaggctgtcagaaggatgctggggataagcccttaggcaccagcttagacacctccaagaaccaggccccgctgatgcaagatggcagatctgatacccattagagccccgagaattcctcttctggatcccagtttgcagcaaaccccacaccccagctcacacagcaaaaacaatggacaggcccagaggctgaagcaaacagtgtcccttctggctgtgttggagcctccccagtaaccacctatttattttacctctttcccaaacctggagcatttatgcctaggcttgtcaagaatctgttcagtccctctccttctcaataaaagcatcttcaagcttg

SEQ ID NO: 1716 - DNA, 3231 bp, Homo sapiens
  source 1..3231: mol_type = genomic DNA
cttctgtagctcgcgttgaagccgcacgtccggccccgatcccggcaccatgagcttcggctcggagcactacctgtgctcctcctcctcctaccgcaaggtgttcggggatggctctcgcctgtccgcccgcctctctggggccggcggcgcgggcggcttccgctcgcagtcgctgtcccgcagcaatgtggcctcctcggccgcctgctcctcggcctcgtcgctcggcctcggcctggcctatcgccggccgccggcgtccgacgggctggacctgagccaggcggcggcgcgcaccaacgagtacaagatcatccgcaccaacgagaaggagcagctgcagggcctcaacgaccgcttcgccgtgttcatcgagaaggtgcatcagctggagacgcagaaccgcgcgttggaggccgagctggccgcgctgcgacagcgccacgctgagccgtcgcgcgtcggcgagctcttccagcgcgagctgcgcgacctgcgcgcgcagctggaggaggccagctcggctcgctcgcaggccctgctggagcgcgacgggctggcggaggaggtgcagcggctgcgggcgcgctgcgaggaggagagccgcggacgcgaaggcgccgagcgcgccctgaaggcgcagcagcgcgacgtggacggcgccacgctggcccgcctggacctggagaagaaggtggagtcgctgctggacgagctggccttcgtacgccaggtgcacgacgaggaggtagccgagctgctggccacgctgcaggcgtcgtcgcaggccgcggccgaggtggacgtgactgtggctaaaccagacctgacctcggctctgagggagatccgcgcccagtatgagtccctggccgctaagaacctgcagtccgcggaagaatggtacaagtccaagtttgccaacctgaacgagcaggcggcgcgcagcaccgaggccatccgggccagccgcgaggagatccacgagtatcggcgccagctgcaggcgcgcaccatcgagatcgagggcctgcgcggggccaacgagtccttggagaggcagatcctggagctggaggagcggcacagtgccgaggtagctggctaccaggatagcattgggcagctggagaatgatctgaggaacaccaagagtgagatggcacgccaccttcgggaataccaggacttgctcaatgtcaaaatggctcttgacattgagatagcagcttacaggaaactgctggaaggcgaggagacacgttttagcaccagtgggttaagcatttcggggctgaatccacttcccaatccaagttacctgctcccacctagaatcctcagtgctacaacctccaaagtctcatccactgggctatcacttaagaaagaggaggaggaggaggaggcatctaaggtagcctctaagaaaacctcccagataggggaaagttttgaagaaatattagaggagacagtaatatctactaagaaaaccgagaaatcaaatatagaagaaaccaccatttcaagccaaaaaatataattccattgctttgaaaaagttaatgcttaagagggaatgatatgcatttgacttgttaaacagcctattcctgaactataacacctgccaccactataaaatgtcttcaaggcttcagtctcatatttagtattgaatacttacattctctaataagaaaaccaccccttagattgaagtaaactgcagtcctggagcaatcacagatgagttatctaagaatacagctttctgaccttcagctcacgcttcacagtgatcgatgattcaggtgcagaggaagtacaaactaaggtgctaaatctgcgatcatcgtcatttgctgtgaactgaaattaaaactattcatgctacccagccattacccagctaaataatcttactctagatacctaaaacataagatcactgccagagataaactaatggtccacacccaattccactctgatagaattatttcacaaataataggtgtttgtttaatggacacttttcacctccttcaattccatatatccttttcttctatgtaggaaaaaaatagtctagtgtagtattcttcccttttaaacacattttggttcttctcaaaagaacttacccccattcgcgctctgctcagtgggtaaaattagatgcatgttgaccatgtctatgattcgtgtaattacttatccctgcccatttcatattctttcaattctgtaggttaaaaaaatggcagtgatgaattttaagggtttcccccaacatataaaataatgcaaagaatccctagactttaggctttcagcttacacaaatctatttaattaggaaaaaaactattaaggatgtagcttttcacctttactttagaagcacagtaaatatcccaaactgtgatgaagccgaccttagatttagtagtgtaagctagaagaagtgagtgtttctatgagtggaaaaagccaaggtgtcatttatgtgtcagttcatttgtggtgatatagaattagctttttcatccccttacccttagaatccacgtattccccttcccactagcctaggtcataaagaggcgttgctttcactctcctatgccttttacgagtgctaagtgtaggatattttgtcaccagaacacaatgctaccgccccaaagtaaaagaaaccacttctggtcaatcaacactaccagcgtatatataagaaagacatctttctcttttctaaaagacttccctaacacttaccccatggctgcacagttggtggggtcctgccggagaggaagagacactcagaccagagaaggggtgtgcatgcgcctactcgcttgctagaagtagattctggacagtcagctcttcatctgcccaactgtgtagcatctgcattgcccagtctttcatgtgtgccaaggctgatgcaggatttgttctctgtccagcagtcacttcggccagagctgaagagttgccccgtctctgttccatgtctcctttaagagctctggtgataaggacatgatgcttttactgaactttcttatcctagcacatgcttcaatagttcaaggaacttgaaaaatacttttccttacctttaccccatccctgtctttactcctcacacttactgtaagacattagtaacataataaattaaaagtcacacgaatctcaccaacataa

SEQ ID NO: 1717 - DNA, 2829 bp, Homo sapiens
  source 1..2829: mol_type = genomic DNA
tcagtggcgctagcggcggacccggctgggcagttccttccccagaaggagagattcctctgccatggagtcctacgatgtgatcgccaaccagcctgtcgtgatcgacaacggatccggtgtgattaaagctggttttgctggtgatcagatccccaaatactgctttccaaactatgtgggccgacccaagcacgttcgtgtcatggcaggagcccttgaaggcgacatcttcattggccccaaagctgaggagcaccgagggctgctttcaatccgctatcccatggagcatggcatcgtcaaggattggaacgacatggaacgcatttggcaatatgtctattctaaggaccagctgcagactttctcagaggagcatcctgtgctcctgactgaggcgcctttaaacccacgaaaaaaccgggaacgagctgccgaagttttcttcgagaccttcaatgtgcccgctcttttcatctccatgcaagctgtactcagcctttacgctacaggcaggaccacaggggtggtgctggattctggggatggagtcacccatgctgtgcccatctatgagggctttgccatgccccactccatcatgcgcatcgacatcgcgggccgggacgtctctcgcttcctgcgcctctacctgcgtaaggagggctacgacttccactcatcctctgagtttgagattgtcaaggccataaaagaaagagcctgttacctatccataaacccccaaaaggatgagacgctagagacagagaaagctcagtactacctgcctgatggcagcaccattgagattggtccttcccgattccgggcccctgagttgctcttcaggccagatttgattggagaggagagtgaaggcatccacgaggtcctggtgttcgccattcagaagtcagacatggacctgcggcgcacgcttttctctaacattgtcctctcaggaggctctaccctgttcaaaggttttggtgacaggctcctgagtgaagtgaagaaactagctccaaaagatgtgaagatcaggatatctgcacctcaggagagactgtattccacgtggattgggggctccatccttgcctccctggacacctttaagaagatgtgggtctccaaaaaggaatatgaggaagacggtgcccgatccatccacagaaaaaccttctaatgtcgggacatcatcttcacctctctctgaagttaactccactttaaaactcgctttcttgagtcggagtgtttgcgaggaactgcctgtgtgtgagtgcgtgtgtggatatgagtgtgtgtgcacatgcgagtgccgtgtggccctgggaccctgggcccagaaaggacgatgaactacctgcagtggtgatggcctgaggcctggggttgaccactaactggctcctgacagggaagagcgctggcagaggctgtgctccctcctcaggtggcctctggctggctgtgggggactccgtttactaccacagggagacagagggaggtaagccatcccccgggagaccttgctgctgaccatcctaggctgggctggccccaccctcacccccacccccagggtgccctgaggccccaggcagctgctgcctccactatcgatgcctcctgactgcacactgaggactgggactggggttgagttctgtctggttttgttgccattttggtttgggaggctggaaaagcaccccaagagctattacagagactggagtcaggagagagcaggaggccctcatgttcaccagggaacaggaccacaccggccactggaggagggcaggagcagtcctcactctgaatggctgcagagttaatgttcccagcccagtcccctttcgggggccttgggagagtttaaggcacctgctggttccaggacctcgctttccatctgttcttgttgcaatgccatcttcaaaccgttttatttattgaagtgtttgttcagttaggggctggagagagggagcttgctgcctcctgccttgctacactaatgtttacagcacctaagcttagcctccagggccccacctctcccagctgatggtgagctgacagtgtccacaggttccaggaccatttgagattggaagctacactcaaagacactcccaccaggctctttctcccttttcctcttgctcactgccctggaatcaacaggctggttgctggttagattttctgaaacaggaggtaaaatttttctttggcagaggcccctaagcaagggaggggtgttggagagccagtgcccttaagactggagaaagctgcaatttaccaagttgccttttgccactgtagctgaccaggggactaggttgtagaggtgggaaggccccctctgggctgatcttgtgccattcttgaccttggacctgcttggttaaggagggagtgggccagaccagagtgccaggagctaatggagccaggcctgactcctaggagtggtccaaaggccttcagcctagatggtgcaaagctggggccagcctgtcttcaccggcaccctcacctgtgacaccaagacccaccccaatcccagacttcacacagtattctcccccacgccgtcctatgaccaaaggcccctgccaggtgtgggccacagcagcaggtatgtgtgaaagcaacgtagcgccccgcggactgcagtgcgcttaaccaactcacctcccttctcttagcccaagcctgtccctcgcacagcctcgcacaaaccacattgcctggtggggcccagtgtactgaaataaagtcgttccgatagacacgtca

SEQ ID NO: 1718 - DNA, 1157 bp, Homo sapiens
  source 1..1157: mol_type = genomic DNA
ccatcccggcatactttgcgccgtgcacaggcaagccctggtgcgcattggccccttcggccgccgtcggccggtagttactatggaaacccagctgccatcgctatgtctctgcaaaagacccctccgacccgagtgttcgtggaactggttccctgggctgaccggagccgggagaacaacctggcctcagggagagagacgctaccgggcttacgccaccccctctcctcaacacaagcccaaactgctacccgcgaggtgcaagtaagcggcacctcagaagtgtctgcgggccctgaccgggcgcaggtggtggtgcgagtgagcagcaccaaggaggcggcagccgaggccaaaaagagcgtttgtcgccgtctagattacatcacgcagagcctccagcagcagggcgtgcaggcagaaaatataactgtgacaaaggattttaggagagtggaaaatgcttatcacatggaagcagaggtctgcattacatttactgaatttggaaaaatgcaaaatatttgtaactttcttgttgaaaagctagatagctctgttgtcatcagcccaccccagttctatcatactccaggttctgttgagaatcttcgacggcaagcctgtcttgttgctgttgagaatgcgtggcgcaaagctcaagaagtctgtaaccttgttggccaaaccttaggaaaacctttactaatcaaagaagaagaaacaaaagaatgggaaggccaaatagatgatcaccagtcatccagactctcaagttcattaactgtacaacaaaaaatcaaaagtgcaacaatacatgctgcttcaaaagtatttataacttttgaggtaaagggaaaagagaagagaaaaaagcacctttgaaattccaaacaaattatattgtacttgtatctttttacctatttttatactttttataatgtttacgtttgtcctgaatatatatatatatatatatatatatatatatatggtataggagataagctatttctttccaaaatctataaatctttgaatatagtcccacagaatacttatgttcactttctatttttaaaagactactctgaaaaacactcttggataataaatgtattatgtgcatacttatatactgacagttcata

SEQ ID NO: 1719 - DNA, 2344 bp, Homo sapiens
  source 1..2344: mol_type = genomic DNA
ctccctaagcaggctgaggaagaagagatagcaagccctcacctaacttgacccctttcttgtctctccccgctgctagcttctcccttctcgctgccttgcggggtggggaaacgtggaaggaattctgggaaaaccagatgtctgggttctctattcccgtctggcttgattctggacaaggggcttcctctccagggcctcggtttccccatctttaaaatggactgatagcatagacctgcccacctttcagaggtgcccgaagccttgacgagataacagatgagaagtggttttcgttgtgatgagccagctgaagcggttgcaccggagcgccagaccgtcagcggtgcagtggctctcgcgtccttcacatccccccacacccatcccgtggatgatgggggaaggcactactcctggggttccccgaagcggatcctgggactgggacctggggacgcggtgagaggcagccctgaagctgagtccagaggtctggggcgtcattgtcccagggcggacccagccccagaccctacaactaaacccaaggccagccgagaagcactaccactggcgggctgagctgagctctcattcttcttaggactctggacctttggaggaaatgaaagggacccagttggaaatatagtctttcttcgcgccccctacatctctctcccccggcggaaacgcggcccaaactgttacgaagtggaagaggctggatagctcttcataattaatcaggaatgggaggtttgagcaggtttacttgatgagggaaacattatagcctcgccaattcattcattatttcaacaattacttattgaacacctgctacgtggcagacagtaagagcctggatagtttctccccgtttttcaaagtcgctaaacgcgaccagagggcagaggagaggccggtaacctaagagtcctggctccgccccctccgcgtttggccttgcctgctcctcccaccaccacttcgctcagaggcggctactggctcaagaggacgacagaagccagtctctgatgcccaccgcattctccagcttcaggcctcaagccctgtagccgagaaggcgaggcctaatgttacaccaccggtctgttccgcctccgtttcggggtccacccgaaaagctttcagatcggatcctcggtgagacggcactcgattaaataggtctgtctctacaggccaaggaggcgggtttggtgcggccactccaaggccaaagcgagaaaatcttactgcgcacgcgcaatagacagccgatggagccaccgatggagccgtccggaggggagcaagagcccggagccgtcaggttcctggacctgccctgggaagacgtgctgctcccacacgtcctgaaccgggtcccgctgcgccagctgctccggctgcagcgcgttagccgggccttccggtcgctggtgcagcttcacctggccgggctgcgtcgcttcgatgccgcgcaggtgggtccgcagatcccgcgggccgcattggcccggctgctgcgggatgccgaggggctgcaggagctggcactggcgccgtgtcacgaatggctgtcagacgaggacctggtgccggtgctggcgcggaatccgcagctgcggagtgtggcgttgggcggctgcgggcaactgagtcgccgggcgcttggggctttggccgagggctgcccacgcctgcagcgcctgtcgctcgcgcactgtgactgggtggacgggctggcgctgcgcggcctcgctgatcgctgcccggccctggaggagctggatctcaccgcctgccgccagctcaaggacgaggccatcgtgtacctggcgcagaggcgcggcgctggtctccgcagcctctctctggccgtcaacgccaacgtgggggacgccgcggttcaagagttggctcggaactgcccagaactccaccaccttgacctcaccggctgcctccgcgtcggaagcgacggtgtcaggacattggccgagtactgccccgtgctgcgttcgctgcgggtgcggcactgccaccatgtggcggagtccagcctgagccgcttgcggaagcgcggcgtggacatcgacgtggagccgccgctgcaccaggccctggtgctgctgcaggatatggcgggcttcgcaccttttgtcaacctgcaggtctgacccgcctgccaatcggagcacagctggactgtgtggctggggcctgacactgagctgtagggaaactgaactgtgaggacctctggtgagaggccagtgccctgccccaccctggagcttcaaataaagagctttttaccccc

SEQ ID NO: 1720 - DNA, 3748 bp, Homo sapiens
  source 1..3748: mol_type = genomic DNA
ttcctgagtcgtgctgcgtcgacaacggtagtgacgcgtattgcctggaggatggcggacgccggcattcgccgcgtggttcccagcgacctgtatcccctcgtgctcggcttcctgcgcgataaccaactctcagaggtggccaataagttcgccaaagcgacaggagctacacagcaggatgccaatgcctcttccctcttagacatctatagcttctggctcaagtctgccaaggtcccagagcgaaagttacaggcaaatggaccagtggctaagaaagctaagaagaaggcctcatccagtgacagtgaggacagcagcgaggaggaggaggaagttcaagggcctccagcaaagaaggctgctgtacctgccaagcgagtcggtctgcctcctgggaaggctgcagccaaagcatcagagagtagcagcagtgaagagtccagtgatgatgatgatgaggaggaccaaaagaaacagcctgtccagaagggagttaagccccaagccaaggcagccaaagctcctcctaagaaggccaagagctctgattctgattctgactcaagctccgaggatgagccaccaaagaaccagaagccaaagataacacctgtgacagttaaagctcagactaaagcccctcccaaaccagctcgagcagcacctaaaatagccaatggtaaagcagccagtagcagcagtagcagcagcagcagcagtagcagtgatgactcagaggaggagaaggcagcagccacccccaagaagactgtacctaaaaagcaagttgtggccaaggccccagtgaaagcagctaccacccctacccggaagagttctagcagtgaggattcctccagtgacgaggaagaggagcaaaaaaaacccatgaaaaataaaccaggtccctacagttcagtccccccgccttctgctcccccaccaaagaagtctctgggaacccagcctcccaagaaggctgtggagaagcagcagcctgtggaaagcagtgaagacagcagtgatgagtctgattcaagttctgaagaagagaagaaacccccaactaaggcagtagtctctaaagcaaccactaaaccacctccagcaaagaaagcagcagagagctcttcagacagctcagactctgacagctctgaggatgatgaagctccttctaagccagctggtaccaccaagaattcttcaaataagccagctgtcaccaccaagtcacctgcagtgaagccagctgcagcccccaagcaacctgtgggcggtggccagaagcttctgacgagaaaggctgacagcagctccagtgaggaagagagcagctccagtgaggaggagaagacaaagaagatggtggccaccactaagcccaaggcgactgccaaagcagctctatctctgcctgccaagcaggctcctcagggtagtagggacagcagctctgattcagacagctccagcagtgaggaggaggaagagaagacatctaagtctgcagttaagaagaagccacagaaggtagcaggaggtgcagccccttccaagccagcctctgcaaagaaaggaaaggctgagagcagcaacagttcttcttctgatgactccagtgaggaagaggaagagaagctcaagggcaagggctctccaagaccacaagcccccaaggccaatggcacctctgcactgactgcccagaatggaaaagcagctaagaacagtgaggaggaggaagaagaaaagaaaaaggcggcagtggtagtttccaaatcaggttcattaaagaagcggaagcagaatgaggctgccaaggaggcagagactcctcaggccaagaagataaagcttcagacccctaacacatttccaaaaaggaagaaaggagaaaaaagggcatcatccccattccgaagggtcagggaggaggaaattgaggtggattcacgagttgcggacaactcctttgatgccaagcgaggtgcagccggagactggggagagcgagccaatcaggttttgaagttcaccaaaggcaagtcctttcggcatgagaaaaccaagaagaagcggggcagctaccggggaggctcaatctctgtccaggtcaattctattaagtttgacagcgagtgacctgaggccatcttcggtgaagcaagggtgatgatcggagactacttactttctccagtggacctgggaaccctcaggtctctaggtgagggtcttgatgaggacagaagtttagagtaggtcctaagactttacagtgtaacatcctctctggtccttttctgtgttcctagttttgtacagacttgtttttgagtgttgagtagcagggacaaaataagggaatgttattttttaagaaaattcattttcattgttgtctccttccttttctgtgaaagtcctcatactgagaaatttgtatattttatattaaatcacttactattgatttttgttgtgattttcaaaggtggattcccacagataaaatcttggctattgcccaaaacatagtaaagggtcacgtgtgactttttataataggaagaaaattctgcctttgtgagtgcacatgtccacatttcatccctccttccctcaaaaccctagagaggggcattaaagaattgttgatgtatatgcaatgtctgttaagcatgcactatgtatttcatcctcatttattgggtctgggactgaagtttttagccagcatggacctaacctactttttgggataaaattctctgttttgttacaggcaaaattctggtatggcgtgaatgccatgggtcattctgaatatatttttttctgtaattttatcattacacgatgtttgcaatacgtgctttgttttttaatttgaaagcaaacttttctactgttgaaagacattttttgacaacttgacccttcctagtattgagttctaagttgaggactgcatcttctcgttttttacagtatagagaacaaaatgacatgagtttgaaaaatacatatcacttggtattgctgtcttggttgcagtggtgatacagaattggtttcattaattcctacatggttgagaatcactgatcaagaaagtggggggaaaaaaaacaaacgttaaaacctcaatcctcagtaggaaggtagattacattaggtgaaattataggtaatctatgtatgtgctaatggggttggaaagaaccttacagagcatattacctgataaactggagtgggtttgggagaacaaactaataggattattgtgtctcctagttggtacctgggagcaattgacatgcccccttcagaaccttaactgttagtagcagtggctgtaacaacacaaaccagtgaccagagataacagcttttaggccaagctggcctgacggtatggctgcaggaagtgactgagcagtagcggtactcagccagaccaagacggagagggaagagtccacagctttctggaagctaaggcattctggtggtagaaaagtgtgccccaagccttcatggacgagttataggtcttaagattagtctcctcttgtttggattccatacttgctaaataacctgataataacctggttttccatgtaactgcctctaggaagaaaatgtactgttcatgctgacacagatatttcagtctgcatggtaaaagttctaaatcttactacaaaataataaactggctggtttataa

SEQ ID NO: 1721 - DNA, 1717 bp, Homo sapiens
  source 1..1717: mol_type = genomic DNA
tccgcgacgagctttgttttttcggttgggcatgctgcttaccgcaggatgatggaagcgacggcccgtacaaagacagaagcgttggtttcactgagtcagtgctgattctctcaaatagagcttgaaggataaatcttcatttttgtttcaacaaaacttcgaaacaaaatggaagaaaataatctacagtgcagtagtgtggttgacggtaattttgaagaagttcccagggagacggcaattcagtttaaacctccactatacagacagcggtaccagttcgttaaaaatttagtggatcaacatgagcctaagaaggttgcagacctgggatgtggtgatacttcactcttaaggctgctaaaagtcaatccatgcattgaattgcttgttggagtagatattaatgaggataaattacgatggagaggggattcgttagctcctttcctgggggattttctgaaacctcgggatctgaatttgaccatcacattgtatcatggctccgttgtggagagagactctcgtttgcttggatttgacttgataacgtgtattgaattaatagaacatttggattcaggtgatctggccagatttcctgaagtggtatttgggtacctgtctccatccatgattgtcatcagcacaccaaactctgaattcaatcccctgtttccatcagtgaccttaagagattcagatcataaatttgagtggaccagaatggagtttcagacctgggctttatatgtggcaaatcgctatgattactctgtggagtttactggtgtcggggaaccaccagctggagctgagaatgttggatactgtacccagataggaatcttccggaaaaatggaggaaaggcaacagaatcatgtctttcagagcagcatgatcagcatgtttataaagctagacagggtctcactatgttgcccaggctggtcttgaacttccatcctcaagcaatcctcctgccccatcttcctaaaatgctgagattacaggtttttaccacctcatacccaagcttacagcaggaaaggttctttaaacttgtgttggttaatgaggtgtcccaacaagtggaaagcttaagagtgagccacctgccaaggcggaaagaacaggctggggaacggggtgataagcccaaagacattggtggctcaaaggcccctgtcccatgctttggaccagtcttcacagaggttgagaaggccaagatagagaactctcccacacccttctgtgttggagataaatttttcgtacctctgcagagactccttgcgtatcccaagttgaaccgcttatgtgctaatgaagagatgatgagatcagtcattgctgactcaattcctctgagcagtgatggttctgcagtggtggctgacctgcgtaattattttgatgaacagtttgagttttgaaccatgtttatttcctgaaatttcagggtctcagcgatagttgtgctcacttagaatttagttttttttgtgtaatcctaattcaagtaatgtttttaaagtttcactgcaaaagtctatgttccaagccattggacagacctgcttgagatatggccagactgcagtgagccctgagaaagatatgagggtttaaaacgggtgctttcctttgattttggacttttttgttttctcaagaataaagaagttggatgtggtaatatgttaa

SEQ ID NO: 1722 - DNA, 1874 bp, Homo sapiens
  source 1..1874: mol_type = genomic DNA
gtttttaggcctttgccacgcctcgggagcgccacgaactcaacagccgcccaagccgccttccggctcgcggtctgcggacgcgctcggagttgggggccttcgccaacagctgccgtaccgtgccgcgtcgcagccgcacgctagcggggtcaacggcgcggcaggcgcaggggtcctcgccaaggttcggaagaggaccttgaaaatggcttctgggcatgcgccacagcggccgttacgagacgcaaaaccgacgccttggaactgagagcctagagggacggagctcggcgcaccatgaggctcccggggcccaaggccgaccgtgagagcgcacgagctgagtcagtgctgattctctcaaatagagcttgaaggataaatcttcatttttgtttcaacaaaacttcgaaacaaaatggaagaaaataatctacagtgcagtagtgtggttgacggtaattttgaagaagttcccagggagacggcaattcagtttaaacctccactatacagacagcggtaccagttcgttaaaaatttagtggatcaacatgagcctaagaaggttgcagacctgggatgtggtgatacttcactcttaaggctgctaaaagtcaatccatgcattgaattgcttgttggagtagatattaatgaggataaattacgatggagaggggattcgttagctcctttcctgggggattttctgaaacctcgggatctgaatttgaccatcacattgtatcatggctccgttgtggagagagactctcgtttgcttggatttgacttgataacgtgtattgaattaatagaacatttggattcaggtgatctggccagatttcctgaagtggtatttgggtacctgtctccatccatgattgtcatcagcacaccaaactctgaattcaatcccctgtttccatcagtgaccttaagagattcagatcataaatttgagtggaccagaatggagtttcagacctgggctttatatgtggcaaatcgctatgattactctgtggagtttactggtgtcggggaaccaccagctggagctgagaatgttggatactgtacccagataggaatcttccggaaaaatggaggaaaggcaacagaatcatgtctttcagagcagcatgatcagcatgtttataaagctgtttttaccacctcatacccaagcttacagcaggaaaggttctttaaacttgtgttggttaatgaggtgtcccaacaagtggaaagcttaagagtgagccacctgccaaggcggaaagaacaggctggggaacggggtgataagcccaaagacattggtggctcaaaggcccctgtcccatgctttggaccagtcttcacagaggttgagaaggccaagatagagaactctcccacacccttctgtgttggagataaatttttcgtacctctgcagagactccttgcgtatcccaagttgaaccgcttatgtgctaatgaagagatgatgagatcagtcattgctgactcaattcctctgagcagtgatggttctgcagtggtggctgacctgcgtaattattttgatgaacagtttgagttttgaaccatgtttatttcctgaaatttcagggtctcagcgatagttgtgctcacttagaatttagttttttttgtgtaatcctaattcaagtaatgtttttaaagtttcactgcaaaagtctatgttccaagccattggacagacctgcttgagatatggccagactgcagtgagccctgagaaagatatgagggtttaaaacgggtgctttcctttgattttggacttttttgttttctcaagaataaagaagttggatgtggtaatatgttaa

SEQ ID NO: 1723 - DNA, 1753 bp, Homo sapiens
  source 1..1753: mol_type = genomic DNA
acaggagcagccgcccggggcaccggagctgcgggctgcgtggccgggatgagcgccagcacgggcggtggtggggacagcggcggcagcggcggcagtagcagcagctcacaggcctcctgcgggcccgagtcctcgggctccgaactagccctggccacaccggtgcctcagatgctgcagggccttctgggctccgacgacgaggaacaggaagaccccaaagactactgcaagggcggctaccaccctgtgaagatcggcgacgtgttcaatgggcggtaccacgtggtgcgcaaactgggctggggccacttctccaccgtctggctctgctgggacatccagcgcaagcgctttgtggccctcaaagtggtgaagagtgcggggcattacacggagacagctgtggatgagatcaagctcctgaaatgtgtccgggacagcgaccccagtgaccccaaaagagagaccattgtccagctcattgatgacttcaggatctcaggagtcaatggagtccatgtgtgcatggtgctggaggtgctgggccaccagctcctcaaatggatcatcaagtccaactaccagggcctgcccgtgccctgcgtgaagagcatcgtgaggcaggtgctgcacggcctggactacctccacaccaagtgcaagatcatccacacggacatcaagcccgagaacatcttgctgtgtgtgggggacgcttacatcaggcgcctggctgccgaggccacggagtggcaacaggcaggggcgccgcccccctcccgctccatagtcagcactgccccccaggaggtcttgaccggtaagctgtccaaaaacaagaggaagaagatgaggcgcaaacggaaacagcagaagcggctgctggaggagcggctgcgggacctgcagaggctggaggccatggaggctgccacccaggctgaggactctggcttgagactagacgggggcagcggctccacatcctcttcaggctgtcaccccgggggcgccagagcaggtccctccccagcctcttcctcccccgccccagggggcggccgtagcctcagcgcgggctcacagacctcaggcttctccggctccctcttctctcctgcctcctgctccatcctctccggctcgtccaatcagcgagagaccgggggcctcctgtcgcctagcacaccattcggtgcctcgaacctcctggtgaaccccctggagccccaaaatgcagataagatcaagatcaagatcgcagacctgggcaacgcctgctgggtgcacaagcacttcacggaagacatccagactcggcagtaccgggccgtcgaggtgctgatcggcgccgaatacggccccccggcagacatctggagcacagcctgcatggccttcgagctggccactggtgactacctgttcgagccgcattctggagaagactacagtcgtgatgaggaccacatcgctcacatagtggagcttctgggggacatccccccagccttcgccctctcaggccgctattcccgggagttcttcaaccggagaggagagctgcggcacatccacaatctcaagcactggggcctgtacgaggtactcatggaaaagtacgagtggcccctagagcaggccacacagttcagcgcctttctgctgcccatgatggagtacatccccgaaaagcgggccagtgccgctgactgcctccagcacccctggctcaacccctaggccc

SEQ ID NO: 1724 - DNA, 538 bp, Homo sapiens
  source 1..538: mol_type = genomic DNA
gaactactgggcgggagccaacgtctcttctttctcccgctctggcggaggctttgtcgctgcgggctgggccccagggtgtcccccatggcggggccgcgggtggaggtcgatggcagcatcatggaagggggcggccagatcctgagagtctctacggccttgagctgtctcctaggcctccccttgcgggtgcagaagatccgagccggccggagcacgccaggcctgaggtaaatctggctggagggggagttgggccgtgaagctgggggatcggggggtcgggctgccgggctggggcatcgggagtccgagtggtggaacccagaaggtcccagacgcaggtatgggcgatccagggcggggcactctgcctgggcggtggcctgggttgtaaagtcttgaaagcctggaggggtgagtttagaaatggtctcgagttttctctgtttgactaaatagtgtcatttgctgaagagctagcttttaaaatgttttctcacctcaccgggcattccaaatatccgaacagcac

SEQ ID NO: 1725 - DNA, 2535 bp, Homo sapiens
  source 1..2535: mol_type = genomic DNA
gctgactccagtgtcccgagaggcgccgcttcttccgctttctcgtcaggctcctgcgccccaggcatgaaccaaggtttctgaactactgggcgggagccaacgtctcttctttctcccgctctggcggaggctttgtcgctgcgggctgggccccagggtgtcccccatggcggggccgcgggtggaggtcgatggcagcatcatggaagggggcggccagatcctgagagtctctacggccttgagctgtctcctaggcctccccttgcgggtgcagaagatccgagccggccggagcacgccaggcctgaggcctcaacatttatctggactggaaatgattcgagatttgtgtgatgggcaactggagggggcagaaattggctcaacagaaataacctttacaccagagaagatcaaaggtggaatccacacagcagataccaagacagcagggagtgtgtgcctcttgatgcaggtctcaatgccgtgtgttctctttgctgcttctccatcagaacttcatttgaaaggtggaactaatgctgaaatggcaccacagatcgattatacagtgatggtcttcaagccaattgttgaaaaatttggtttcatatttaattgtgacattaaaacaaggggatattacccaaaagggggtggtgaagtgattgttcgaatgtcaccagttaaacaattgaaccctataaatttaactgagcgtggctgtgtgactaagatatatggaagagctttcgttgctggtgttttgccatttaaagtagcaaaagatatggcagcggcagcagttagatgcatcagaaaggagatccgggatttgtatgttaacatccagcctgttcaagaacctaaagaccaagcatttggcaatggaaatggaataataattattgctgagacctccactggctgtttgtttgctggatcatcgcttggtaaacgaggtgtaaatgcagacaaagttggaattgaagctgccgaaatgctattagcaaatcttagacatggtggtactgtggatgagtatctgcaagaccagctgattgttttcatggcattagccaatggagtttccagaataaaaacaggaccagttacactccatacgcaaaccgcgatacattttgctgaacaaatagcaaaggctaaatttattgtgaagaaatcagaagatgaagaagacgccgctaaagatacttatattattgaatgccaaggaattgggatgacaaatccaaatctatagagtatttgcctcttaaatgatacctcattgatatattgcactatttcataaatactataaaataatgactaggaagtaacttattaaaggctatgacttaaatttgaagatgaagtacagtgttctaggtttgctgagaaggcttcattaaattaatctcactttgaatatctcctgagagatggacaatgaaatatcagttggtggatatgtgtgatagctgatttcaatattgaagtattgaaataaaatattctttacacctgaagtaaatacatttttcttttttatgtaattaattaaatcagggatatagatttgatctgtaatttgggtataattctaatctttgctgaaatcacatctcaagtataatgaggcaactttatgcaaatgtacttgttgtgacaacaataacattttccttttttttttttttttttgagacagtctcgttctgtcacccaggctggggtgctgtggtgtgatcttggctcactgcaacctctgcctcccgggttcaagcaattctactgcctcagcttcctgagtagttggtattacaccaccatgcccagctaatttttgtatttttagtagagacagggtttcaccatattggtcaggctggtttcgaactcctgacctcgtgatctgcccgcctcggcctcccaaagtggtgggattacaggcgtgagccagtgcacccggcaacaataacatttaataggcattgtctcattctaatgatatataccttctacctagtgggcactttgtacatatttattttttattttatttattcattttttttgagacagagtctcactctgtcaccaagttggagtgcagtggcacaatctcagctcactgcaacctccgccttccaggttgaagtgattctccagcctcagcctcccgagtagctgggactccaggcacgtaccaccatacccagataatttttgcatttttagtagagacggggtttcaccatgttggctaggatggtctccatctcctgacctcgtgatccgcccaccttggcctcccaaagtgctgggattacaggcatgagccaccacagctggtcgtaaatattttttgaatttgaatctgttttggaagccaaatatgttttggaagccaaacaattaagagaagtaaaattttaaccctagtaggtttcgcagattcatccccagatatgtttttgtttggcttgtgttattaacaaataaatgagtgtctttcaaatggaa

SEQ ID NO: 1726 - DNA, 2289 bp, Homo sapiens
  source 1..2289: mol_type = genomic DNA
cgcttcccgccgcccgagcttcggaaacttcccggccgcgacgcagggaaccggcgcggagaaccgagcagagcggagcgcccgtggtccagcgtgtagggagccgatcgcccatggagggtctgggccgctcgtgcctgtggctgcgtcgggagctgtcgcccccgcggccgcggctcctgctcctggactgccgcagccgcgagctgtacgagtcggcgcgcatcggtggggcgctgagcgtggccctgccggcgctcctgctgcgccgcctgcggaggggcagcctgtcggtgcgcgcgctcctgcctgggccgccgctgcagccgcccccgcctgcccccgtgctcctgtacgaccagggcgggggccggcgccggcgcggggaggccgaggccgaggccgaggagtgggaggccgagtcggtgctgggcaccctgctgcagaagctgcgagaggaaggctacctggcctactacctccagggaggcttcagcagattccaggccgagtgccctcacctgtgtgagaccagccttgctggccgtgccggctccagcatggcgccggtgcccggtccagtgcccgtggtggggttgggcagcctgtgcctgggctccgactgctctgatgcggaatccgaggctgaccgcgactccatgagctgtggcctggattcggagggtgccacacccccaccagtggggctgcgggcatccttccctgtccagatcctgcccaacctctatctgggcagtgcccgggattccgccaatttggagagcctggccaaactgggcatccgctacatcctcaatgtcacccccaacctcccaaacttcttcgagaagaatggtgactttcactacaagcagatccccatctccgaccactggagccagaacctgtcgcggttctttccggaggccattgagttcattgatgaggccttgtcccagaactgcggggtgctcgtccactgcttggcgggggtcagccgttctgtcaccgtcactgtggcctacctcatgcagaagctccacctctctctcaacgatgcctatgacctggtcaagaggaagaagtctaacatctcccccaacttcaacttcatggggcagttgctggactttgagcgcagcttgcggctggaggagcgccactcgcaggagcagggcagtggggggcaggcatctgcggcctccaacccgccctccttcttcaccacccccaccagtgatggcgccttcgagctggcccccacctagggccccgtggccggcaggccggcccctgccccacccccacccacgggtgtccctgcccactcgtgtggcaagggaggggagggcaggagggctcggcctgagcagggtgctggggggagagcgcaatacctcacgcgggctgccgtcctaatcaacgtgcctatggcgggaccacgctcggagcctgcctcttctgcgactgttactttttctttgcgggatgggggtgggggttccctctccaggtggttgtccaggcccatgtcccggccctgggtgctcagccagctcggctaggccctgcgcctccctgcgcttcccccttcaggaagggtgtgtgccacctcgttgcactggatcccagtggctgcttgggggagaggcgtttgccatcactggtgttgtcacctccctgtttctccaccaagggcttgggcctctcggggctggggcctcccaggggatggggacccagagtgcagtggccgcccacatccatggcctaggagctactgggcaggttcccggccacacatctggtgggctgttttgttttttttttttcctcttcccccagatgtcttgacgggatcactggggctctttgtgagtgagggtggccaaactaccgccggaggagatggggtctcagagcgagagctgcggagggggaggggaagaagaaggcctcacttttgctgctgcggggcccacacagccgctgctactttggggggtggggaaggggccaagctgcagacacacacagtcattcatttctgtccacacccctgtgggtggcgggtgtgcgtgtgtgtgcttgtgtgtgcgcacgtgtcggcgctcacacacacatgctagcccactgatgcacccagcccagggctggcagtctttgcagcgtggggccgtctcaccctggagcctggagaggatctatgcttgtttgtttttgtaatccatatcatagttgctttctttaattgttccttctgaataaacagtttatttaagatactga

SEQ ID NO: 1727 - DNA, 1235 bp, Homo sapiens
  source 1..1235: mol_type = genomic DNA
agtgctgctcctggccggtggaggcggcggctgcggcagcggaaggggaagcgctgaggcggtggggcccacagccatggcggagcctgtgcaggaggagctctcggtcctggccgcgattttctgcaggccccacgagtgggaggtgctgagccgctcagagacagatgggaccgtgttcagaattcacacaaaagctgaaggatttatggatgtggatatacctctggaattggtgttccatttgccagtcaattatccttcatgtctacctggtatctcgattaactctgaacagttgaccagggcccagtgtgtgactgtgaaagagaatttacttgagcaagcagagagccttttgtcggagcctatggttcatgagctggttctctggattcagcagaatctcaggcatatcctcagccaaccagaaactggcagtggcagtgaaaagtgtactttttcaacaagcacgaccatggatgatggattgtggataactcttttgcatttagatcacatgagagcaaagactaaatatgtcaaaattgtggagaagtgggcttcagatttaaggctgacaggaagactgatgttcatgggtaaaataatactgattttactacagggagacagaaacaacctcaaggagtacttgattcttcagaaaacctccaaagtagatgtggactcaagtggaaagaaatgcaaagagaaaatgattagtgtactgtttgaaacaaaagtacagacagaacacaaaaggtttctggcatttgaagtcaaagagtattcagcgttggatgaattacaaaaggaatttgaaactgcaggacttaagaagcttttctccgaatttgtacttgctctggtaaaatgaaatggaagacaggaatcttttagtaaaatagcagtgttttttgttgtttttgcattggatttggggagtggttaattgaaatagtcaattttaaagtttctctgaagcaaaatgataggcatcattctaacttcaggaacaaaagccagttctgttttatgaaatattaaacatgaagaaaacttgtatattctaatgtttgccaggaaaggctaggttcagtagatgagacattatttaaaagataaatttaaaaagatggtaaatgaacacttgtttttatagacaatatttgtttgaaactatgtaattttctggctaattttcttgtaattaaatgattttttaaaaaaga

SEQ ID NO: 1728 - DNA, 5741 bp, Homo sapiens
  source 1..5741: mol_type = genomic DNA
gcggccgccgccgcgccgtggccctttgtgctggaacaatgaccagctgccgctggccccggggccccggctggggttgagggtgaccaccgccgccgccgcgtcgagccgaaccgagcccccagacacgcagtcacagggcgtcggagggagggctcccgactgccgccgagcagcccctacgtgcgccccggcggattcgcgtgacgcgggtgcttgcgcgtgtccgcgccccggggcggagacgcccctcggaccctcccctgcgcggtgccgcccactcgcaccgggcgggggctggccagggccgggggcgccgcggaggcggaggcggggctgggccgggcagctccgagtggcggcgcgcgggccagggccggggccggggccggggccggagccggagccggggccgggcggcgcgcctgtggagcgctgggggcggcctggggctgagcatggagcagcgcggcggaggtgaggggggccgggtctgggaggcggcctggggagcccccaacttatgcgcggtggaatccagccggggggacggcgttccccagtcgcccccactttctggaaggggggctggactctggagaatgggtcaggggctcctggcttcccgccgcagaatgggaactcgtgatcgcagacttgaccccgcttgactggtccttggagtttgggtgggagggagactttccccaactcttcagatccgtctccggccctgaaccagctccagccctctgctctcctcagcccactaaaaggggggtgctcctgggccagagtgattgctcagggagtgctggggagaatgaggggttcccatctcccacagccacaaacgcatttctcaaaatggagcctccacttgcccctccttctctttcgggctccaagagcgggagccggcctggctgggcctggctttccagactcctggctctggctccctggatgtgtggctctcagggcccggctctgtggcactttggacttatgggccctcggctccgtggggttggggggccctggctcactgggtcccgctggctgtccccttgtcggcctgaccctcgggcctctccgagtctttgtctcttttgggtccctgtctttctctgagcctgtctccttccttcaattttcactttctccgtgctcgctgaagtggggaaatgcaacagaggtgccagcccccttggccccctaagaagtcccttccccactgttcactccacaccctggagtgggcccagagaggggaggggagggggttctctatctgctctgctgggggctggggtgtgtggggtggtctgagccccagccctacagaggggcctgtggtcactccctgctcctggcctacccctcccccagctccccgcagctcctgccccagcgtggacacctcttcctggttcgcagtgtcttttgacttgggtgggaaggagggcggtggatttaatggagggcatgcgagaaagaaggggaacagatcaggcaaaggagttagataatgtcccacctctccccacacgccgaagagagaaggaaacaggctccccccaccaatgggccctcaagccacccaggctcccaccactctcatacctgcgtgcccacgttcacaggctccactgcaccactcaccttcctagtcacacacaaacacaggagctcacacataaactcatgaacttactgacaagtctgtccaggcaccgtctctcccacacaccacaaattcacttgttagatccacatttataactttcacaggctttctaatgacccctgatccacatactcttctaagatatacacatgtgaattcacacatgaactcatatgtatgtgaatgaactgatatatcaaacatgcatagactcacatgatgttttcacacacattttcatacacacgtgttcattttcatgctcctgtgcatgtagtcacacaacaaataactaaatgcacacactcctactcccagtgcaattctctgtccacttcttggccccgctctgcatgatgacttcagcagatgcctaagtcctggtcatcagcggcctcgggactgggactagggagggggttccgggtggaggcttgcagctgcttccaggaaggagcagagcctggggaggtggagccctcttgcctgggctctgtggaagtgaggttttggagcagcctccagaggtgaaggcagggcatctaccttcctcccctcagggttagtttggggaccttctgaagctgtagggtttcagagaggttggcagtggggcagagcctgtggaggctccttcaggccttcaggcctcaccgattgggtgtgcagaggctaggagttgtcatggaaactggtatgagcctgcatccacctctgggaggcaggagaccccaaaggacacctgtggactccctaagagccgcgggtttcttatttagccagatcgacagagaggcagtttagccgcctttctgtctgagagaaactgaggcccagcagagggaggcagggcactgcctggccttggctctttgttccctaattaccatctgaggtgctgattgcacccctgaggtacctctgcccaaactgccctgtaatgaggccacctggctgagaggaccagggacctgtgcttcaagctggtagagaaggcccctccctcacctgagtcctggcctctgtggaggatgcaggattgggcttgggcctgggtctttgctgccaggtggccctgcggtaatcatccaggcctcccatgcctctcagcatctctgctgagtgaattcactcctcagccctgttcagaccagcattgggcagtgtggtttggggcccagggggaattgagattcattccagcacttgaagggggagtcttggtggggatcagggcttgttactgatgtcaaggaggtgtttggtcaggatcagtgggtcaggaggggtctcaaggtggagggactctgacaccactgccctgcttacaggtcgcctgcgaggccgctggccaggcctgagcctctgccaccatggccattgtgcagactctgccagtgccactggagcctgctcctgaagctgccactgccccacaagctccagtcatgggtagtgtgagcagccttatctcaggccggccctgtcccggggggccagctcctccccgccaccacggccctcctgggcccaccttcttccgccagcaggatggcctgctacggggtggctatgaggcacaggagccgctgtgcccagctgtgccccctaggaaggctgtccctgtcaccagcttcacctacatcaatgaggacttccggacagagtcaccccccagcccaagcagtgatgttgaggatgcccgagagcagcgggcacacaatgcccacctccgcggcccaccaccaaagctcatccctgtctctggaaagctggagaagaacatggagaagatcctgatccgcccaacagccttcaagccagtgctgcccaaacctcgaggggctccgtccctgcctagcttcatgggtcctcgggccaccgggctgtctgggagccagggcagcctgacgcagctgtttgggggccctgcctcctcctcctcctcttcctcctcctcttcagctgctgacaaacccctggcatttagtggctgggccagtggctgcccatcagggacgctatccgactctggccgaaactcactgtccagcctgcccacctacagcaccggaggtgccgagccaaccaccagctccccaggcgggcacctgccttcccatggctctgggcgaggggcactgcctgggccagcccgaggggtccctactgggccctcccactcagacagtggccggtcctcctccagcaagagcacaggctccctagggggccgtgtggctggggggcttttgggcagtggtactcgggcctcccctgacagcagctcctgtggggagcgctcaccaccacccccgcctccacctccttcggatgaggccctgctgcactgtgtcctggaaggaaagctccgagaccgggaggcagagcttcagcagctgcgggacagtctggacgagaatgaggctaccatgtgccaggcatacgaggagcggcagcggcactggcagcgagagcgtgaggccctgcgagaggactgtgcggcccaggcacagcgggcacagcgggcccaacagctgctgcagctgcaggtgttccagctgcagcaggagaagcggcaattgcaggacgacttcgcacagctgctgcaggagcgcgaacagctggagcggcgctgcgccaccttggagcgggagcagcgggagctcgggccgaggcttgaggagaccaagtgggaggtgtgccagaaatcaggcgagatctccctgctgaagcagcagctgaaagagtctcaggcagagctggtgcagaagggcagcgagctggtggctctgcgggtggcgctgcgggaggcccgtgctacgctgcgggtcagtgagggccgtgcgcggggtctacaggaggccgcccgagctcgggagctggagctggaagcctgttcccaggagctgcagcgacaccgccaggaagctgagcagctgcgggagaaagctgggcagttggatgctgaggcggccggactccgggagccccctgtgccacctgccaccgctgacccattcctcctggcagagagtgatgaggccaaagtgcagcgggcagcagccggggttgggggcagcttgcgggcccaggtggagcgattgcgggtggagctgcagcgggagcggcggcggggtgaggagcagcgggacagctttgagggggagcggctggcctggcaggcagagaaggagcaggtgatccgctaccagaagcagctgcagcacaactacatccagatgtaccggcgcaaccggcagctagagcaggagctgcagcagctcagcctggagctggaggcccgggagctcgctgacctgggcctggccgagcaggccccctgcatctgcctggaggagatcactgctactgagatctagggccctcagcaaccagctctgtagggagctctgccagaggggcagcagctgcagatccacttaggccccagggtccacggatggccccaaaggctgagggccccaaagccacttgtctcctaggatccaggcctctgggcttctgccaagaactcagggtggccctatgacttggaggagcaagatcagaccgctcaaaggtccccgtgttcactgttacccagaggctcttgttactacccacttcattccccaccgctgccagtgccactgccaaccctgttcacaggcgcttccagcccactccagccaggggagcagggaagaagaaggggctccctcctcttcacattccccccgaccccaaagccagagaaagccagatggcaccagctgctccggatgtgcctgcccacattgggggacagggccgggcctgggctcggttcccaggtttgagctctgcagcctctctcctggagtgagggggctgaagtcagaccaaaggaagaactcagaaatgtcttgtttatttgtgtttgtgaccaagcagcctctcccttcacccaggtttatggcctcgttttcacttgtatatttttcacactgtaaatttcttgtacaaacccaaagaaaaaattaaaaaaaatttttttgtttaaaaataa

SEQ ID NO: 1729 - DNA, 2883 bp, Homo sapiens
  source 1..2883: mol_type = genomic DNA
ccaggtcgggccaggcgggcgccgggagctgggagccgggagcccagagttcggaacctagagttcggagccggctagggagccggcgttgtcgcggcgaggaggtgggcgcgctggagcaggagcggggccggaactggagccgaggcgcaggtggcgctgggtcgcctgcgaggccgctggccaggcctgagcctctgccaccatggccattgtgcagactctgccagtgccactggagcctgctcctgaagctgccactgccccacaagctccagtcatgggtagtgtgagcagccttatctcaggccggccctgtcccggggggccagctcctccccgccaccacggccctcctgggcccaccttcttccgccagcaggatggcctgctacggggtggctatgaggcacaggagccgctgtgcccagctgtgccccctaggaaggctgtccctgtcaccagcttcacctacatcaatgaggacttccggacagagtcaccccccagcccaagcagtgatgttgaggatgcccgagagcagcgggcacacaatgcccacctccgcggcccaccaccaaagctcatccctgtctctggaaagctggagaagaacatggagaagatcctgatccgcccaacagccttcaagccagtgctgcccaaacctcgaggggctccgtccctgcctagcttcatgggtcctcgggccaccgggctgtctgggagccagggcagcctgacgcagctgtttgggggccctgcctcctcctcctcctcttcctcctcctcttcagctgctgacaaacccctggcatttagtggctgggccagtggctgcccatcagggacgctatccgactctggccgaaactcactgtccagcctgcccacctacagcaccggaggtgccgagccaaccaccagctccccaggcgggcacctgccttcccatggctctgggcgaggggcactgcctgggccagcccgaggggtccctactgggccctcccactcagacagtggccggtcctcctccagcaagagcacaggctccctagggggccgtgtggctggggggcttttgggcagtggtactcgggcctcccctgacagcagctcctgtggggagcgctcaccaccacccccgcctccacctccttcggatgaggccctgctgcactgtgtcctggaaggaaagctccgagaccgggaggcagagcttcagcagctgcgggacagtctggacgagaatgaggctaccatgtgccaggcatacgaggagcggcagcggcactggcagcgagagcgtgaggccctgcgagaggactgtgcggcccaggcacagcgggcacagcgggcccaacagctgctgcagctgcaggtgttccagctgcagcaggagaagcggcaattgcaggacgacttcgcacagctgctgcaggagcgcgaacagctggagcggcgctgcgccaccttggagcgggagcagcgggagctcgggccgaggcttgaggagaccaagtgggaggtgtgccagaaatcaggcgagatctccctgctgaagcagcagctgaaagagtctcaggcagagctggtgcagaagggcagcgagctggtggctctgcgggtggcgctgcgggaggcccgtgctacgctgcgggtcagtgagggccgtgcgcggggtctacaggaggccgcccgagctcgggagctggagctggaagcctgttcccaggagctgcagcgacaccgccaggaagctgagcagctgcgggagaaagctgggcagttggatgctgaggcggccggactccgggagccccctgtgccacctgccaccgctgacccattcctcctggcagagagtgatgaggccaaagtgcagcgggcagcagccggggttgggggcagcttgcgggcccaggtggagcgattgcgggtggagctgcagcgggagcggcggcggggtgaggagcagcgggacagctttgagggggagcggctggcctggcaggcagagaaggagcaggtgatccgctaccagaagcagctgcagcacaactacatccagatgtaccggcgcaaccggcagctagagcaggagctgcagcagctcagcctggagctggaggcccgggagctcgctgacctgggcctggccgagcaggccccctgcatctgcctggaggagatcactgctactgagatctagggccctcagcaaccagctctgtagggagctctgccagaggggcagcagctgcagatccacttaggccccagggtccacggatggccccaaaggctgagggccccaaagccacttgtctcctaggatccaggcctctgggcttctgccaagaactcagggtggccctatgacttggaggagcaagatcagaccgctcaaaggtccccgtgttcactgttacccagaggctcttgttactacccacttcattccccaccgctgccagtgccactgccaaccctgttcacaggcgcttccagcccactccagccaggggagcagggaagaagaaggggctccctcctcttcacattccccccgaccccaaagccagagaaagccagatggcaccagctgctccggatgtgcctgcccacattgggggacagggccgggcctgggctcggttcccaggtttgagctctgcagcctctctcctggagtgagggggctgaagtcagaccaaaggaagaactcagaaatgtcttgtttatttgtgtttgtgaccaagcagcctctcccttcacccaggtttatggcctcgttttcacttgtatatttttcacactgtaaatttcttgtacaaacccaaagaaaaaattaaaaaaaatttttttgtttaaaaataa

SEQ ID NO: 1730 - DNA, 1375 bp, Homo sapiens
  source 1..1375: mol_type = genomic DNA
agtgtctcgggctcggcgcccgcggagcgtgtttccgacggtgccctgccggggtccgcgccgctttggtcctccgcagccgccgtccacagcgcccggctccgcgcgagagccctgccagaggagcggctccggccgccgcgcctgacccttgtccggggtcttccgcacagtgggctgagggccatgtcagttttctgccacctacaggatagaccatgaagctgaaggaacttgagcggccagctgtccaggcatggagcccagccagccaataccctttgtatctggccacaggaacatctgcccaacagctagattcctccttcagcacaaatggcacattggaaatatttgaggttgatttcagggacccttctctggacttgaaacacagaggagtcctttctgccttgagcaggtttcacaagctggtctgggggagctttggcagtgggcttctggaaagctccggggttattgttggcggcggggacaatggcatgcttattctatacaatgtgacccacatcctgtcttcggggaaggagcctgtgattgctcagaaacagaagcacacgggggctgtcagagccctcgacttgaatcctttccagggcaacctcctggcttcaggggccagcgattctgaaatcttcatttgggatctgaataacttgaatgtgccaatgaccctgggatccaagtcacagtatcatgagcagcctccagaggacatcaaggcactgtcttggaaccggcaagcccaacacattctgtcttctgctcaccccagtggcaaggcagttgtgtgggatctcaggaagaatgaacctatcatcaaagtcagtgatcacagcaacaggatgcactgctcaggcctggcctggcatcctgacatagccacccagttagtgctgtgctcagaggatgatcgacttcccgtgattcagctgtgggacttgcgctttgcctcctcgcccttgaaggtgctggagagccacagcagggggatcttgtcagtgtcatggagccaggctgatgctgagctgctgctcactagtgctaaggacagccagatcttgtgccggaacctggggagcagtgaggtggtatataagctaccaacacagagcagctggtgctttgatgtgcagtggtgccctcgggacccttcagtgttctctgctgcctccttcaacggctggatcagtttgtactctgtgatgggtaggagctgggaagtccagcatatgagacaggctgacaaggtttgaagggcttggtagagaatgctggagggaaggggctgtctctgtttgtgggagagagacatatggcttgagaagcggagatattggagattgggagacca

SEQ ID NO: 1731 - DNA, 4612 bp, Homo sapiens
  source 1..4612: mol_type = genomic DNA
gaggagcggctccggccgccgcgcctgacccttgtccggggtcttccgcacagtgggctgagggccatgtcagttttctgccacctacaggatagaccatgaagctgaaggaacttgagcggccagctgtccaggcatggagcccagccagccaataccctttgtatctggccacaggaacatctgcccaacagctagattcctccttcagcacaaatggcacattggaaatatttgaggttgatttcagggacccttctctggacttgaaacacagaggagtcctttctgccttgagcaggtttcacaagctggtctgggggagctttggcagtgggcttctggaaagctccggggttattgttggcggcggggacaatggcatgcttattctatacaatgtgacccacatcctgtcttcggggaaggagcctgtgattgctcagaaacagaagcacacgggggctgtcagagccctcgacttgaatcctttccagggcaacctcctggcttcaggggccagcgattctgaaatcttcatttgggatctgaataacttgaatgtgccaatgaccctgggatccaagtcacagcagcctccagaggacatcaaggcactgtcttggaaccggcaagcccaacacattctgtcttctgctcaccccagtggcaaggcagttgtgtgggatctcaggaagaatgaacctatcatcaaagtcagtgatcacagcaacaggatgcactgctcaggcctggcctggcatcctgacatagccacccagttagtgctgtgctcagaggatgatcgacttcccgtgattcagctgtgggacttgcgctttgcctcctcgcccttgaaggtgctggagagccacagcagggggatcttgtcagtgtcatggagccaggctgatgctgagctgctgctcactagtgctaaggacagccagatcttgtgccggaacctggggagcagtgaggtggtatataagctaccaacacagagcagctggtgctttgatgtgcagtggtgccctcgggacccttcagtgttctctgctgcctccttcaacggctggatcagtttgtactctgtgatgggtaggagctgggaagtccagcatatgagacaggctgacaagatctcctcttccttcagcaaaggccagcctctcccaccactgcaggtgccagagcaagtggcacaagcaccactgatacctcccctgaaaaaaccccccaaatggattagaagaccaacaggtgtttcatttgcttttggagggaagctggttacttttggcctccccagcacccctgcccatctggtgccacagccttgcccccgcctagtcttcatcagtcaagtcaccacagaatctgaattcctgatgcgatcagctgagctgcaggaggccttgggatcaggaaatctactgaattactgtcagaacaagagccagcaagctttactgcaaagtgaaaagatgctgtggcagttcctgaaggtgaccttagagcaagactccagaatgaaattcctaaagcttttaggatacagtaaagatgagcttcagaagaaggtggccacatggttgaagagtgacgtggggctaggtgagagtcctcagcccaagggaaatgacctcaacagtgacagacaacaggccttctgcagccaggcctccaaacacaccacaaaggaagcctctgcttcctcagccttctttgatgagctggtccctcagaacatgactccttgggagatccccatcacaaaagatattgatggactcctaagccaggctctcctgcttggggaactgggtccggccgtggagctgtgtctgaaggaggagcgctttgctgatgccattatcctggcccaggctgggggtacagatctgctgaagcaaacacaggagcgctacttggccaagaagaaaaccaaaatctcctcgcttctagcctgtgttgtgcaaaagaattggaaggatgtggtgtgtacctgtagcctgaagaactggagagaggcactggctttgctactgacatactcaggcacagagaaatttcccgagctctgtgacatgctgggaactcgcatggaacaggagggcagcagggcactaacctccgaagccagactctgttatgtgtgctcagggagtgtggagcggctggtggagtgctgggcaaaatgccaccaggctttgtcccccatggctctgcaggacctgatggagaaggtgatggttcttaacaggagcttggagcaactgcggggtcctcatggggtgagcccaggccctgccacaacctacagggtcactcagtatgccaacctcctggcagcccagggcagcctggccactgccatgagctttctacccagggactgtgctcagccaccagttcagcagctaagagatcggctttttcatgctcaaggttctgctgtcttgggccaacagtctccccctttccccttcccccggattgttgtgggagctaccctccactctaaagagacatcatcttacagattgggatcccagccttctcaccaggtcccaactccatctccaaggccaagggttttcacccctcagtcatcaccagcgatgcccttggcaccttcccatcctagcccttatcagggtcccaggacacagaatataagtgactacagggcacctgggccccaggccatccagcctttgcctttgagccctggggtaaggcctgcttcatctcagccacagctattaggagggcaaagggtgcaagttcctaacccggtgggattccctgggacatggcctcttcctggttcccctctacccatggcatgcccaggcatcatgcgacctggctctacctccctgcctgagactcctagactgttccctctgcttcctctgagaccactaggtcccggccgcatggtctcccacaccccagcccctcctgcaagcttccctgtgccataccttccaggggacccaggtgccccatgctctagtgtcctcccaaccactggcatcttgactcctcacccaggacctcaagattcctggaaagaagccccagcccccaggggaaacctccagaggaacaagctgccagagacatttatgcccccagcaccaattactgctccagttatgagcctcacccctgagctacaagggattcttccctcacagccccctgtctccagtgtgagtcatgctcccccaggagttccaggagaactcagcctgcagcttcagcacctgccacctgagaagatggaaaggaaggagctgcccccagagcatcagtccttgaagagcagctttgaggcgcttctccaacgctgctccctgtctgcaactgacttaaagacaaaaaggaagctggaagaggcagcccagcgtctggagtatctatatgagaagctctgtgaggggacactctcacctcatgtcgtggctgggctccatgaggttgcccgatgtgtggatgcaggaagctttgagcagggccttgcagtgcatgcccaggtggcgggctgtagcagcttcagcgaggtgtccagcttcatgcctatcctgaaggctgtcctcatcatcgctcataagctgctggtctaaaccaggcagcctctcttgctaggaggccacttctgctgttacataactcctccctgcagaagaggggacttctgcaacagattctgtttctttttcccgactcttttccttgctgccaggtatgtgatgctgtaggcttggctccaaaccagctgagtgcctgctttttactcctttatgtctggccttctaggatctgtccaagacactctcaggcctggaggcagggcatagaatcagttcttcactctccctaatactacactctgtaaggacctggggcaggatatcttctcccccagggatcttctatttaagtggcttctgagagggtgaacaggattgttacttttaagcctacctctgctgtgacccatcatgtgggtcttttgtttctcccttctgtggtttatgagcctgcccttaccttttccctgcctctgacttggtatttccaggtccgtatttctctgtagcccagggtctggggtagagctgactgctgttcaccctttgaacaactcatggacgtgagggatgggtgctgagcagaaccaagagaggaaactttggcgctgttaaaatggaatttctcatctgccggcattattaagggtgggctaggttggatggaaggtgaaagggatgaactgccttttgctggaagctgtcttaggctgtgagacaggagcaggggaaccacagcctatggggaactgcccttgactccacctatgttggagccttagcccaaggccattccttctgtgatgataaagcccagttctggaattggagccatattaaggaatgattctcttccagcgctgctcctcaagggttgggggtccttctccctcgcagccaccacatgtctcagggctaccttctccgattggatttgcatttgtggcactgtctttgatgcagtgatgtacttaatggtgcaataaagctgcttcgatttggtttcc

SEQ ID NO: 1732 - DNA, 2383 bp, Homo sapiens
  source 1..2383: mol_type = genomic DNA
gagcttactccacgggaacagcctctagataatctgagttgttgaaaatacgaagcctgttactcgtgaacagtggctgacaacagtgttgttgtgagcctggctgtctgcttggacccagaggtttcgtctgccagggtttttggttgtatttaggatttcagggaaaagtgtccaagctttcagtgttggagcaggtatggacgacaaaggcgacccgagcaatgaggaggcacctaaggccatcaaacccaccagcaaagagttcaggaaaacatggggttttcgaaggaccactatcgccaagcgagagggcgcaggggacgcggaggctgacccactggagccgccacccccacagcagcagctgggcctgtccctgcggcgcagtgggaggcagcccaagcgcactgagcgcgtggagcagttcctgaccattgcgcggcgccgcggcaggaggagcatgcctgtctccctggaggattctggtgagcccacgtcctgccccgccacagacgccgagacagcctccgagggcagcgtggaaagcgcttctgagaccagaagcggcccccagtctgcttccacagctgtgaaggaacgaccagcctcttctgaaaaggtgaaaggaggggatgaccacgatgacacctccgatagtgacagcgatggcctgaccttgaaagagcttcagaatcgccttcgcaggaagcgggaacaggagcccactgagaggcccctgaaagggatccagagtcgcctgcggaagaagcgccgggaggagggtcccgccgagactgtgggctccgaggccagtgacactgtggagggcgtcctgcccagtaagcaggagcccgagaacgatcagggggttgtgtcccaggctgggaaagatgacagagagagtaagttggagggaaaggcggctcaggacatcaaagatgaggagcctggagacttgggccgaccgaagcctgaatgtgagggttacgaccccaacgccctgtattgcatttgccgccagcctcacaacaacaggtttatgatttgctgtgaccgctgtgaagaatggtttcatggcgattgtgtgggcatttctgaggctcgagggaggcttttggaaaggaatggggaagactatatctgcccaaactgcaccattctgcaagtgcaggatgagactcattcagaaacggcagatcagcaggaagctaaatggagacctggagatgctgatggcaccgattgtacaagtataggaacaatagagcagaagtctagcgaagaccaagggataaagggtagaattgagaaagctgcaaatccaagtggcaagaagaaactcaagatcttccagcctgtgatagaggcgcctggtgcctcaaaatgtattggccccgggtgctgtcacgtggcgcagcccgactcggtgtactgcagtaatgactgtatcctcaaacacgccgcagcgacaatgaagtttctaagctcaggtaaagaacagaagccaaagcctaaagaaaagatgaagatgaagccagagaagcccagtcttccgaaatgcggtgctcaggcaggtattaaaatctcttctgtgcacaagagaccagctccagaaaaaaaagagaccacagtgaagaaggcagtggtggtccctgcgcggagtgaagcactcgggaaggaagcagcttgtgagagcagcacgccgtcgtgggcgagcgatcacaattacaatgcagtaaagccagaaaagactgctgctccctcgccgtcactgttgtataaatgctctggtaagtattcgtattctcttcatcccagtctgattgcatagccacactgcccggcacgccacatccacccctgtctgcacatgagttgttctgacaacagcgctgtatacgcttcagtttttccacattgtccacggccagcacatgaaagcatcacttcttttttatgttgtgggaatctttgcaagttagtgttgcatctgattttcaggtgtacatttatttttgactgggcagataggggatttttttttttccatgtccgattcacacgctacacacccacatgaacacattcgaacttcgaaggccacacactcctgcttcataggccccacggtaagtgagttcacacctagaacactgtcctgaccgcaggacgcgtgccttggacttggtattctacatgtgactggctttcttgccctcgtctcttgaatgtttagactcttaagatcatatcctgccccaaatttcaaattaatgaaatgaagatatttcaaacagatctttgaaacctcagattctgtggtgcaattttaatgttttcttgtttctcagttttctgctataaaactattttcaattca

SEQ ID NO: 1733 - DNA, 2704 bp, Homo sapiens
  source 1..2704: mol_type = genomic DNA
ggggaaatggctgcgagaccctagaggcctgcggagcttactccacgggaacagcctctagataatctgagttgttgaaaatacgaagcctgttactcgtgaacagtggctgacaacagtgttgttgtgagcctggctgtctgcttggacccagaggtttcgtctgccagggtttttggttgtatttaggatttcagggaaaagtgtccaagctttcagtgttggagcaggtatggacgacaaaggcgacccgagcaatgaggaggcacctaaggccatcaaacccaccagcaaagagttcaggaaaacatggggttttcgaaggaccactatcgccaagcgagagggcgcaggggacgcggaggctgacccactggagccgccacccccacagcagcagctgggcctgtccctgcggcgcagtgggaggcagcccaagcgcactgagcgcgtggagcagttcctgaccattgcgcggcgccgcggcaggaggagcatgcctgtctccctggaggattctggtgagcccacgtcctgccccgccacagacgccgagacagcctccgagggcagcgtggaaagcgcttctgagaccagaagcggcccccagtctgcttccacagctgtgaaggaacgaccagcctcttctgaaaaggtgaaaggaggggatgaccacgatgacacctccgatagtgacagcgatggcctgaccttgaaagagcttcagaatcgccttcgcaggaagcgggaacaggagcccactgagaggcccctgaaagggatccagagtcgcctgcggaagaagcgccgggaggagggtcccgccgagactgtgggctccgaggccagtgacactgtggagggcgtcctgcccagtaagcaggagcccgagaacgatcagggggttgtgtcccaggctgggaaagatgacagagagagtaagttggagggaaaggcggctcaggacatcaaagatgaggagcctggagacttgggccgaccgaagcctgaatgtgagggttacgaccccaacgccctgtattgcatttgccgccagcctcacaacaacaggtttatgatttgctgtgaccgctgtgaagaatggtttcatggcgattgtgtgggcatttctgaggctcgagggaggcttttggaaaggaatggggaagactatatctgcccaaactgcaccattctgcaagtgcaggatgagactcattcagaaacggcagatcagcaggaagctaaatggagacctggagatgctgatggcaccgattgtacaagtataggaacaatagagcagaagtctagcgaagaccaagggataaagggtagaattgagaaagctgcaaatccaagtggcaagaagaaactcaagatcttccagcctgtgatagaggcgcctggtgcctcaaaatgtattggccccgggtgctgtcacgtggcgcagcccgactcggtgtactgcagtaatgactgtatcctcaaacacgccgcagcgacaatgaagtttctaagctcaggtaaagaacagaagccaaagcctaaagaaaagatgaagatgaagccagagaagcccagtcttccgaaatgcggtgctcaggcaggtattaaaatctcttctgtgcacaagagaccagctccagaaaaaaaagagaccacagtgaagaaggcagtggtggtccctgcgcggagtgaagcactcgggaaggaagcagcttgtgagagcagcacgccgtcgtgggcgagcgatcacaattacaatgcagtaaagccagaaaagactgctgctccctcgccgtcactgttgtataaatgtatgtatcacctaggggttggcctcctggacccctcccgttctttctggatagccatcccctgggcctgtccaggactgggagttgcagctttgtgttaagctgatcacagacaccggctgcaccatcagcgggaagcagagcccatgtccaggatgcctcctgctgccctgtgtccatccctagtctgtcaggacttcctgtcactgttttccaaagctgtaaacctcactggtgaacgttcaccttaatgattgattctttaatctctgttttcactctcaggctctggtaagtattcgtattctcttcatcccagtctgattgcatagccacactgcccggcacgccacatccacccctgtctgcacatgagttgttctgacaacagcgctgtatacgcttcagtttttccacattgtccacggccagcacatgaaagcatcacttcttttttatgttgtgggaatctttgcaagttagtgttgcatctgattttcaggtgtacatttatttttgactgggcagataggggatttttttttttccatgtccgattcacacgctacacacccacatgaacacattcgaacttcgaaggccacacactcctgcttcataggccccacggtaagtgagttcacacctagaacactgtcctgaccgcaggacgcgtgccttggacttggtattctacatgtgactggctttcttgccctcgtctcttgaatgtttagactcttaagatcatatcctgccccaaatttcaaattaatgaaatgaagatatttcaaacagatctttgaaacctcagattctgtggtgcaattttaatgttttcttgtttctcagttttctgctataaaactattttcaattcagtc

SEQ ID NO: 1734 - DNA, 2833 bp, Homo sapiens
  source 1..2833: mol_type = genomic DNA
gtacttgcgcagaactcccctcgcggcgaccacgcactacgggttggcgccagagtcaaaaggcgtcggccctctggcaagatggctgctgcggaggcgttggagcgcggaaatctggaaccgggatggcgacgtctacactgagtcggaggcgaaggagcttactccacgggaacagcctctagataatctgagttgttgaaaatacgaagcctgttactcgtgaacagtggctgacaacagtgttgttgtgagcctggctgtctgcttggacccagaggtttcgtctgccagggtttttggttgtatttaggatttcagggaaaagtgtccaagctttcagtgttggagcaggtatggacgacaaaggcgacccgagcaatgaggaggcacctaaggccatcaaacccaccagcaaagagttcaggaaaacatggggttttcgaaggaccactatcgccaagcgagagggcgcaggggacgcggaggctgacccactggagccgccacccccacagcagcagctgggcctgtccctgcggcgcagtgggaggcagcccaagcgcactgagcgcgtggagcagttcctgaccattgcgcggcgccgcggcaggaggagcatgcctgtctccctggaggattctggtgagcccacgtcctgccccgccacagacgccgagacagcctccgagggcagcgtggaaagcgcttctgagaccagaagcggcccccagtctgcttccacagctgtgaaggaacgaccagcctcttctgaaaaggtgaaaggaggggatgaccacgatgacacctccgatagtgacagcgatggcctgaccttgaaagagcttcagaatcgccttcgcaggaagcgggaacaggagcccactgagaggcccctgaaagggatccagagtcgcctgcggaagaagcgccgggaggagggtcccgccgagactgtgggctccgaggccagtgacactgtggagggcgtcctgcccagtaagcaggagcccgagaacgatcagggggttgtgtcccaggctgggaaagatgacagagagagtaagttggagggaaaggcggctcaggacatcaaagatgaggagcctggagacttgggccgaccgaagcctgaatgtgagggttacgaccccaacgccctgtattgcatttgccgccagcctcacaacaacaggtttatgatttgctgtgaccgctgtgaagaatggtttcatggcgattgtgtgggcatttctgaggctcgagggaggcttttggaaaggaatggggaagactatatctgcccaaactgcaccattctgcaagtgcaggatgagactcattcagaaacggcagatcagcaggaagctaaatggagacctggagatgctgatggcaccgattgtacaagtataggaacaatagagcagaagtctagcgaagaccaagggataaagggtagaattgagaaagctgcaaatccaagtggcaagaagaaactcaagatcttccagcctgtgatagaggcgcctggtgcctcaaaatgtattggccccgggtgctgtcacgtggcgcagcccgactcggtgtactgcagtaatgactgtatcctcaaacacgccgcagcgacaatgaagtttctaagctcaggtaaagaacagaagccaaagcctaaagaaaagatgaagatgaagccagagaagcccagtcttccgaaatgcggtgctcaggcaggtattaaaatctcttctgtgcacaagagaccagctccagaaaaaaaagagaccacagtgaagaaggcagtggtggtccctgcgcggagtgaagcactcgggaaggaagcagcttgtgagagcagcacgccgtcgtgggcgagcgatcacaattacaatgcagtaaagccagaaaagactgctgctccctcgccgtcactgttgtataaatgtatgtatcacctaggggttggcctcctggacccctcccgttctttctggatagccatcccctgggcctgtccaggactgggagttgcagctttgtgttaagctgatcacagacaccggctgcaccatcagcgggaagcagagcccatgtccaggatgcctcctgctgccctgtgtccatccctagtctgtcaggacttcctgtcactgttttccaaagctgtaaacctcactggtgaacgttcaccttaatgattgattctttaatctctgttttcactctcaggctctggtaagtattcgtattctcttcatcccagtctgattgcatagccacactgcccggcacgccacatccacccctgtctgcacatgagttgttctgacaacagcgctgtatacgcttcagtttttccacattgtccacggccagcacatgaaagcatcacttcttttttatgttgtgggaatctttgcaagttagtgttgcatctgattttcaggtgtacatttatttttgactgggcagataggggatttttttttttccatgtccgattcacacgctacacacccacatgaacacattcgaacttcgaaggccacacactcctgcttcataggccccacggtaagtgagttcacacctagaacactgtcctgaccgcaggacgcgtgccttggacttggtattctacatgtgactggctttcttgccctcgtctcttgaatgtttagactcttaagatcatatcctgccccaaatttcaaattaatgaaatgaagatatttcaaacagatctttgaaacctcagattctgtggtgcaattttaatgttttcttgtttctcagttttctgctataaaactattttcaattcagtctttaa

SEQ ID NO: 1735 - DNA, 1963 bp, Homo sapiens
  source 1..1963: mol_type = genomic DNA
ctgcctccgactccccactggactgcatggcgacggcgtgtggtggggcagtcagctaagccatttgcctaaggggctgtcgggcatctgcgtgctggggaccgacagtgtgggtgtgttaggaggatctgtatggagcacattgctgcctctggctaggacagggtggaaagggtggcgtggctacagcctgacccatgggcaccgtcctaccctttgttctgtgcttccgagtgtcagtcatgtgctggggtctgtgggcccatgactcagacggtgagctctgaccttcctgagccagggctttgctgtagttgtgcctggctcaggagctctaggacaaggggaccgctccaggtctgcatctacggtgtggcagggcccctcggcactcttgtgcactagtgtcatctttcccattgaaatgactgtgaggaccagaatgtgcacatgcagatgggcagctacttgtctgccttggccctttattacacaacttgctgggggtggagatgccaccccccggcagtcagagcccctttatgatgtcatggggctggttacatgactgccaaggggtgctgctggccacactgcactagcaagtttgccagatggaggacaagcgatcattgagtatggctcgctgtgaagaaagaaattcgagaggacaggatcatggcttggaaagggtgcctttccctccccagttgcagtcagagacctaccttcacccagcagatccttcccctgcctgggacgacccggggtccactgggagccctaacttgaggctgctgacagaagaaatcgctttccaacctctggccgaggaagcttcgttcagaaggccgcaccctgacggtgacgtcccgccccagggagaagataatctcctctccctcccctttccacagaaactgtggagactggtcagcagcaaccagttttcgtccatctggtgggatgacagtggggcttgtagagtgatcaatcaaaaactctttgaaaaggagattctcaaaagggacgtcgcacacaaagtgtttgccacaacttcgataaagagcttcttccgccagctaaacttgtatggcttccgaaaacggcgtcaatgcactttcaggaccttcacccgcattttctccgcaaaaaggctggtctccatcttgaataagttagagttctactgccatccttactttcaaagagactcccctcacctcctcgtgaggatgaagagaagagtgggtgtcaagtctgcaccaagacatcaggaggaggacaagccagaagctgctggatcctgtctggcaccagcagacactgagcaacaagatcacacgtctccgaatgagaatgaccaggtcacaccgcaacaccgggaaccggccggtcccaacacccaaatcaggagtggctctgctccaccagcaactcctgtgatggtgcctgattccgccgtggcgagtgacaacagtccagtgacccagccggccggcgagtggtcagagggcagccaggctcacgtcactccggtggccgctgtccctgggcctgcagcgctgcccttcctctatgtccctggatctcccactcagatgaattcttacgggcctgtggtggcccttcccacagcgtcccgtagtacccttgccatggacaccacaggacttcctgcacctggcatgctgcccttttgccatctctgggtaccggtgaccctagtggctgctggggctgcacagcctgctgcctccatggtcatgttcccccatctcccagctctgcaccaccattgcccccacagccaccgcacgtcacagtacatgccagctagcgatgggccccaggcgtacccagactacgcagaccagagcacatagagggcagcatttgggcagaatatgtgctggtcaataaatgtgtcagaaaatgagtaattttctgactgcacaaaaaa

SEQ ID NO: 1736 - DNA, 4172 bp, Homo sapiens
  source 1..4172: mol_type = genomic DNA
atgccgaccctattcaaaggagtttggggggttgtggagcattccagagctctgggaagattctgtcccgcctgcttaccctcaggcccacacctccacacacagccagctctgggcactgcagaaatgacgctcctctcctcccagtcttcatcactggtggccccttctgggtctgtgtctgccgaaaatccagagcagaggatgctggagaagagagccaaggtcatagaagaacttcttcagacagaaagagactacattcgggatctggaaatgtgtattgagcggatcatggtacccatgcagcaggcacaggtaccaaacattgattttgagggactttttggaaatatgcagatggtgattaaggtctcgaagcaattattggctgctctggaaatcagcgatgctgtaggacctgtgtttcttggtcaccgggatgagcttgagggaacatacaagatttactgccagaatcatgatgaggccattgcgctgcttgaaatctacgagaaggatgagaagatccagaagcatcttcaggactccttggcagatctgaactctttagttctaaaaaagggatgcacaaattatattaacctgggctccttcctcatcaaaccagtacagagagtaatgcgttacccgctgttgctaatggagttgctgaattccaccccagaatcccacccagataaagtgcctttaaccaatgcagtccttgcggtcaaggaaatcaacgttaacattaatgaatataaacggcgaaaggacctggtcctcaagtaccgtaagggtgatgaagatagccttatggagaaaatttccaaactgaacatccactccatcatcaagaaatccaaccgagttagcagtcacctgaagcatctcactggctttgctcctcagataaaagatgaagtatttgaagaaacagaaaaaaacttccgaatgcaagaaagattgattaagtcttttatccgagacctgtctctctacctccagcacatccgggagtccgcatgtgtgaaagtggtggctgctgtgagcatgtgggatgtgtgcatggagagaggacaccgggacctggagcagtttgagagggtgcatcgctacatcagtgaccagctcttcacaaactttaaggagaggacagagcggcttgtcatctcccccttaaatcagttactgagcatgtttacagggccccataagctggtacagaaacgctttgacaagctcctggacttctataactgtacagaacgggcagaaaagctaaaggacaagaagaccctggaggagctgcagtcggcccggaacaactatgaggccctgaatgcacagctgctggatgagctgcccaagttccaccagtacgcccagggcctcttcaccaactgtgtccacggctatgctgaagcccactgtgactttgtgcaccaggctctggagcaattaaagccactgctttcgttactcaaagtggctggcagagagggaaaccttattgccatcttccacgaagagcacagcagagttctgcagcaactccaggtttttaccttcttcccggagtctcttccagctaccaagaagccatttgagaggaaaaccattgaccgccagtctgctcgaaagccactcctgggcctgccaagttacatgctacagtcagaagaactccgggcctccctcctggccaggtatccccctgaaaaactcttccaggcagaacggaacttcaatgctgctcaagacttggatgtctcacttttggaaggtgacctggtgggtgtgattaagaaaaaagaccccatgggcagccagaaccgctggctgattgacaatggagtcaccaaaggcttcgtgtacagctctttcctaaagccctacaatcctcgccgcagccactccgatgcctccgtgggtagccactcctccacagagtctgagcacggcagctcctcccccaggttcccacgccagaacagcggcagcaccctgaccttcaaccccagcagcatggctgtatcctttacctcggggtcttgccagaagcagcctcaagatgcatctcctccgccaaaagaatgtgaccaaggaactctcagtgcatccctaaatccgagtaattcagagagtagtccttccagatgcccttcagacccagactccacctcccagccaaggtcaggggactctgcagatgtagctagagatgtaaagcaacccactgccacgccgaggagctaccggaacttcaggcatccagaaatagttggctactccgtaccaggacgaaatgggcaaagtcaagacctcgtcaaaggatgtgcaagaacagcccaggctccggaagacagaagtacagagccagatggcagtgaggcagaaggcaaccaggtctattttgctgtctacaccttcaaggcacgaaacccaaatgagctgagcgtgtcagccaatcagaaactcaagatcctcgagtttaaagatgttacaggaaatacagagtggtggttagctgaggttaacgggaagaagggctacgttccctccaattatatccgcaaaaccgagtacacctgagcccacgttgcctgccacccagccttgctgcctttgctttcagtccgccgagggttctggcggcccaccgagagggcgcctgctcctgagacacaggccctgtctgcgttgcttaaccatggcatggtggagcacaccacagatcttgttctcctcgattgggttgtaaaccttgatgctcactagaatctctagaatttgaaatggaccctggggctttgcaaatgacttagtgactatgagaagagagacaagtcttagagctggcttttggaaaggagaaacttgcagtcagaagcccagtgtcctatgtatgcaggaagctgtgctctagcaatagacagtgttggtaatggttgtgctgtacggcgtttggggtggccccatgttccatgctcagctgaccggatgccaactcagatgaaaagaattcatggctctgggcaccccgtgaggcagtgcttgcacatggctgggagtttgtcgggattgaaccaaacctagtgcttcaaagctcctgggacacctccagtgtccagcacacattctcatacatactgcccctaatttctaaagtccctaaagcactacattctgtaaccttgtttcttttactccattcccagattagttatgcaaaattcaactgcgttctacttttagaagtgtttagggtctttattttctgttgacccttcatctgaaagattctcttcccttgttaggtacaatcactgcccccccgcttttttttttgagatggggtcttgctatgttgcccaggctggtcttaaacgcctgggctcaagcaaccctcccgcctccctgctgagattacaggtgtaagccaccataccgcaacctcaatgacacctttctgatggtctttacacagtctgtgatgtctggtggcccccctgccctggactcaataattgatagattttcctagagtaacagtatgagagctccagccattccattaaaagtattagttctgctttgagctgaaaccagttgagcctaatggaagactggatgtctttcttcttcatccaagcaccctaatgactgtttagttacatccatagatgcagacaacataacacctgtgacttacttgaattgggataagccattccagaagtagcttatcctagacttggaaataagatttttttcaccactaacttccatgcttcagagatgacattcaaagccagattcccaagtgcctgatcatacctcccagtctcaggaagatatttgcttaccccttagaccaagaatcttaagatcttccccagctatgaagcctatcttggaatgggaaaccatgaaatttgtcttttaaaagaaagggaagaaatagccttacagcccctgttcctccaagtgcacatttagccttaaaatcctgggagtcgggagacaccgtggagtcctaacatccacagtgtctgctggtcgtggtcagaaggcagtaatgcaagagtccttttgtgaagagtgtttctatgtagagatgtttatatttaagtagttcttttataaataaaagcatttctaatggc

SEQ ID NO: 1737 - DNA, 4506 bp, Homo sapiens
  source 1..4506: mol_type = genomic DNA
actggagttcctcaggccgctctcctgaagcggtgctcagaggccctgaccatcctgccaggcgcccgtgacccctgacctcttccctctgcctcctgctgtggcttctgtccacaagcccctccccttcccctttggacccctcaggcctccccagctgcctgcgctggaccctggcggggctgtttcactttttcctgggcagtgtcatgtatgcacctgtgggctgactgtgtggccacatccagtcaggacccagcctccagaactgacccagggaggctcccgctggccccaggaaggagaagtagaaactgatgatcaggcggggcgagagaaccacaccagcggccctgttgagaaatcaggccgagaggtcggtggcggtggctcaggcctgtaatcccagcactttcggaggcctgggcagtcggatcaccagaggtcaggagtccaagattagcctggccaacatggtgaaactgttgtctctactaaaaatacaacattagccaggcgtgatgggcacctgtaatcccagttcctccagagattgaagcaggagaatcgcttaaacctgggaggtggaggttgcagtgagtggagattgcctgggaggtggaggttgcagtgagtggagattgcctgggaggtggagattgcatgaagctccatctcgaggggaaaaaaataagaaagaaaaatcaggcagagaggcaacgccaggtcccagctggagctcagcggggagccaggggatacagtggctgaccgggcctcctaaccccccttctagcactcccccaggatcctgggtcccaattgttgccctggacaaatacgcccattcctgccctacccaccgagtgaggctcagccccaggccccccaccctcatcacaaggtcagggctgtgtcccaccatcctcatcactaggtacttccggccctttgctcagccccatgatgcttggcctgcagagatgggggctgaagggcttggggcatcaaggggacctgacatcttgctgagaagccatcactagacagggctggaggctggagactcagggcctgccctcaccgtggccagtgaggcgtggggttgggcagggaaggggcattcattcattagaccctgccagaagcacctgggtccccttctggggctacaggtggtgaggccactgcccccaagaacacagcctggtgactttagtgtacaaagcagggggagtctccaggggcacagaacagaggctaaagccagggtggaggtggccagcaggcctaggaggaggagagggtcagggccacaccccaggggaggtgcatgtcagccaggggccaccctaaggtggaagccaggagtcccaaaggggcctagagaaggagcagccccccacctggctaccgcagccctctctggttctgtgcagggtattgggatgcgttactgaggcccaaatctgccccactgggaacccccaaaaaagagccagggcaggagaatgagagggaggagccatgaaacccccgccctttaaagacagctctgtggcagctggcccaggccctgcagccctcaccacgttgggactcacttgggggtctcccatgggggtcctaatcccatctcttttcttcccagtccagaatgacagggtccagaaactggcgagccacgagggacatgtgtaggtatcggcacaactatccggtacgtacctgcccctgccccgggacacagaaccctcccgccagctgctcttctcaggcagaatgtcccaggttctactggaaggctggcctggcttgctgtgccagggccacagttctgggcaggaccctgcctggggcacagcctggtatagattcagagccctgcccttcccctctcgcgggagaccgggggcatccccctacttttctgagcttcagcacaccgtcgccttgcaaacatggccatagtgccagcctcgtgatgcacacgtgtggggtccgtgataccgcccacacagcaccccacccccatgccagccctgtctcctgcaggttgtcctcagccattaccctccacacccctgaatcacggaaacccctgtgctgccttcagggtgctgaggaggggacctgccaggcctggcctggctggcgaaatggggaaggggggtccctggggcttggaggcagctgctgtcctctgaatggcccccacctgcagagtgaggagccaggcgggctcttggggtattgggccagcctggaggtttgcagatgcgcctccccgaaagacacggagggccccagggcagcttgtgtctgatggatccctgctgtcccctttctctggctcttcaggatctggtggaacgagactgcaatggggacacgccaaacctgagtttctacagaaatgagatccgcttcctgcccaacggctgtttcattgaggacattcttcagaactggacggacaactatgacctccttgaggacaatcactcctacatccagtggctgtttcctctgcgagaaccaggagtgaactggcatgccaagcccctcacgctcagggaggtcgaggtgtttaaaagctcccaggagatccaggagcggcttgtccgggcctacgagctcatgctgggcttctacgggatccggctggaggaccgaggcacgggcacggtgggccgagcacagaactaccagaagcgcttccagaacctgaactggcgcagccacaacaacctccgcatcacacgcatcctcaagtcgctgggtgagctgggcctcgagcacttccaggcgccgctggtccgcttcttcctggaggagacgctggtgcggcgggagctgccgggggtgcggcagagtgccctggactacttcatgttcgccgtgcgctgccgacaccagcgccgccagctggtgcacttcgcctgggagcacttccggccccgctgcaagttcgtctgggggccccaagacaagctgcggaggttcaagcccagctctctgccccatccgctcgagggctccaggaaggtggaggaggaaggaagccccggggaccccgaccacgaggccagcacccagggtcggacctgtgggccagagcatagcaagggtgggggcagggtggacgaggggccccagccacggagcgtggagccccaggatgcgggacccctggagaggagccagggggatgaggcagggggccacggggaagataggccggagcccttaagccccaaagagagcaagaagaggaagctggagctgagccggcgggagcagccgcccacagagccaggccctcagagtgcctcagaggtggagaagatcgctctgaatttggaggggtgtgccctcagccagggcagcctcaggacggggacccaggaagtgggcggtcaggaccctggggaggcagtgcagccctgccgccaacccctgggagccagggtggccgacaaggtgaggaagcggaggaaggtggatgagggtgctggggacagtgctgcggtggccagtggtggtgcccagaccttggcccttgccgggtcccctgccccatcggggcaccccaaggctggacacagtgagaacggggttgaggaggacacagaaggtcgaacggggcccaaagaaggtacccctgggagcccatcggagaccccaggccccagcccagcaggacctgcaggggacgagccagccgagagcccatcggagaccccaggcccccgcccagcaggacctgcaggggacgagccagccgagagcccatcggagaccccaggcccccgcccggcaggacctgcaggggacgagccagccgagagcccatcggagaccccaggccccagcccggcaggacctacaagggatgagccagccgagagcccatcggagaccccaggcccccgcccggcaggacctgcaggggacgagccagccgagagcccatcggagaccccaggcccccgcccggcaggacctgcaggggacgagccagccgagagcccatcggagaccccaggccccagcccggcaggacctacaagggatgagccagccaaggcgggggaggcagcagagttgcaggacgcagaggtggagtcttctgccaagtctgggaagccttaaggaaaggagtgcccgtcggcgtcttggtcctcctgtccctgctgcaggggctggggcctccggagctgctgcgggctcccctcaggctctgcttcgtgacccgtgacccatgacccacagtgctggcctcctgtggggccactatagcagccaccagaagccgcgaggccctcagggaagcccaaggcctgcagaagcctcctggcctggctgtgtcttccccacccagctctcccctgcgcccctgtctttgtaaattgacccttctggagtggggggcggcgggcagggctgcttttcttagtctgataccaagcaaggccttttctgaataaattcatttgactttga

SEQ ID NO: 1738 - DNA, 1663 bp, Homo sapiens
  source 1..1663: mol_type = genomic DNA
agcgcgagccccgccgccgccgagcatggacgaccccgactgcgactccacctgggaggaggacgaggaggatgcggaggacgcggaggacgaggactgcgaggacggcgaggccgccggcgcgagggacgcggacgcaggggacgaggacgaggagtcggaggagccgcgggcggcgcggcccagctcgttccagtccagaatgacagggtccagaaactggcgagccacgagggacatgtgtaggtatcggcacaactatccggatctggtggaacgagactgcaatggggacacgccaaacctgagtttctacagaaatgagatccgcttcctgcccaacggctgtttcattgaggacattcttcagaactggacggacaactatgacctccttgaggacaatcactcctacatccagtggctgtttcctctgcgagaaccaggagtgaactggcatgccaagcccctcacgctcagggaggtcgaggtgtttaaaagctcccaggagatccaggagcggcttgtccgggcctacgagctcatgctgggcttctacgggatccggctggaggaccgaggcacgggcacggtgggccgagcacagaactaccagaagcgcttccagaacctgaactggcgcagccacaacaacctccgcatcacacgcatcctcaagtcgctgggtgagctgggcctcgagcacttccaggcgccgctggtccgcttcttcctggaggagacgctggtgcggcgggagctgccgggggtgcggcagagtgccctggactacttcatgttcgccgtgcgctgccgacaccagcgccgccagctggtgcacttcgcctgggagcacttccggccccgctgcaagttcgtctgggggccccaagacaagctgcggaggttcaagcccagctctctgccccatccgctcgagggctccaggaaggtggaggaggaaggaagccccggggaccccgaccacgaggccagcacccagggtcggacctgtgggccagagcatagcaagggtgggggcagggtggacgaggggccccagccacggagcgtggagccccaggatgcgggacccctggagaggagccagggggatgaggcagggggccacggggaagataggccggagcccttaagccccaaagagagcaagaagaggaagctggagctgagccggcgggagcagccgcccacagagccaggccctcagagtgcctcagaggtggagaagatcgctctgaatttggaggggtgtgccctcagccagggcagcctcaggacggggacccaggaagtgggcggtcaggaccctggggagtcctcctgtccctgctgcaggggctggggcctccggagctgctgcgggctcccctcaggctctgcttcgtgacccgtgacccatgacccacagtgctggcctcctgtggggccactatagcagccaccagaagccgcgaggccctcagggaagcccaaggcctgcagaagcctcctggcctggctgtgtcttccccacccagctctcccctgcgcccctgtctttgtaaattgacccttctggagtggggggcggcgggcagggctgcttttcttagtctgataccaagcaaggccttttctgaataaattcatttgactttga

SEQ ID NO: 1739 - DNA, 1997 bp, Homo sapiens
  source 1..1997: mol_type = genomic DNA
agcgcgagccccgccgccgccgagcatggacgaccccgactgcgactccacctgggaggaggacgaggaggatgcggaggacgcggaggacgaggactgcgaggacggcgaggccgccggcgcgagggacgcggacgcaggggacgaggacgaggagtcggaggagccgcgggcggcgcggcccagctcgttccagtccagaatgacagggtccagaaactggcgagccacgagggacatgtgtaggtatcggcacaactatccggatctggtggaacgagactgcaatggggacacgccaaacctgagtttctacagaaatgagatccgcttcctgcccaacggctgtttcattgaggacattcttcagaactggacggacaactatgacctccttgaggacaatcactcctacatccagtggctgtttcctctgcgagaaccaggagtgaactggcatgccaagcccctcacgctcagggaggtcgaggtgtttaaaagctcccaggagatccaggagcggcttgtccgggcctacgagctcatgctgggcttctacgatccggctggaggaccgaggcacgggcacggtgggccgagcacagaactaccagaagcgcttccagaacctgaactggcgcagccacaacaacctccgcatcacacgcatcctcaagtcgctgggtgagctgggcctcgagcacttccaggcgccgctggtccgcttcttcctggaggagacgctggtgcggcgggagctgccgggggtgcggcagagtgccctggactacttcatgttcgccgtgcgctgccgacaccagcgccgccagctggtgcacttcgcctgggagcacttccggccccgctgcaagttcgtctgggggccccaagacaagctgcggaggttcaagcccagctctctgccccatccgctcgagggctccaggaaggtggaggaggaaggaagccccggggaccccgaccacgaggccagcacccagggtcggacctgtgggccagagcatagcaagggtgggggcagggtggacgaggggccccagccacggagcgtggagccccaggatgcgggacccctggagaggagccagggggatgaggcagggggccacggggaagataggccggagcccttaagccccaaagagagcaagaagaggaagctggagctgagccggcgggagcagccgcccacagagccaggccctcagagtgcctcagaggtggagaagatcgctctgaatttggaggggtgtgccctcagccagggcagcctcaggacggggacccaggaagtgggcggtcaggaccctggggaggcagtgcagccctgccgccaacccctgggagccagggtggccgacaaggtgaggaagcggaggaaggtggatgagggtgctggggacagtgctgcggtggccagtggtggtgcccagaccttggcccttgccgggtcccctgccccatcggggcaccccaaggctggacacagtgagaacggggttgaggaggacacagaaggtcgaacggggcccaaagaaggtacccctgggagcccatcggagaccccaggccccagcccagcaggacctgcaggggacgagccagccgagagcccatcggagaccccaggcccccgcccggcaggacctgcaggggacgagccagccgagagcccatcggagaccccaggccccagcccggcaggacctacaagggatgagccagccgagagcccatcggagaccccaggcccccgcccggcaggacctgcaggggacgagccagccgagagcccatcggagaccccaggcccccgcccggcaggacctgcaggggacgagccagccgagagcccatcggagaccccaggccccagcccggcaggacctacaagggatgagccagccaaggcgggggaggcagcagagttgcaggacgcagaggtggagtcttctgccaagtctgggaagccttaa

SEQ ID NO: 1740 - DNA, 469 bp, Homo sapiens
  source 1..469: mol_type = genomic DNA
gtcaccaggagggtatgcatagggagggcaagagctctgggccactgcgaagattcaaaagctccaaaaacctactgtagacatcgaagaaccaatatatacaatgggccaacaatccagtgtccgcaggctgaagaggagcgtcccctgtgaatccaacgaggccaacgaggccaatgaggccaacaagacgatgccggagaccccaactggggactcagacccgcaacctgctcctaaaaaaatgaaaacatctgagtcctcgaccatactagtggttcgctacaggaggaacgtgaaaagaacatctccagaggaactggtgaatgaccacgcccgagagaacagaatcaaccccgaccaaatggaggaggaggaattcatagaaataacgactgaaagacctaaaaagtagcaagaagctacatccctcaaacttcggcaatgaaaataaagtttgagaagctga

SEQ ID NO: 1741 - DNA, 4070 bp, Homo sapiens
  source 1..4070: mol_type = genomic DNA
gggtggggccgccgttgccagagaagccactagccggttactagctgcgcttttgttccacttgagcgggcactcttctgcggcaagcaggtctaggaattcgcctggttcccacctcgcgtcccttgccttccttcctagtctacccactgtagtgccccctgcgtcccgctccctcctagccgactcagagcacaagaaggattgccacggtttccattgcagcagccgtggcgcctctgaccctttttttatatcgcggcgacggcgggctgtcgtcacgacgacgtgcggacgcagcggcgggggcctttcagcttatgtggagaagtcgctgtgaagccacctataaatccatttactgaatttatggagaaggctgtaaatgatggaagtcattcagaagaactcttttgccatcttaaaactatatcagagaaagaagatttaccacggtgtaccagtgaaagtcatctcagctgcctgaagcaggacattctaaatgaaaagactgaattggaagcaacacttaaggaagcggagttggtaactcattctgtagaattgcttttgccactatttaaggacaccattgaaaagattaattttgaaaatgcgaatctttctgcattgaatttgaagatttctgaacagaaggaaatattaataaaagaattagacaccttcaaaagtgtaaaactagctttagaacatcttcttagaaagagagactacaaacaaacaggagacaatttatccagcatgttgctagaaaatctaactgataatgaaagtgaaaatactaatcttaagaagaaggtatttgaaaaggaggcccatatccaagaactttcttgtttgtttcagagtgaaaaggcaaatactttgaaagcaaaccgtttttcccaatcagtaaaagtagtacatgaacgactacagatccaaattcataaaagggaagccgagaacgataagttgaaagaatatgtaaagagcttagaaaccaagatagccaagtggaacctgcaatcaagaatgaataagaatgaggctatagtgatgaaagaagcaagtaggcaaaaaactgtagctttaaaaaaggcatctaaagtttacaaacaaaggcttgaccattttacaggagctattgaaaagcttacttcccaaattagagatcaggaagccaagttgtctgaaacaatttcagcttccaatgcctggaaaagtcattatgagaaaattgtgatagaaaaaaccgaattggaagtacagattgaaacaatgaaaaagcaaatcattaatcttttggaagatctgaagaaaatggaagaccatggaaaaaattcatgtgaagaaattcttagaaaagttcactcaattgaatatgaaaatgaaactctgaatcttgagaatacaaaattaaagactacacttgctgctttgaaggatgaagttgtatctgttgaaaatgaactctcagaattgcaagaagtagaaaaaaaacagaaaacccttattgaaatgtataaaactcaggtacaaaagttgcaagaagcagctgaaatagtaaaaagcagatgtgaaaatttgctacataaaaataaccaaataacaaaaaccaaaaataaaaatgtagagaaggttgatggaaatcacaatcttctgacaaagctttctctggaagaggaaaactgtcttattcagctgaagtgtgaaaaccttcaacaaaaattagaacagatggacgcagaaaataaagagcttgagaagaagctggcaaaccaagaagaatgtcttaagcacagcaatcttaagtttaaagagaaatctgcagagtatacagcattggccagacaactggaagctgctttagaagaaggaagacaaaaggttgctgaagaaatagagaaaatgtcatctagagagagtgctttacaaattaaaatattagatctggaaactgagcttagaaagaaaaatgaagaacaaaatcaacttgtttgcaaaatgaacagtaaagcacaacatcaggaagtgtgtttgaaagaagtacaaaatagtcttgagaagtcggaaaatcaaaatgagagtattaagaattatttacagtttcttaaaacttcttatgtaacaatgtttgaataaattgtcaaatttattttctctaagtagtagatttttattatgagtctaaaatgtgattgggtaaaaaaataaatatactaccagttacattttatgatttatgagtggtagtattagaggtttttatgtaaagatttttgaaacataatttatctaactgaaactttaaaataggatagttgttactattcctgtttgctggataattcttatttatctttggtttaatttcttttaaaattaaattggttgttagaatatttttctcacacatagacatggaagtcagattcattctttgtgatgtttgtagccaccattcaagtgaatttgtagtaagtcttggtcaatatgattttaaataatatatataattgttttatattatgatatataaatgtaaaatattctgaattttaatttttaataatggtgtaattacatactttctaaagctactaaatgtctcaatatactacacttaatattgtttcaagtatatgctgagttgccattataatttctgttaggttttaagtatacaattttaaatcatcgctattaagtaccaactgctaatgacagatgaaaacgtggtcatgcattatttctttataaagaatagatattcaggctgtcttcaatttgtactctcttttattcgttttatactaatgattatctgatattattattattttagacattctagagccccttagttaaataaaagattaaaggggaacagcttatcccaccctttccatggccaactcatggggatgatcaaaataagcactcttaacatcaagaagctttaaaataaggtctttagtattgggataaagttgtccaagttgaaaaagaacttgtttgctataatctcccactgtgtgtgccaaggcaggatactctaaaaggggatgacgtggtttacaaaggatcaagtaatagtgactcctcttggacaatgacttgagagctgttaattcagaggaacactcaggtcttaaaagatcactaaaaaaggcaggttgtgaactacacagttccagcctatgaacagaaatatctctttaagatgttttatgctttttttctgatcagagatgggggcctggtcccctctgatcccctcacttttaagactgtcatatcattcacagatgcttactttctagtgatccagttggttcgtagtatttttcttaaaatagcaaaatacagagtgtcagaactggccacattttttacccaacaattgctaacaagattagtgtcattttaaaaaaaatcttagtactcatcatactaaaaacatgcttgacccttgcagccctttctttacctcctaatgcaaagggagccttaaatgcccacatgaaaggaaagcaaagctcttgagttttactcactaaactgtaagctccttaagggccgaaatgtatcttagtcatataaatatctgggcactcagttgatgtttgtggatagatggacagatgttgaaagaggcaggtattcgtactcctgttttagatatgaaaaatgtaagcaaaaaggattaattaccatggctgtggtatgaaacttgtttaaagttggcatttaaattcaagtctgcaacattaaagttctgtgtacagagccgttttcccactgtagcagcagcgcagcagcagcgctgctatgattgattaagcacttgctatgtgccagagttaataattgtgataatatattaactcatttaattttcaggaaactaagacatggaaaggttaggtaacttgcccaaggtcgcacagctagtaagtggcagacatccagagtctctgctctgctcttaactctcaccatactacctctgtatccatttcataaataaagatagtagtttcttataacagtaatgcatttgtctt

SEQ ID NO: 1742 - DNA, 2294 bp, Homo sapiens
  source 1..2294: mol_type = genomic DNA
gaagccactagccggttactagctgcgcttttgttccacttgagcgggcactcttctgcggcaagcaggtctaggaattcgcctggttcccacctcgcgtcccttgccttccttcctagtctacccactgtagtgccccctgcgtcccgctccctcctagccgactcagagcacaagaaggattgccacggtttccattgcagcagccgtggcgcctctgaccctttttttatatcgcggcgacggcgggctgtcgtcacgacgacgtgcggacgcagcggcgggggcctttcagcttatgtggagaagtcgctgtgaagccacctataaatccatttactgaatttatggagaaggctgtaaatgatggaagtcattcagaagaactcttttgccatcttaaaactatatcagagaaagaagatttaccacggtgtaccagtgaaagtcatctcagctgcctgaagcaggacattctaaatgaaaagactgaattggaagcaacacttaaggaagcggagttggtaactcattctgtagaattgcttttgccactatttaaggacaccattgaaaagattaattttgaaaatgcgaatctttctgcattgaatttgaagatttctgaacagaaggaaatattaataaaagaattagacaccttcaaaagtgtaaaactagctttagaacatcttcttagaaagagagactacaaacaaacaggagacaatttatccagcatgttgctagaaaatctaactgataatgaaagtgaaaatactaatcttaagaagaaggtatttgaaaaggaggcccatatccaagaactttcttgtttgtttcagagtgaaaaggcaaatactttgaaagcaaaccgtttttcccaatcagtaaaagtagtacatgaacgactacagatccaaattcataaaagggaagccgagaacgataagttgaaagaatatgtaaagagcttagaaaccaagatagccaagtggaacctgcaatcaagaatgaataagaatgaggctatagtgatgaaagaagcaagtaggcaaaaaactgtagctttaaaaaaggcatctaaagtttacaaacaaaggcttgaccattttacaggagctattgaaaagcttacttcccaaattagagatcaggaagccaagttgtctgaaacaatttcagcttccaatgcctggaaaagtcattatgagaaaattgtgatagaaaaaaccgaattggaagtacagattgaaacaatgaaaaagcaaatcattaatcttttggaagatctgaagaaaatggaagaccatggaaaaaattcatgtgaagaaattcttagaaaagttcactcaattgaatatgaaaatgaaactctgaatcttgagaatacaaaattaaagactacacttgctgctttgaaggatgaagttgtatctgttgaaaatgaactctcagaattgcaagaagtagaaaaaaaacagaaaacccttattgaaatgtataaaactcaggtacaaaagttgcaagaagcagctgaaatagtaaaaagcagatgtgaaaatttgctacataaaaataaccaaataacaaaaaccaaaaataaaaatgtagagaagatgagaggccagatggagtctcatctgaaggagttagagcgtgtctgcgattccttgacggcggcggaacggaggcttcacgagtgtcaggagagtctgcagtgctgcaaggggaagtgtgcagaccaggaacacaccattagggagcttcagggccaggttgatggaaatcacaatcttctgacaaagctttctctggaagaggaaaactgtcttattcagctgaagtgtgaaaaccttcaacaaaaattagaacagatggacgcagaaaataaagagcttgagaagaagctggcaaaccaagaagaatgtcttaagcacagcaatcttaagtttaaagagaaatctgcagagtatacagcattggccagacaactggaagctgctttagaagaaggaagacaaaaggttgctgaagaaatagagaaaatgtcatctagagagagtgctttacaaattaaaatattagatctggaaactgagcttagaaagaaaaatgaagaacaaaatcaacttgtttgcaaaatgaacagtaaagcacaacatcaggaagtgtgtttgaaagaagtacaaaatagtcttgagaagtcggaaaatcaaaatgagagtattaagaattatttacagtttcttaaaacttcttatgtaacaatgtttgaataaattgtcaaattt

SEQ ID NO: 1743 - DNA, 4363 bp, Homo sapiens
  source 1..4363: mol_type = genomic DNA
ggtcccgactccgatgatggcggacggcgccgcagctggcgctggcggcagcccatccttgagagagctgcgggcacggatggttgctgcagcaaacgagattgctaaggaaaggaggaagcaagatgtggttaatcgtgttgcaacccattcctcaaatataagatcgacatttaaaccagtaatcgatggatccatgcttaaaaatgacataaaacaaagattagcaagagagcgcagagaggagaaaaggagacagcaagacgccaataaagaaacacaactacttgaaaaagaaagaaagaccaagctccaatatgaaaaacagatggaggaaagacagagaaagctgaaggagcgaaaagagaaagaagaacaacggagaatagctgcagaagaaaaaagacaccagaaggatgaagcacaaaaggaaaaatttacagccattctttatcgtactttggaacggaggagacttgctgatgattatcagcaaaaaagatggtcatggggaggctctgcaatggcgaattctgagagcaaaactgggaaaacagacaaggagagaagctcatctttaaatagaagagatagtaacctacattcgtctactgataaagaacaagccgaaaggaagccacgtgttacaggcgtcaccaattatgtaatgcagtatgtcactgtacccttgcgtaaatgtactagcgacgaattgagggctgttatgtttcccatgtcgacaatgaaaatacctcctcaaacaaaagtagaagagtctcccttggagaaagtagagacacctcccaaggcaagtgtggatgcacccccccaggtgaatgtggaagtattctgcaacacaagcatggaagcgtcccccaaggcaggtgtgggcatggcccctgaggtgagcacggactcattccctgtggtgagcgtggacgtgtcgcctgtggtgagcacatatgattctgagatgagcatggacgcatcccccgagttgagcatagaagcactcccgaaggtggacctggaaacagttcccaaggtgagcatagtagcatccccggaggcgagcctggaagcacccccggaagtgagtctggaagcactgccagaggtgagcgtggaagcagccccagaggggagcctggaagcacctcccaaggggagcgcagaagtagcccccaaggagagtgtgaaagggtcacccaaggagagcatggaggcatctcctgaggcgatggtgaaagcatcccccaagacatcccttgaagcaagcatggaagcatctcccaaggcaaaagcgagagacgctccaaagaaatcagaaatggacaaacaggccttaatccctattgccaagaagcgtctatcatcatacactgagtgttataaatggtcatcatctcctgaaaatgcttgtggtctgccgtctcccatcagcactaacaggcaaatccaaaagaactgccctccatcaccattaccacttatttcaaaacagtcaccacagacttcttttccttataaaataatgcctattcaacacaccctgtctgtgcaaagtgcatcaagtactgtcaaaaagaaaaaagaaacagtttctaaaaccactaacagatgtgaggctttgagccaaaggcatatgatctatgaagagtctggtaataagagtactgcaggtattatgaatgccgaggcggcaacaaaaattttgacagaattgcgccgccttgctcgtgaacaaagagaaaaagaggaagaagaaagacaacgggaagaaatgcagcaaagggtcattaagaaatcaaaagacatggcaaaggaagcagttggaggccaagcagaagaccacttgaaactcaaagatgggcagcaacaaaatgagactaaaaagaagaaaggatggctggatcaggaagaccaggaagcaccactgcagaaaggggacgccaaaataaaagctcaagaggaagctgacaaacgcaagaaagaacacgagagaattatgttacaaaatttacaagaacggttagaaaggaaaaagagaatagaagaaattatgaagcggacaagaaagacagatgtgaatgcctcaaaggtcacagaaacatccagccatgacatatatgaagaggctgaggctgacaacgaagaaagcgacaaggactcattgaatgaaatgtttccatcagccattctaaatggcacaggctcacctaccaaatttaaaatgccgttcaacaatgccaagaaaatgacacacaagctggtatttctagaagatggtaccagccaggtccgtaaagagccaaaaacatattttaatggcgatttgaaaaacttcagacaaaaaagcatgaaagacacttcaatacaggaagtagtttcaagaccatcttccaaaagaatgaccagtcacacaacgaaaaccagaaaggcggatgaaaccaacaccaccagcagatcctctgcacaaacaaaatctgaaggattccatgacatcttgccaaagtcctcagacacctttagacaataagagaagaagcaaacctgtttctcctcatttggaaatcccattcctccttgtgtctcatctgagctggaaactcttcactgccaagtctggcgccaggtcctgttgatccatccattgaaactgtctaccaggatgttcctgtttacaaggccaaggtgatggacactgacctagctttcccctcacgcattgctgcctcgcatttcccttcctggtatcctctacccggagggacagacccctggcctctaccagcagattctgcagatcagcgcattttctacgcctgtgtcattgtggacactgcatgtggaatgaagttttttaacagctccaatccctaaaaaccacaagaatgcagtgtgaaataccataaagaatgccagacaggcccctgaagacctgaacccagctgagagggctgctagctcacgtgtgacattgtgcacgttgttgctcttctctgatccctgttccttgtctgtcaaatgagggggctgtgctacaatctctgcagccttttcagttttgagactccactgttctcaaacacctctaactccttggagccagagcaagagggatcaggaggcataaaacagcagcgatggccaaggagccagagcgtggaggcggactgtgcatgacattttatcatgtcagggggcaattccctgtcattttcagtgaccccacccctccagtgcctggccggcctggttggtcaaaacaggccccgaaacagcctccttgcctttggtctccttaccagtccagttacagtgtttccagatgggtcctaggcacccatctgattctaatttccccaactgtattgtaatcattgcagttaggtttacatgtgcaatatgcaaggtacttgataggcattttctttttgtttttttgagatggagtctcgctctgttgcccaggctggaatgcagtggcgtgatcttgactcactgcaacctctgcctcccaggtttaaggggttcatctgcctcagcctcctgagtagctgggactacaggcacacaccacaacacttggctaatttgtgtatttttagtagagacagggtttcaccatgttggccaggctggtctcgaactcctgacctcaggtgatctgcctgcctcagcctcccaaagtgctgggattacaggcatgagccaccgtgcccagccaggcattttcaatgctcacaacaactctatgaggtgtgggtattcatttatgcctatgaggacactgaaatttgtggagagcagcatttgttccaggtcacacagctggaaagagacagagctgatattcaaacccaagtttgtccctcaaactaacaccccacactgctttgggagtggacatagtgtcttgaggcttgcagggtatgtcacagacaccagagcagtgtctttggtgctgggaatgaaatgtttgttggcatttagtgtgtttactgggtgccagtcccctcactaagcacctgcattatgtctcccacatgggattctgcaaagtagaaattttacgtctcacaggtgaaggatcaagctcagagaggttaacttgcccacagtctcatgactacaaagtggcagagcagccaggatttgaaccctggtagcctggtgccagagcccaccctgttaaccacaagcagagaggttcttgatattctgatcccattaattatgagggagaaaatgtttctctgctgacaaattgttaaggggaaatttaccctcatttctcctgagccttaggggtgtcactcttaaaatcgcatattcaacaaacaaatgccttctaagtact

SEQ ID NO: 1744 - DNA, 4446 bp, Homo sapiens
  source 1..4446: mol_type = genomic DNA
aaaaggaaatggtacagagcagcctgttgaaattagacagcagggtcaccctggtcctctgtgccacaggaaggaggggtactgaagtgtcagttgttggtgggggagcagtgctgcagtgggaattccagagctgagaaggctgccatcaaccaagtgagacatgaccagcccccgagttgctgcagcaaacgagattgctaaggaaaggaggaagcaagatgtggttaatcgtgttgcaacccattcctcaaatataagatcgacatttaaaccagtaatcgatggatccatgcttaaaaatgacataaaacaaagattagcaagagagcgcagagaggagaaaaggagacagcaagacgccaataaagaaacacaactacttgaaaaagaaagaaagaccaagctccaatatgaaaaacagatggaggaaagacagagaaagctgaaggagcgaaaagagaaagaagaacaacggagaatagctgcagaagaaaaaagacaccagaaggatgaagcacaaaaggaaaaatttacagccattctttatcgtactttggaacggaggagacttgctgatgattatcagcaaaaaagatggtcatggggaggctctgcaatggcgaattctgagagcaaaactgccaataaacgatctgcatctactgaaaaacttgaacagggtacttctgctttaatcagacaaatgcctttgtcatctgcaggccttcaaaattccgttgccaaaaggaaaacagacaaggagagaagctcatctttaaatagaagagatagtaacctacattcgtctactgataaagaacaagccgaaaggaagccacgtgttacaggcgtcaccaattatgtaatgcagtatgtcactgtacccttgcgtaaatgtactagcgacgaattgagggctgttatgtttcccatgtcgacaatgaaaatacctcctcaaacaaaagtagaagagtctcccttggagaaagtagagacacctcccaaggcaagtgtggatgcacccccccaggtgaatgtggaagtattctgcaacacaagcatggaagcgtcccccaaggcaggtgtgggcatggcccctgaggtgagcacggactcattccctgtggtgagcgtggacgtgtcgcctgtggtgagcacatatgattctgagatgagcatggacgcatcccccgagttgagcatagaagcactcccgaaggtggacctggaaacagttcccaaggtgagcatagtagcatccccggaggcgagcctggaagcacccccggaagtgagtctggaagcactgccagaggtgagcgtggaagcagccccagaggggagcctggaagcacctcccaaggggagcgcagaagtagcccccaaggagagtgtgaaagggtcacccaaggagagcatggaggcatctcctgaggcgatggtgaaagcatcccccaagacatcccttgaagcaagcatggaagcatctcccaaggcaaaagcgagagacgctccaaagaaatcagaaatggacaaacaggccttaatccctattgccaagaagcgtctatcatcatacactgagtgttataaatggtcatcatctcctgaaaatgcttgtggtctgccgtctcccatcagcactaacaggcaaatccaaaagaactgccctccatcaccattaccacttatttcaaaacagtcaccacagacttcttttccttataaaataatgcctattcaacacaccctgtctgtgcaaagtgcatcaagtactgtcaaaaagaaaaaagaaacagtttctaaaaccactaacagatgtgaggctttgagccaaaggcatatgatctatgaagagtctggtaataagagtactgcaggtattatgaatgccgaggcggcaacaaaaattttgacagaattgcgccgccttgctcgtgaacaaagagaaaaagaggaagaagaaagacaacgggaagaaatgcagcaaagggtcattaagaaatcaaaagacatggcaaaggaagcagttggaggccaagcagaagaccacttgaaactcaaagatgggcagcaacaaaatgagactaaaaagaagaaaggatggctggatcaggaagaccaggaagcaccactgcagaaaggggacgccaaaataaaagctcaagaggaagctgacaaacgcaagaaagaacacgagagaattatgttacaaaatttacaagaacggttagaaaggaaaaagagaatagaagaaattatgaagcggacaagaaagacagatgtgaatgcctcaaaggtcacagaaacatccagccatgacatatatgaagaggctgaggctgacaacgaagaaagcgacaaggactcattgaatgaaatgtttccatcagccattctaaatggcacaggctcacctaccaaatttaaaatgccgttcaacaatgccaagaaaatgacacacaagctggtatttctagaagatggtaccagccaggtccgtaaagagccaaaaacatattttaatggcgatttgaaaaacttcagacaaaaaagcatgaaagacacttcaatacaggaagtagtttcaagaccatcttccaaaagaatgaccagtcacacaacgaaaaccagaaaggcggatgaaaccaacaccaccagcagatcctctgcacaaacaaaatctgaaggattccatgacatcttgccaaagtcctcagacacctttagacaataagagaagaagcaaacctgtttctcctcatttggatatgtaaaccttactcagcctgggagatgaatacatcttccactctggataactcaactcctgggcccatcagtcctcaaatttttctgcttctgacttgaacctggtaaaggaagtgacaccgaaaaattgaaagaaactgtcaaaaggccactttgatgtatatctcagatgttaaagtcatcttattctcttgtgtctaagcaagagttctaagtaaagagtggtttttgttttctttggaaaatcatcattgtctctcattcttgtgttgtcccaccaatgtgtttgctggagtgagtgcatcaaggatgctttcctgaaactgtaactgtggagtttctagaagaatctgattgcagaactaattctctttcagtatatatttgaaatcttaaagtaatgctttttctttttctttttcttttttttttttttgagacggagtcttgccctgtcgcccaggctgcagtgcagtggcacaatctcggctcactgcaacctccgcctcctcatctcaagcaattctcctgtctcagcctccccagtagctgggattacaggcatgtgccaccacacctggctaatttttttgtattttagtagagatagggttttaccatgttcaccaggctagtctcgaaatcctggcctcaagagatccacccgtcttggcctcccaaagtgttgggattacaggtgtgagccactgcacccagccaagtaatgctttttctgtgtaccagtgacaattttgacagctaaaaactcacagttgatcttgtagagaacagaatagattatgcaagggccgcaggatcgctcacaagagctgtcagattgtttctaatataaaaataccaaaggttgcaaaatccagcaaattgtattttactgtgatatatgtatatttttaactctacccatctgtgccagtgagtacacaggcactaataacctgaaatgctgggagtcctgtaaagccccatcttggaacagtcagcacctttcatgctcttgtcagtgtttccttttgaaggacatattggtgtttatctacagaaacatatattatttttattgtgtacataaaggagtatatggctgttgtcccgtggggtatgtttaattcctctaaatgtttaaagtacttttctgcctgtactctccagttctgtcgttgagtatacactcaggcttgagatacaaccaaaatttgcttgcctttctctagccactggctgccagtgagttcgtgtgatgggcacacagaaatgcacacagatgtacatacacgtatgtatgcacacacagtatatgattccataaaattcaaatgcagattaattctcctaatgagttttcagtgttgaatcgtaaatagtctgaagcaggccagtgttccttttggctgccagtcttggattagtaaaaggaggtaattctttcagattccctggttctttgccactcagagtattgtacttttgatatagaatagagaaggttacctttggtttaaaaactatttttatatactagctctttcatgtataaaacagagacaatcatcctaacaaaagagttcctgttatttttctgcacaaatgtcttgtgttgaaacactgttacagttccatataaatgtgtgctatataaaataaactttggag

SEQ ID NO: 1745 - DNA, 3847 bp, Homo sapiens
  source 1..3847: mol_type = genomic DNA
gctgggcgggcgggcggctgctccggtccaggggtggaggtcggggccctgacccgacgcagccaggcggaagcgcggctgccattggaggctgcttttacctgcgcggggcccggggcgcaaagtccgaggcgccggggggaggaggcggcggacggcagcgcaggtgggcccgcgctctcggccctgcaagatgcccctgaagctgcgggggaagaagaaggccaagtccaaggagaccgccgggctggtggagggcgagccgacgggcgcgggcggcgggagcctctcagcgtcccgggctcccgcacgcaggctggtcttccacgcgcagctggcgcacggtagtgccacgggccgagtggagggcttctccagcatccaggagctctacgcccagatcgcgggcgcgtttgaaatctcgccgtcggagatcttatattgcactttaaacacacctaaaattgacatggaaagactcttaggaggacaactaggactagaagatttcatatttgcccatgtgaaaggaatcgaaaaagaagtgaatgtgtataaatctgaggattcacttggtctcaccattacagataatggtgttggctatgcttttataaagagaattaaagatggtggtgttattgactcagttaaaacaatctgtgttggggatcatattgaatccataaatggagaaaatattgttgggtggcgtcactatgatgttgctaagaagttaaaggaattaaaaaaggaggaactctttactatgaagttaatagaacctaagaaggcatttgaaatagagctgaggtcaaaggctggaaagtcatcaggagaaaaaattggttgtggaagggcaacacttcgcctgagatcaaaaggtcctgccaccgtggaagaaatgccttctgaaaccaaagcaaaggcaattgaaaagattgatgatgttcttgagttgtacatgggaattcgagatattgatttagccaccacaatgtttgaagctggaaaggacaaagtaaatccagatgaatttgctgtggcacttgacgaaactcttggagactttgcgttcccagacgaatttgtctttgatgtttggggagtcattggtgatgccaaacgaagaggattatgatgtgtacactccatctctgaagaaacaacccatcgttcttttttttctcttttttaaaaagtcctataagatctgtttttggacacctttactaactctggtttaatttcatgtgtatggaatatattctttgaaatataattttggtaattttgatttctgggcactttttaacattgctgatgtagtatgcttaagagaaatgacctaaataaggatcaattgtaatattcattcaaaaggtttttaaaagtaagttttaaggagtatttctcgacagatgattttcttctccattaatacccatgctttgtttttcacatataaatagatgatttcaatagctttgtagttttttttcaaaatcttaatgtaaactaggattggagtatgatttacctcatagtatcttcactgtgttatcctagtttgaacaggatatgttcaggaaatgaaaggtgaattatgccccttattggtctagaagcattggtttttttttgatcctctgagtaagggaaggaagattcctgtggcatgttgatttctatggccaactttctctctttgtaaaacaaagattgattgattttcttgtatgcttctttatacatgctcttaaaacttgtggttgaaatctgtgctgtgtgtgtgtgtctctgcatgtgtaaaagaagggtaaaaaagagatgggtagggtagaactacttgcatttgatttttttttcagtccttaaaacattatttctttttttcactcatagccacttttatgttaccttttataagcactccagggaagattttatatttttttgtagagtttttggaaagatatttactcaaaataactatgctttagaactttttttttttttttttttttggttaaacagcagcactttttagttccctaaactttagaagaaatgctatcagaaatagatttccttccagtggaaagaaaggaggaagggagaattgagaaaatatattagtctattattttagagttctaatacactctaaattaaagagaaaattgagagtaaatgactgtcttatcactcttatttgacatttcgtaggtgtaagagaaatggaaatgaatggtttcaacaaagatcatttaatacagcagagcatggcatgaccaagcatctttgtaaagtgttagatggaaaatgctgtgtgctgccatggtaatcagaaataataacctgttagggatgtattctaggaaatcagaagtagttctcttttcttgctggattattgcttagataactcttgttttctggtaaaactttagttgtattgccatccactcctttttcaaatgagtttaatgccataaagctgatattctttgtccgattaatttgaaatctgcacagaagctgttttagtcattaatgtgtaacaaaagtagcttatagaatatggactgccttattgctgttgcttatcatttgaaaataaaatccagctcaggttgtaacttgttggtactcgtttagtgagttcgttttggaggttctgaaatacctattaattcttaatattacctctcttggaaagacacaaaaaaagagctgttatttttaggcataagatgacttaggaggcccatagaaacattctcgtttaaacaacaacaacaaaataaatttatcagcactagatattagatttgaaataagtcattgttcattattgatggttgtcagtttctccttcctttttgggcatgcataaagacacacttggtgctgattccatgtgatttatggaatgtcattttcacaatgatctttctagaatttgtgtgtaaggttgtgatatccatgtacagctgtaactatatatacttgtctgttagcattcagtggaccattatcattactatcatcacattacctgggcttcaactgggcccaagtactctatatactgcctgtaataggtttttccttgaaatatccttatctttcacctctacagctaaactgataacaaggtcagtttctttatgtcattttattcccatacctaaaattgcatctatttgtgagctttctgcctttttgtaacgctcagtgcaccaaaagcgtctgtttttagtgcagtcacataatatataagtgtgggatacccttctgcagcttcagtgagacaaatcactttttaaaaaacattccattttattggcatcactagatgtttttaggaccctgtccttttcacttttctgtaggctttttttttttaaatggaagatgattattttgtttgttcttgatttcctgttattgaaaacagcatcttccttcttgcaatggccactaatagcacacaatgcgttttctttgattgtagcagaaaatgcaaatgataattgtatgttgggctcgatgaggccttgaacatagctgagtcctaatcagatgtatatactctgatgattacaaataggtacatgttgggtttctgtgatgtttcaaaaatacaattatataattatgatgtaaactctttaagaattcaattataaaagcaataatcaggtaacctctatttggagctgctacatccaatattgtgactgaaaattaactaaagagagataatttttcaaatgatgtataatttgcaatattttcccttgcaactttagcaaatacacatattccaagtaaaacttta

SEQ ID NO: 1746 - DNA, 2917 bp, Homo sapiens
  source 1..2917: mol_type = genomic DNA
ggagacaccggaaggagccgcggctgctgcgggaagtggccagttcaggaggcggaccccccgagggcagcgctgcggggccgttttccggccctcctgacgcgacactgcccctctccgagagctgagaaggaaaagaggagcttgcggaggtgcggctgcaggccgttgttggtcgagctggcgggtcccgcgggccaggccgtggagagctcctgaaggaagcactaaacatggaaaggaacaaccggtaccagccactgcaaaaacatgccaaattgtaaagaccatcgatgttaggaagaaactgcctcaactaatgagcaaaataaccagctaacatcgtaatgacaggatcaaattcacacataacgatattaaccttaaaggtgttacctcattttgaaagtcttgggaaacaggaaaaaattcctaacaaaatgtcagcttttcgaaatcattgtccacatttggattcagttggtgaaataacaaaagaagatttgatacaaaaatcccttggtacttgtcaggattgtaaagtccaaggaccaaatctttgggcatgtctggagaatagatgttcatatgttggctgtggtgaatcacaagtagatcacagcaccatacattctcaggagacaaagcattatctaactgtgaaccttaccactcttcgagtatggtgttatgcttgcagcaaagaagtatttttggataggaaattaggaactcagccttcattgcctcatgtaagacaacctcaccaaatacaagaaaacagtgtccaggattttaaaatacccagtaatacaacattaaaaactcctctggttgccgtatttgatgatctggatatagaagcggatgaagaagatgaacttagggccagaggtcttacaggtttgaaaaatattggaaatacttgttacatgaatgcagctttgcaggctctttctaattgcccacctttgacacagttttttcttgattgtggaggactagctcgaacagataagaaacctgccatttgtaaaagttatctcaaactaatgacagagctgtggcataaaagcaggccaggatctgttgtgcctactactctgtttcaaggaattaaaactgtaaatccaacatttcgggggtattctcagcaggatgctcaagaattccttcgatgtttaatggatttgcttcatgaagaattgaaagagcaagtcatggaagtagaagaagatccgcaaaccataaccactgaggagacaatggaagaagacaagagccagtcggatgtagattttcagtcttgtgaatcttgtagcaacagtgatagagcagaaaatgaaaatggctctagatgcttttctgaagataataatgaaacaacaatgttaattcaggatgatgaaaacaattcagaaatgtcaaaggattggcaaaaagagaagatgtgcaataagattaataaagtaaattctgaaggcgaatttgataaagatagagactctatatctgaaacagtcgacttaaacaaccaggaaactgtcaaagtgcaaatacacagcagagcttcagaatatatcactgatgtccattcgaatgacctgtctacaccacagatccttccatcaaatgaaggtgttaatccacgtttatcggcaagccctcctaaatcaggcaatttgtggccaggattggcaccaccacacaaaaaagctcagtctgcatctccaaagagaaaaaaacagcacaagaaatacagaagtgttatttcagacatatttgatggaacaatcattagttcagtgcagtgtctgacttgtgacagggtgtctgtaaccctcgagacctttcaagatctgtccttgccaattcctggcaaggaagaccttgctaagctgcattcatcaagtcatccaacttctatagtcaaagcaggatcatgtggcgaagcatatgctccacaagggtggatagcttttttcatggaatatgtgaagagctggttttggggtccagtagtaaccttgcaagattgtcttgctgccttctttgccagagatgaactaaaaggtgacaatatgtacagttgtgaaaaatgcaaaaagttgagaaatggagtgaagttttgtaaagtacaaaactttcctgagattttgtgcatccaccttaaaagattcagacatgaactaatgttttccaccaaaatcagtacccatgtttcatttccgctagaaggcttggatcttcagccatttcttgctaaggatagtccagctcaaattgtgacatatgatcttctgtcagtcatttgccatcatggaactgcaagtagtggacactatatagcctactgccgaaacaatctaaataatctctggtatgaatttgatgatcagagtgtcactgaagtttcagaatctactgtacaaaatgcagaagcttacgttcttttctataggaagagcagcgaagaggcacaaaaagagaggagaaggatatcaaatttattgaacataatggaaccaagcctccttcagttttatatttctcgacagtggcttaataaatttaagacctttgccgaacctggccctatttcaaataatgactttctttgtattcatggaggtgttcctccaagaaaagctggttatattgaagacctggttttgatgctgcctcagaacatttgggataacctatatagcaggtatggtggaggaccagctgtcaaccatctgtacatttgtcatacttgccaaattgaggcggagaaaattgaaaaaagaagaaaaactgaattggaaatttttattcgggtaaaaaagtgatgcttttcaaattgatctaggataaagatgaagacctgacaattatcagagttatatgatattaataaaatgattagatgaaa

SEQ ID NO: 1747 - DNA, 4502 bp, Homo sapiens
  source 1..4502: mol_type = genomic DNA
ggagacaccggaaggagccgcggctgctgcgggaagtggccagttcaggaggcggaccccccgagggcagcgctgcggggccgttttccggccctcctgacgcgacactgcccctctccgagagctgagaaggaaaagaggagcttgcggaggtgcggctgcaggccgttgttggtcgagctggcgggtcccgcgggccaggccgtggagagctcctgaaggaagcactaaacatggaaaggaacaaccggtaccagccactgcaaaaacatgccaaattgtaaagaccatcgatgttaggaagaaactgcctcaactaatgagcaaaataaccagctaacatcgtaatgacaggatcaaattcacacataacgatattaaccttaaaggtgttacctcattttgaaagtcttgggaaacaggaaaaaattcctaacaaaatgtcagcttttcgaaatcattgtccacatttggattcagttggtgaaataacaaaagaagatttgatacaaaaatcccttggtacttgtcaggattgtaaagtccaaggaccaaatctttgggcatgtctggagaatagatgttcatatgttggctgtggtgaatcacaagtagatcacagcaccatacattctcaggagacaaagcattatctaactgtgaaccttaccactcttcgagtatggtgttatgcttgcagcaaagaagtatttttggataggaaattaggaactcagccttcattgcctcatgtaagacaacctcaccaaatacaagaaaacagtgtccaggattttaaaatacccagtaatacaacattaaaaactcctctggttgccgtatttgatgatctggatatagaagcggatgaagaagatgaacttagggccagaggtcttacaggtttgaaaaatattggaaatacttgttacatgaatgcagctttgcaggctctttctaattgcccacctttgacacagttttttcttgattgtggaggactagctcgaacagataagaaacctgccatttgtaaaagttatctcaaactaatgacagagctgtggcataaaagcaggccaggatctgttgtgcctactactctgtttcaaggaattaaaactgtaaatccaacatttcgggggtattctcagcaggatgctcaagaattccttcgatgtttaatggatttgcttcatgaagaattgaaagagcaagtcatggaagtagaagaagatccgcaaaccataaccactgaggagacaatggaagaagacaagagccagtcggatgtagattttcagtcttgtgaatcttgtagcaacagtgatagagcagaaaatgaaaatggctctagatgcttttctgaagataataatgaaacaacaatgttaattcaggatgatgaaaacaattcagaaatgtcaaaggattggcaaaaagagaagatgtgcaataagattaataaagtaaattctgaaggcgaatttgataaagatagagactctatatctgaaacagtcgacttaaacaaccaggaaactgtcaaagtgcaaatacacagcagagcttcagaatatatcactgatgtccattcgaatgacctgtctacaccacagatccttccatcaaatgaaggtgttaatccacgtttatcggcaagccctcctaaatcaggcaatttgtggccaggattggcaccaccacacaaaaaagctcagtctgcatctccaaagagaaaaaaacagcacaagaaatacagaagtgttatttcagacatatttgatggaacaatcattagttcagtgcagtgtctgacttgtgacagggtgtctgtaaccctcgagacctttcaagatctgtccttgccaattcctggcaaggaagaccttgctaagctgcattcatcaagtcatccaacttctatagtcaaagcaggatcatgtggcgaagcatatgctccacaagggtggatagcttttttcatggaatatgtgaagaggtttgttgtctcatgtgtccctagctggttttggggtccagtagtaaccttgcaagattgtcttgctgccttctttgccagagatgaactaaaaggtgacaatatgtacagttgtgaaaaatgcaaaaagttgagaaatggagtgaagttttgtaaagtacaaaactttcctgagattttgtgcatccaccttaaaagattcagacatgaactaatgttttccaccaaaatcagtacccatgtttcatttccgctagaaggcttggatcttcagccatttcttgctaaggatagtccagctcaaattgtgacatatgatcttctgtcagtcatttgccatcatggaactgcaagtagtggacactatatagcctactgccgaaacaatctaaataatctctggtatgaatttgatgatcagagtgtcactgaagtttcagaatctactgtacaaaatgcagaagcttacgttcttttctataggaagagcagcgaagaggcacaaaaagagaggagaaggatatcaaatttattgaacataatggaaccaagcctccttcagttttatatttctcgacagtggcttaataaatttaagacctttgccgaacctggccctatttcaaataatgactttctttgtattcatggaggtgttcctccaagaaaagctggttatattgaagacctggttttgatgctgcctcagaacatttgggataacctatatagcaggtatggtggaggaccagctgtcaaccatctgtacatttgtcatacttgccaaattgaggcggagaaaattgaaaaaagaagaaaaactgaattggaaatttttattcggcttaacagagcgttccaaaaagaggactctccagctactttttattgcatcagtatgcagtggtttagagaatgggaaagttttgtgaagggtaaagatggagatcctccaggtcctattgacaatactaagattgcagtcactaaatgtggtaatgtgatgcttaggcaaggagcagattctggccagatttctgaagaaacatggaattttctgcagtctatttatggtggagggcctgaagttatcctgcgacctccggttgttcatgttgatccagatatacttcaagcagaagaaaaaattgaagtagaaactcggtctttgtaatttttaggatgtagagagttctaatgaggaatcattttcatgtgccctgacatgtacacatgcgaaaacattcctaaaagcgtgtttatttgctttattttttttcatcatttatcccatttatttcttcttagtgggcattatggaagaatatattaaaatgtgtaatataccacaggttggtatatttagttttaaatacttaccataaagtctttcagtgtaatttttttttgagacagagtcttgctttgtcacccaggctggagtgctgtggtgttacctcagctcactgcagcctccacctcctgggttcaagcgattctcctgcctcagcctctcgagtagctgggattacaggcacctgccaccatgcccggctaatttttgtattttagtagagatggggtttcaccatgttggccaggctagtctcaaactcctgacctcaggtgatccacccacctcggcctcccaaagtgctgggattacaggtgtgagccacagcgcctggcccagtgtaatatttttgaaagaggagggacaattgtgaaatcagtaggttatctttaatctttacactacatgcagatccatagtatcctttgtagtgttgtaaatacttttgctttgaaaactttttcattgtcctaaatcaccctgactctgaccagtctttcagttctccaaaagcccaatttaattgtatagttttgtcatggcttcatataataaagagcctattttaagttgaaagtagtagtcagaaaattgttaatttcctaaagctcaggaaactagggtgtcactttttttgcactgcagcatatacactaactagcttattaaaatttacaaaatgtctttttgaatgtatcaaggatatatttagtttgagtggaatttgtcagcagatatcagtaacttattgccgcttatattgtacaatgttaaacttcaattcctgtaacctggttagtattaatgtcagtgactaaaaaacttagagttagttttagggcactttttattttgagagcatgaagtgtggaatgtgtcactacgattgttgataaagctgaggccacttgcaacttgattttttaaatgaaatagataaagtctttttgaataatatagtatgcactgctatttgcttgattatgtaatgtcaaaagtttaactatattccaagtacaaaaacatactggattacattgaggatgttgaatagcattcatgatggctttgttttggtttggggcagctgtcaccagctaaagcaatgttgttaaaattagctcaataaaaatgtctttaaaatgt

SEQ ID NO: 1748 - DNA, 4327 bp, Homo sapiens
  source 1..4327: mol_type = genomic DNA
ggagacaccggaaggagccgcggctgctgcgggaagtggccagttcaggaggcggaccccccgagggcagcgctgcggggccgttttccggccctcctgacgcgacactgcccctctccgagagctgagaaggaaaagaggagcttgcggaggtgcggctgcaggccgttgttggtcgagctggcgggtcccgcgggccaggccgtggaggtgttacctcattttgaaagtcttgggaaacaggaaaaaattcctaacaaaatgtcagcttttcgaaatcattgtccacatttggattcagttggtgaaataacaaaagaagatttgatacaaaaatcccttggtacttgtcaggattgtaaagtccaaggaccaaatctttgggcatgtctggagaatagatgttcatatgttggctgtggtgaatcacaagtagatcacagcaccatacattctcaggagacaaagcattatctaactgtgaaccttaccactcttcgagtatggtgttatgcttgcagcaaagaagtatttttggataggaaattaggaactcagccttcattgcctcatgtaagacaacctcaccaaatacaagaaaacagtgtccaggattttaaaatacccagtaatacaacattaaaaactcctctggttgccgtatttgatgatctggatatagaagcggatgaagaagatgaacttagggccagaggtcttacaggtttgaaaaatattggaaatacttgttacatgaatgcagctttgcaggctctttctaattgcccacctttgacacagttttttcttgattgtggaggactagctcgaacagataagaaacctgccatttgtaaaagttatctcaaactaatgacagagctgtggcataaaagcaggccaggatctgttgtgcctactactctgtttcaaggaattaaaactgtaaatccaacatttcgggggtattctcagcaggatgctcaagaattccttcgatgtttaatggatttgcttcatgaagaattgaaagagcaagtcatggaagtagaagaagatccgcaaaccataaccactgaggagacaatggaagaagacaagagccagtcggatgtagattttcagtcttgtgaatcttgtagcaacagtgatagagcagaaaatgaaaatggctctagatgcttttctgaagataataatgaaacaacaatgttaattcaggatgatgaaaacaattcagaaatgtcaaaggattggcaaaaagagaagatgtgcaataagattaataaagtaaattctgaaggcgaatttgataaagatagagactctatatctgaaacagtcgacttaaacaaccaggaaactgtcaaagtgcaaatacacagcagagcttcagaatatatcactgatgtccattcgaatgacctgtctacaccacagatccttccatcaaatgaaggtgttaatccacgtttatcggcaagccctcctaaatcaggcaatttgtggccaggattggcaccaccacacaaaaaagctcagtctgcatctccaaagagaaaaaaacagcacaagaaatacagaagtgttatttcagacatatttgatggaacaatcattagttcagtgcagtgtctgacttgtgacagggtgtctgtaaccctcgagacctttcaagatctgtccttgccaattcctggcaaggaagaccttgctaagctgcattcatcaagtcatccaacttctatagtcaaagcaggatcatgtggcgaagcatatgctccacaagggtggatagcttttttcatggaatatgtgaagaggtttgttgtctcatgtgtccctagctggttttggggtccagtagtaaccttgcaagattgtcttgctgccttctttgccagagatgaactaaaaggtgacaatatgtacagttgtgaaaaatgcaaaaagttgagaaatggagtgaagttttgtaaagtacaaaactttcctgagattttgtgcatccaccttaaaagattcagacatgaactaatgttttccaccaaaatcagtacccatgtttcatttccgctagaaggcttggatcttcagccatttcttgctaaggatagtccagctcaaattgtgacatatgatcttctgtcagtcatttgccatcatggaactgcaagtagtggacactatatagcctactgccgaaacaatctaaataatctctggtatgaatttgatgatcagagtgtcactgaagtttcagaatctactgtacaaaatgcagaagcttacgttcttttctataggaagagcagcgaagaggcacaaaaagagaggagaaggatatcaaatttattgaacataatggaaccaagcctccttcagttttatatttctcgacagtggcttaataaatttaagacctttgccgaacctggccctatttcaaataatgactttctttgtattcatggaggtgttcctccaagaaaagctggttatattgaagacctggttttgatgctgcctcagaacatttgggataacctatatagcaggtatggtggaggaccagctgtcaaccatctgtacatttgtcatacttgccaaattgaggcggagaaaattgaaaaaagaagaaaaactgaattggaaatttttattcggcttaacagagcgttccaaaaagaggactctccagctactttttattgcatcagtatgcagtggtttagagaatgggaaagttttgtgaagggtaaagatggagatcctccaggtcctattgacaatactaagattgcagtcactaaatgtggtaatgtgatgcttaggcaaggagcagattctggccagatttctgaagaaacatggaattttctgcagtctatttatggtggagggcctgaagttatcctgcgacctccggttgttcatgttgatccagatatacttcaagcagaagaaaaaattgaagtagaaactcggtctttgtaatttttaggatgtagagagttctaatgaggaatcattttcatgtgccctgacatgtacacatgcgaaaacattcctaaaagcgtgtttatttgctttattttttttcatcatttatcccatttatttcttcttagtgggcattatggaagaatatattaaaatgtgtaatataccacaggttggtatatttagttttaaatacttaccataaagtctttcagtgtaatttttttttgagacagagtcttgctttgtcacccaggctggagtgctgtggtgttacctcagctcactgcagcctccacctcctgggttcaagcgattctcctgcctcagcctctcgagtagctgggattacaggcacctgccaccatgcccggctaatttttgtattttagtagagatggggtttcaccatgttggccaggctagtctcaaactcctgacctcaggtgatccacccacctcggcctcccaaagtgctgggattacaggtgtgagccacagcgcctggcccagtgtaatatttttgaaagaggagggacaattgtgaaatcagtaggttatctttaatctttacactacatgcagatccatagtatcctttgtagtgttgtaaatacttttgctttgaaaactttttcattgtcctaaatcaccctgactctgaccagtctttcagttctccaaaagcccaatttaattgtatagttttgtcatggcttcatataataaagagcctattttaagttgaaagtagtagtcagaaaattgttaatttcctaaagctcaggaaactagggtgtcactttttttgcactgcagcatatacactaactagcttattaaaatttacaaaatgtctttttgaatgtatcaaggatatatttagtttgagtggaatttgtcagcagatatcagtaacttattgccgcttatattgtacaatgttaaacttcaattcctgtaacctggttagtattaatgtcagtgactaaaaaacttagagttagttttagggcactttttattttgagagcatgaagtgtggaatgtgtcactacgattgttgataaagctgaggccacttgcaacttgattttttaaatgaaatagataaagtctttttgaataatatagtatgcactgctatttgcttgattatgtaatgtcaaaagtttaactatattccaagtacaaaaacatactggattacattgaggatgttgaatagcattcatgatggctttgttttggtttggggcagctgtcaccagctaaagcaatgttgttaaaattagctcaataaaaatgtctttaaaatgtaaaa

SEQ ID NO: 1749 - DNA, 498 bp, Homo sapiens
  source 1..498: mol_type = genomic DNA
gttttcatcctggttttgggacagcggcaatcatggcgccacctgtgagatactgcatccccggcgaacgtctgtgtaacttggaggagggcagcccgggcagcggcacctacacccgccacggctacatcttttcgtcgcttgccggctgtctgatgaagagcagcgagaatggcgcgcttccagtggtgtctgtagtgagagaaacagagtcccagttactgccagatgtgggagctattgtaacctgtaaggttgaaatttataagagtttccgcccaggtgacattgtcttggccaaagtgatctccttaggtgatgcacagtccaactacctgctaaccaccgccgagaacgagctgggagtggtggtagcccacagtgagtcaggtatccagatggttcccatcagctggtgtgagatgcagtgccctaagacccacactaaagaattccggaaagtagcccgagtacaacccgaattcttgcagacctaag

SEQ ID NO: 1750 - DNA, 718 bp, Homo sapiens
  source 1..718: mol_type = genomic DNA
cggcaatcatggcgccacctgtgagatactgcatccccggcgaacgtctgtgtaacttggaggagggcagcccgggcagcggcacctacacccgccacggctacatcttttcgtcgcttgccggctgtctgatgaagagcagcgagaatggcgcggtctctagcatcaattcacgctttgccaaagtacacatcctgtatgtggggtccatgcctcttaagaactcttttcgaggaactatccgcaaggaagatgtccgagcaactgaaaaagacaaggttgaaatttataagagtttccgcccaggtgacattgtcttggccaaagtgatctccttaggtgatgcacagtccaactacctgctaaccaccgccgagaacgagctgggagtggtggtagcccacagtgagtcaggtatccagatggttcccatcagctggtgtgagatgcagtgccctaagacccacactaaagaattccggaaagtagcccgagtacaacccgaattcttgcagacctaagaagccactttttaccctatggaagggggtaagctgttcctgagtataacaccaagatgctgctgtctttattcaaacacctggcgtcggccaacagccacttccagaaaaatcttccagtttacgctgtagatggaacatgtttctgtgaacctatcagtggatttcattctcttgagtaataaatcttatctttt

SEQ ID NO: 1751 - DNA, 739 bp, Homo sapiens
  source 1..739: mol_type = genomic DNA
catggcgccacctgtgagatactgcatccccggcgaacgtctgtgtaacttggaggagggcagcccgggcagcggcacctacacccgccacggctacatcttttcgtcgcttgccggctgtctgatgaagagcagcgagaatggcgcgcttccagtggtgtctgtagtgagagaaacagagtcccagttactgccagatgtgggagctattgtaacctgtaaggtctctagcatcaattcacgctttgccaaagtacacatcctgtatgtggggtccatgcctcttaagaactcttttcgaggaactatccgcaaggaagatgtccgagcaactgaaaaagacaagatctccttaggtgatgcacagtccaactacctgctaaccaccgccgagaacgagctgggagtggtggtagcccacagtgagtcaggtatccagatggttcccatcagctggtgtgagatgcagtgccctaagacccacactaaagaattccggaaagtagcccgagtacaacccgaattcttgcagacctaagaagccactttttaccctatggaagggggtaagctgttcctgagtataacaccaagatgctgctgtctttattcaaacacctggcgtcggccaacagccacttccagaaaaatcttccagtttacgctgtagatggaacatgtttctgtgaacctatcagtggatttcattctcttgagtaataaatcttatcttttcaag

SEQ ID NO: 1752 - DNA, 3269 bp, Homo sapiens
  source 1..3269: mol_type = genomic DNA
cagggaaggtggggctatggcagctgctagggaccctccggaagtatcgctgcgagaagccacccagcgaaaattgcggaggttttccgagctaagaggcaaacttgtagcacgtggagaattctgggacatagttgcaataacagcggctgatgaaaaacaggaacttgcttacaaccaacagctgtcagaaaagctgaaaagaaaggagttaccccttggagttcaatatcacgtttttgtggatcctgctggagccaaaattggaaatggaggatcaacactttgtgcccttcaatgtttggaaaagctatatggagataaatggaattcttttaccatcttattaattcactctgatgaatggaagaaaaaagtcagtgaatcatatgttatcacaatagaaagattagaagatgacctgcagatcaaggaaaaagaactgacagaactaaggaatatatttggctctgatgaagccttcagtaaagtcaatttaaattaccgcactgaaaatgggctgtctctacttcatttatgttgcatttgtggaggcaagaaatcacatattcgaactcttatgttgaaagggctccgcccatctcgactgacaagaaatggatttacagccttgcatttagcagtttacaaggataatgcagaattgatcacttctctgcttcacagtggagctgatatacagcaggttggatacggtggcctcactgccctccatattgctacaatagctggccacctagaggctgctgatgtgctgttgcaacatggagctaatgtcaatattcaagatgcagtttttttcactccattgcatattgcagcgtactatggacatgaacaggtaactcgccttcttttgaaatttggtgctgatgtaaatgtaagtggtgaagttggagatagacccctccacctagcatctgcaaaaggattcttgaatattgcaaaactcttgatggaagaaggcagcaaagcagatgtgaatgctcaagataatgaagaccatgtcccactccatttctgttctcgatttggacaccatgatatagttaagtatctgctgcaaagtgatttggaagttcaacctcatgttgttaatatctatggagatacccccttacacctggcatgctacaatggcaaatttgaagttgccaaggaaatcatccaaatatcaggaacagaaagtctgactaaggaaaacatcttcagtgaaacagcttttcatagtgcttgtacctatggcaagagcattgacctagtcaaatttcttcttgatcagaatgtcataaacatcaaccaccaaggaagggatgggcacactggattacactctgcttgctaccacggtcacattcgcctggttcagttcttactggataatggagctgatatgaatctagtggcttgtgatcccagcaggtctagtggtgaaaaagatgagcagacatgtttgatgtgggcttatgaaaaagggcatgatgccattgtcacactcctgaagcattataagagaccacaagatgaattgccctgtaatgaatattctcagcctggaggagatggctcctatgtgtctgttccatcacccttggggaagattaaaagcatgacaaaagagaaggcagatattctcctcctaagagctggattgccttcacatttccatcttcagctctcagaaattgagttccatgagattattggctcaggttcttttgggaaagtatataaaggacgatgcagaaataaaatagtggctataaaacgttatcgagccaatacctactgctccaagtcagatgtggatatgttttgccgagaggtgtccattctctgccagctcaatcatccctgcgtaattcagtttgtgggtgcttgcttgaatgatcccagccagtttgccattgtcactcaatacatatcagggggttctctgttctccctccttcatgagcagaagaggattcttgatttgcagtctaaattaattattgcagtagatgttgccaaaggcatggagtaccttcacaacctgacacagccaattatacatcgtgacttgaacagtcacaatattcttctctatgaggatgggcatgctgtggtggcagattttggagaatcaagatttctacagtctctggatgaagacaacatgacaaaacaacctgggaacctccgttggatggctcctgaggtgttcacgcagtgcactcggtacaccatcaaagcagatgtcttcagctatgctctgtgtctgtgggaaattctcactggcgaaattccattcgctcatctcaagccagcggctgcggcagcagacatggcttaccaccacatcagacctcccattggctattccattcccaagcccatatcatctctgctgatacgagggtggaacgcatgtcctgaaggaagacccgaattttctgaagttgtcatgaagttagaagagtgtctctgcaacattgagctgatgtctcctgcatcaagtaacagcagtgggtctctctcaccttcttcttcttctgattgcctggtgaaccggggaggacctggccggagtcatgtggcagcattaagaagtcgtttcgaattggaatatgctctaaatgcaaggtcctatgctgctttgtcccaaagtgctggacaatattcctctcaaggtctgtctttggaggagatgaaaagaagtcttcaatacacacccattgacaaatatggctatgtatccgatcccatgagctcaatgcattttcattcttgccgaaatagtagcagctttgaggacagcagctgacagcattcggcgtatacctaaggagagttttttccccgaactgacagcaacgattccaaccacggcaagctggcttccaactataacattttactctcaaaggtctccttaaattgggcttgtttttacttgtcctatttaattccccactattagcaggctttggatttgtgcctaaggaataatatgcaaaagaaccaagacagaatgtatatgaagaattgtttttaattttgtaaattaaaaaaaaatttagatcgttacttggaaatggagcctaagtctgtggtggacagataataattatgttttcctgggctgaattatgtagacttgtgtttgacagctatgggtttatttcttagaacattgttcattttcttttctcattatgttacttctagtgttcacctctgtgattaaagattctttggtgaaatag

SEQ ID NO: 1753 - DNA, 1377 bp, Homo sapiens
  source 1..1377: mol_type = genomic DNA
gtgctgtgcggcgcggtctcagggaaggtggggctatggcagctgctagggaccctccggaagtatcgctgcgagaagccacccagcgaaaattgcggaggttttccgagctaagaggcaaacttgtagcacgtggagaattctgggacatagttgcaataacagcggctgatgaaaaacaggaacttgcttacaaccaacagctgtcagaaaagctgaaaagaaaggagttaccccttggagttcaatatcacgtttttgtggatcctgctggagccaaaattggaaatggaggatcaacactttgtgcccttcaatgtttggaaaagctatatggagataaatggaattcttttaccatcttattaattcactctgtatctttccagatataccagaatgctctggcaaaacatcctgtatcattcaaagcatactggattcaagatgttctgtggcacctggctcagttgtggagtattccagattggggcctgatgtttcagttggggaaaactgcattattagtggttcttacatcctaacaaaagctgccctccccgcacattcttttgtatgttccttaagcttaaagatgaatagatgcttaaagtatgcaactatggcatttggagtgcaagacaacttgaaaaagagtgtgaaaacattgtcagatataaagttacttcaattctttggagtctgtttcctgtcatgcttagatgtttggaatcttaaagttacagaggaactgttctctggtaacaagacatgtctgagtttgtggactgcacgcattttcccagtttgttcttctttgagtgactcagttataacatccctaaagatgttaaatgctgttaagaacaagtcagcattcagcctgaatagctataagttgctgtccattgaagaaatgcttatctacaaagatgtagaagatatgataacttacagggaacaaatttttctagaaatcagtttaaaaagcagtttgatgtagagatattttaaatattgtacactttgcctttttgagtaacattccagagataggtattttttgtaggctgtttcactgaactcagttaatgaaaactgtattaacataattgttgtagcataatattaatagtgcaaaagtacatataagtcattttgatgaaaaatattccaagactaagttgagaaaagagatactattttggatgtgtatcagtatttttgtttttaataatgattgatttgtggagcattgttttttcacataattagttttaaaggtaattttctaagcatacctttggaatttttccatcttttttgaggcttttggtccagtgaagttctaagtattcactggcacttctctcctca

SEQ ID NO: 1754 - DNA, 3224 bp, Homo sapiens
  source 1..3224: mol_type = genomic DNA
gcgtgctgtgcggcgcggtctcagggaaggtggggctatggcagctgctagggaccctccggaagtatcgctgcgagaagccacccagcgaaaattgcggaggttttccgagctaagaggcaaacttgtagcacgtggagaattctgggacatagttgcaataacagcggctgatgaaaaacaggaacttgcttacaaccaacagctgtcagaaaagctgaaaagaaaggagttaccccttggagttcaatatcacgtttttgtggatcctgctggagccaaaattggaaatggaggatcaacactttgtgcccttcaatgtttggaaaagctatatggagataaatggaattcttttaccatcttattaattcactctggtggctacagtcaacgacttccaaatgcaagtgctctgggaaaaattttcactgctttacctcttggtaaccccatttatcagatgctagaattaaaactagccatgtacattgatttccccttaaatatgaatcctggaattctggttacctgtgcagatgatattgaactttatagtattggagaatttgagtttattaggtttgacaaacctggctttactgctttagctcatccttctagtttgacgataggtaccacacatggagtatttgtcttagatccttttgatgatttaaaacatagagaccttgaatacaggtcttgccatcgtttccttcataagcccagcatagaaaagatgtatcagtttaatgctgtgtgtagacctggaaatttttgtcaacaggactttgctgggggtgacattgccgatcttaaattagactctgactatgtctacacagatagcctattttatatggatcataaatcagcaaaaatgttacttgctttttatgaaaaaataggcacactgagctgtgaaatagatgcctatggtgactttctgcaggctttgggacctggagcaactgtggagtacaccagaaacacatcaaatgtcattaaagaagagtcagagttggtagaaatgaggcagagaatatttcatcttcttaaaggaacatcactaaatgttgttgttcttaataactccaaattttatcacattggaacaaccgaagaatatttgttttactttacctcagataacagtttaaagtcagagctcggcttacagtccataacttttagtatctttccagatataccagaatgctctggcaaaacatcctgtatcattcaaagcatactggattcaagatgttctgtggcacctggctcagttgtggagtattccagattggggcctgatgtttcagttggggaaaactgcattattagtggttcttacatcctaacaaaagctgccctccccgcacattcttttgtatgttccttaagcttaaagatgaatagatgcttaaagtatgcaactatggcatttggagtgcaagacaacttgaaaaagagtgtgaaaacattgtcagatataaagttacttcaattctttggagtctgtttcctgtcatgcttagatgtttggaatcttaaagttacagaggaactgttctctggtaacaagacatgtctgagtttgtggactgcacgcattttcccagtttgttcttctttgagtgactcagttataacatccctaaagatgttaaatgctgttaagaacaagtcagcattcagcctgaatagctataagttgctgtccattgaagaaatgcttatctacaaagatgtagaagatatgataacttacagggaacaaatttttctagaaatcagtttaaaaagcagtttgatgtagagatattttaaatattgtacactttgcctttttgagtaacattccagagataggtattttttgtaggctgtttcactgaactcagttaatgaaaactgtattaacataattgttgtagcataatattaatagtgcaaaagtacatataagtcattttgatgaaaaatattccaagactaagttgagaaaagagatactattttggatgtgtatcagtatttttgtttttaataatgattgatttgtggagcattgttttttcacataattagttttaaaggtaattttctaagcatacctttggaatttttccatcttttttgaggcttttggtccagtgaagttctaagtattcactggcacttctctcctcaactgtaattctatttttaataataaaaatggcatactgtagggtcttcagagtagtgtaggaatactgtagaaatactttttcagaaacgaatccatagctgacaaattcactcagtgcccaatatattgtgattattttcgttgataaagaactagatacaaagacctctgaaattgatgataaaatttgtatctcattaattttatcaaaatgaaactaaaagtacatatgtattatacacttgaacatgtgtttgtatatctttaaaattttcctttatgttccattccataggaaaacacacatatgcacacaaaactcagttatctgtggggaaagtggtagtaataattgagattcatcaataatcatataatttcactatagacattacttgcattatctcctatcagtccttctaacaaaacttcaattaccagatgaactgactttagttttcatcttattttttgtccacatgctggtgatgctgagaaacaataattggcccaaatgcagacatcaagaagcaggcaggaaaatggaaaaactgagataatacacaggtgataaacagtttcgagaaaataaaaattggctagaatctcaagttatgtgtttctatattggtataagcatataagtgaaaagtcttataagtgtaatagagaaaagatttgtcagtgtgtttttttaaatgaaataactagtctgtgctactttatgtcaatataaaaattggtaaactagaagtaacttgtccacaaccctcagttatgatacttatgtgcgtgtttttttttccaaagtttttcccaaggagaagatacaaatatatggtagctattgtttaaaaatgattgatttacttgcagatttttcagaggatgttatgtctttgtcattcattaaatgttcaaaattgtagttttaccaaatctgaagtgccatcagttataagaatcaccattattttatgttccattaagaaaaacacaataaaacatgacactgctttttttgtta

SEQ ID NO: 1755 - DNA, 923 bp, Homo sapiens
  source 1..923: mol_type = genomic DNA
gttttcatcctggttttgggacagcggcaatcatggcgccacctgtgagatactgcatccccggcgaacgtctgtgtaacttggaggagggcagcccgggcagcggcacctacacccgccacggctacatcttttcgtcgcttgccggctgtctgatgaagagcagcgagaatggcgcgcttccagtggtgtctgtagtgagagaaacagagtcccagttactgccagatgtgggagctattgtaacctgtaaggtctctagcatcaattcacgctttgccaaagtacacatcctgtatgtggggtccatgcctcttaagaactcttttcgaggaactatccgcaaggaagatgtccgagcaactgaaaaagacaaggttgaaatttataagagtttccgcccaggtgacattgtcttggccaaagtgatctccttaggtgatgcacagtccaactacctgctaaccaccgccgagaacgagctgggagtggtggtagcccacagtgagtcaggtatccagatggttcccatcagctggtgtgagatgcagtgccctaagacccacactaaagaattccggaaagtagcccgagtacaacccgaattcttgcagacctaagaagccactttttaccctatggaagggggtaagctgttcctgagtataacaccaagatgctgctgtctttattcaaacacctggcgtcggccaacagccacttccagaaaaatcttccagtttacgctgtagatggaacatgtttctgtgaacctatcagtggatttcattctcttgagtaataaatcttatcttttcaaggcaccaacaaacaaaactgtgatattggaaatagcctatccctcctgacagtccttataaatacatattttttgctatgataaaacttttttactaaaagga

SEQ ID NO: 1756 - DNA, 4069 bp, Homo sapiens
  source 1..4069: mol_type = genomic DNA
gagcaagaggaagatggccgtgccctgtttttcggtgtaaggcagcgacggcggctgcgacggcgagactgagatcctggtgtcgtgggcacctgagttctagcttcccccagcgagcgcgcgtcccttcgtgcctaggcgagagccggctcttccccgggagatgcgtttgtcccaggctcgggggctcagtgggagttcatgctgcgctggaggctcttggccaccgctctaatcgccttgtgccgccgcagcgccagctccgtcgccagcggtgagcctcccgattcccccccttgcccctggcggcggcgatgaccggggagaagatccgctcactgcggagggaccacaagcccagcaaagaagaaggggacctgctggagcccggggatgaggaagcggcggctgccctcggcggtacctttaccagaagcaggattggcaagggcggcaaagcttgtcataagatcttcagtaaccatcaccaccggctacagctgaaggcagctccggcctcctccaatccccccggcgccccggctctgccgctgcacaattcctccgtgactgccaactcccagtccccggcccttctggccggcaccaaccccgttgctgtcgtcgcggatggaggcagttgccccgcacactacccggtgcacgagtgcgtcttcaagggggatgtgaggagactctcctctctcatccgcacgcacaatatcgggcagaaagataatcacggaaatactcctttacaccttgctgtgatgttaggaaataaagaatgtgcccatttacttttggctcacaatgctccagtcaaggtgaaaaatgctcagggatggagccctctggcggaagccatcagctatggagataggcagatgattacagctcttttgaggaagcttaagcagcaatccagggaaagtgttgaagaaaaacgacctcgattattaaaagccctgaaagagctaggtgacttttatctagaacttcactgggattttcaaagctgggtgcctttactttcccgaattctgccttccgatgcatgtaaaatatacaaacaaggtatcaatatcaggcttgacacaactctcatagactttactgacatgaagtgccaacgaggggatctaagcttcattttcaatggggatgcggcgccctctgaatcttttgtagtattagacaatgaacaaaaagtttatcagcgaatacatcatgaggaatcagagatggaaacagaagaagaggtggatattttaatgagcagtgatatttactctgcaactttatcaacaaaatcaatttctttcacgcgtgcccagacaggatggctttttcgggaagataaaacagaaagagtaggaaactttttggcagacttttacctggtgaatggacttgttttagaatcaaggaaaagaagagaacatctcagtgaagaggatattcttcgaaataaggccatcatggagagtttgagtaaaggtggaaacataatggaacagaattttgagccgattcgaagacagtctcttacacctcctcctcagaacactattacatgggaagaatatatatctgctgaaaatggaaaagctcctcatctgggtagagaattggtgtgcaaagagagtaagaaaacgtttaaagctacgatagccatgagccaggaatttcccttagggatagagttattattgaatgttttagaagtagtagctcccttcaagcactttaacaagcttagagaatttgttcagatgaagcttcctccaggctttcctgtaaaattagatatacctgtgtttcccacaatcacagccactgtgacttttcaggagtttcgatacgatgaatttgatggctccatctttactatacctgatgactacaaggaagacccaagccgttttcctgatctttaactgacgtggaaaaggatgccgtctaaccaaggaaagaaaatacagagaccctagaagtggatccaaatagaagggacaaatgctttcagtgaagaaaagggaattacacattgaatcgacacatcagtaatacgatacagtgaaatgggcctctaataagaatttcagcgagttttctgatgtgccattttttgtctttttaaaaatatacatattataaatgtaatagtttgacacattaatgaccctaagacctgcgtatgtgaagcagctatgagtgctgtgatttgtttttaaaaatttttacacttcttgttgaaatatatatgcatataaatatatctatatctatatctatatctaaaacactcctggaccattaacgtaaattaaatgtcttaagagatatggagcccttttaaacttgtcatctttatgcaaggtgacatttataaatattccttcgagctttgttttcataaaatgtaaactatgtaacattatgtatagttcagtaatttgaatgtttgttcaatataatgaactagaaggaatgcaattttctgtagatgaatgaaccaaatggtaaccattaaacaattgcatttatatgttgcaatacatttcagaaggagcgttcactctgcagggaataaggtacctcctttagcaccttagtgcaattcattgtggtgctatttgtttttacctgaatgtttgttactaatcttcctttcatagaacctctattttttttttttctaaacttgagtttgagtccttgttatggtcatcataaggtaatggttagcatgtttaaagatattcctcttccaaatctcagcactttaaaaaaaaatccaaatttttaaacttgcttcctaataagtacacatcggtctgattattttgtttgtttttagtagaatatggatgcattggtgtcagttttaaaaaacaatacacatattttggacaaccctacatatttaatcctttcaaaataagataaaaacattttatatgctaacagaatatatttgttacaagttaaagtccagaagtatacacaagattgattactcctattattttttttaaatcacaggaaaatattgatttcattgtctccaaagtgataaaatcatgtattactcatttttgcacttaaaatttttcttatttattccaaggtggtttgaaggtccaagtatgaaaataaattagggggattaatgtataacagttataaagtatcatgttgtattaaagagcttacttagattgatgtttttaaaatgtatcctgatgaatgtctcaagaatgcatctgtcaagttttttagactgaccagtagcttaaacttttttcaggattttaggtaatttgaaaggagtttagagacccttattgaaaatatgatttaaaaatccaaagcataaaccgtaagaaaaattttaaataaacatctttaaagctgcatcttccatactgatacatgcattgcgtatgttgacattaaatacattttataatgaagaaaaataatcatagtaaaaaattgaaagacctaattactacgttacatggacctattgaattttgggggaacgtgttagtaaacccagactagctttgttgaatagaagttgatcgctgttatttaggaaatgggtagatcaaatgacttagagactgaattatcctatcagtggttacatggggttggagacactgaaaggcagtgatcactgttgcttctaggctcccttactttgtaggaatatggtatactttcaggaatatgctatatatgttttcataagtacagacaccttagggaagaaaaaaagtgggtaattgaagcttatggttgattaatttcctaacagcacagctatgaatattttgctggggtacactggaggtaggaagactactggaaatttttgcacttgaattttgtttttaaagcttttttctttaaagaatggtagaaacagattatccattccaaaatgtcttttctctgatcacaaagagcaaacaaatgtcaatatctcttatgatggtgaaaaaaaggaattaatcgatgcaaataaacttttcacagtattacttttaatgaa

SEQ ID NO: 1757 - DNA, 2651 bp, Homo sapiens
  source 1..2651: mol_type = genomic DNA
ggattccggctcccgcggctgcaggcgcgcggctagagtgcctggcgggctccggcttccgcgtccgccccggccccggtccagacttagtcttcagctccgcgcccgctccgccgcggcccaccgcgcccgccggcagccgagcccccagcgacgcccgcacagctccgggtgcccagacagggggccatgccgtgccggagggaggaggaagaggaagccggcgaggaggcggagggggaggaagaggaggaggacagcttcctcctactgcagcagtcagtggcgctgggcagctcgggcgaggtggaccggctggtggcccagatcggcgagacgctgcagctggacgcggcgcagcacagcccggcctcgccgtgcgggcccccgggggcgccgctgcgggccccggggcccctggctgcggcggtgccggcggacaaggccaggtccccggcggtgccgctgctgctgccgcccgcgttggcggagactgtgggcccggcgccccctggggtcctgcgctgcgccctgggggaccgcggccgcgtgcggggccgcgctgcgccctactgcgtggccgagctcgccacaggccccagcgcgctgtccccactgccccctcaggccgaccttgatgggcctccgggagctggcaagcagggcatcccgcagccgctgtcgggtccgtgccggcgaggatggctccggggcgccgccgcctcccgccgcctgcagcagcgacgcgggtcccaaccagaaacccgcacaggcgacgacgacccgcaccggcttctgcagcagctagtgctctctggaaacctcatcaaggaggccgtgcgaaggcttcattcgcgacggctgcagttacgtgcaaagcttccccaacgcccgctcctgggacctctgtcggccccggtgcatgaacccccttcgcctcgcagccctcgcgcggcctgcagtgaccctggcgcctccgggagggcgcagctcagaactggcgacggcgttcttgtgcctggcagctaacacgcccggggtggccacagcgccagcctcagactggagggcaaggggttcccttgagggctgcagttctactcaggctggtggagaactctggcttttggaagcgagagtaaaaagctaatgacgaggaaccgaaaaatcgcgagtgtttcgcgggtaactggggttgagggccaaaatatttggaatgaaggactttggccctatttaaggcagattttacagagcgcacctcaaacgtacaagtcagtaggactccttatttggcgtgacccgacctggccgcggagcctgcatttcctcgcagcctctcagtgccctccagccccgcgaccatgtggccacaatccacgcttctccggatcgcggtgcgccggaaccacggaggatgatgccagttacttgctttaccttttcagggctggctcctgatccactttgggggaggagaacatgagtagataatttcagggtgcagcccaatctgccagacttaaaaaaaccatcttgtgtctttggaggtgctgcttaataccaaacatgcggtgccatgaagggaccctttgggggttgaataggagttaacccctgcgctctctttgcaactgtctctcttctcagagtggtgggggaaggctgtacgacacgggtggggaaaggaggtgggggcggggagtattgaatggtggtggaagggtagagaggcgcggagtgaaccccacgccctgtctaaagtgtattttcagagccggcccgcctctcctcggttcaaggtcactgtttcctgggcacgcactgggttgcgggacagagtagccaggttctgccggtgctcggagaagagcgcagtgttttgcaagtgctggagtctcctgaggacacgcgcgtcgccgccaccgcgggtgtgggaaagcgcggacgtgctgggcggctgtgcttcggtaggcgaccaccgcccctggccgcgctccgggctttcacggaaactcccgagaccgggccctgggttcctcctctcctactcggctctgcagtcctactcaagcgggtggctctgggatcctgggggcctgggttgggggctagggagacgccatgtgatggacactccagggacacacagcctagcacagcagcttataatgggctctccggggccatttgcaataacagctgcaattccctggatagacgagttgatttcctccctctgcccctcccccagccatgccagctggcctttgtaagtgcaggaaaccgagtagaaaatgtgaccctccaaatggagaagctgcaggctttgccattgtgaaccatggtgaagtgcttggaacatactgttcactcactctaaaggcgctgagactgtgctgttgttctcgtttttatagtcaatggcttgttcatcatccagatgtggctactgacatatctacacttcgcaccggagtgtctggaattgtggctatcctgattataggattttaacttaactgaaatgcctgctttgaataaatgtgttgggttttttgtttggttttattttatacttgccatcagtgaaaaagatgtacagaacacatttctctgatctccataaacatgaaaacacttgaaatctc

SEQ ID NO: 1758 - DNA, 1931 bp, Homo sapiens
  source 1..1931: mol_type = genomic DNA
gtgcgacggtcacctcggtttgggtgagtccctgggttcgagcccgggccccgccagctgccgagttgcctctcggtgccggactgtgactccctctggccggccctgcactctggcctcctgggacgtcatctggagggatagagccaggcctgggactccttttgggagagtttccgttcttctattccgtgctgtccggccaggacccctcagggacttctgtggggcaggggcgaatcatgcatggcctagatgaccccatgcctagaaaaaggcagtgcggggcggtggcggcgcgcacggccgagtgaagcagatagcgtccccggggctggagcccggtagcagggccgggcgttgtggcgcgtgcctgtaatcccagctactcgggaggctgaggcaggagaatcgcttgaatccgggagatggaggttgcagtgagccgagatcatgccactgcactccagcctgggcaacaagagcgaaactctgtctcaaaaaaaaaacaacaacaacaaagaaaaaacaaaacgaaacagcaggaacccgccaagaacagccttgaaggaagggaagatggaagagttgagtcaggccctggctagtagcttttctgtgtctcaagatctgaacagcacagctgccccacacccccgcctatcccagtacaagtccaagtacagttccttggagcagagtgagcgccgccggaggttactggaactgcagaaatccaagcggctggattatgtgaaccatgccagaagactggctgaagatgactggacagggatggagagtgaggaagaaaataagaaagatgatgaagaaatggacattgacactgtcaagaagttaccaaaacactatgctaatcaattgatgctttctgagtggttaattgacgttccttcagatttggggcaggaatggattgtggtcgtgtgccctgttggaaaaagagcccttatcgtggcctccaggggttctaccagtgcctacaccaagagtggctactgtgtcaacaggttttcttcacttctgccaggaggcaacaggcgaaactcaacagcaaaagactacaccattctagattgcatttacaatgaggtaaaccagacctactacgttctggatgtgatgtgctggcggggacaccctttttatgattgccagactgatttccgattctactggatgcattcaaagttaccagaagaagaaggactgggagagaaaaccaagcttaatccttttaaatttgtggggctaaagaacttcccttgcactcccgaaagcctgtgtgatgtgctatctatggatttcccttttgaggtagatggacttctcttctaccacaaacagacccactacagccccggaagcactcccttggtgggctggctgcgcccctacatggtgtcagatgtccttggtgtagctgtgccggctggcccgctgaccaccaagccagactatgctgggcaccagctccagcagattatggagcacaagaagagccagaaggaaggcatgaaggagaaactcacacacaaggcctctgagaatgggcactatgaattggagcacctgtctactcccaagttgaagggttcttcccatagcccagaccaccctggatgcctcatggagaattaaagagagaagcctccttaaggagccacaggatggtacctggccccaaaaggaatcctggagaggaggacagtgacaacaggtgacttcattctttagagtgaactttccaaacccagtccagctggaaacagcttatctataatctgaaatgctggctcaaacagttatggggaggttcccagattgcgtagcattcagattgatttgagcagctcctactgtgataagtgtatcccagatccacaatgtaaatatatgtgatttgtaag

SEQ ID NO: 1759 - DNA, 2362 bp, Homo sapiens
  source 1..2362: mol_type = genomic DNA
cgcaggaagtggctccagggcgcacgcgcgttgtttccgcggtagtcagggcagtttctaccgcaggcttaaggaggcttcgggctcctgggatttctgtccgcgctcctggccctcgtccttcgcgccagagcaggttcaaaatgagcctgtttggaacaacctcaggttttggaaccagtgggaccagcatgtttggcagtgcaactacagacaatcacaatcccatgaaggatattgaagtaacatcatctcctgatgatagcattggttgtctgtcttttagcccaccaaccttgccggggaactttcttattgcaggatcatgggctaatgatgttcgctgctgggaagttcaagacagtggacagaccattccaaaagcccagcagatgcacactgggcctgtgcttgatgtctgctggagtgacgatgggagcaaagtgtttacggcatcgtgtgataaaactgccaaaatgtgggacctcagcagtaaccaagcgatacagatcgcacagcatgatgctcctgttaaaaccatccattggatcaaagctccaaactacagctgtgtgatgactgggagctgggataagactttaaagttttgggatactcgatcgtcaaatcctatgatggttttgcaactccctgaaaggtgttactgtgctgacgtgatataccccatggctgtggtggcaactgcagagaggggcctgattgtctatcagctagagaatcaaccttctgaattcaggaggatagaatctccactgaaacatcagcatcggtgtgtggctatttttaaagacaaacagaacaagcctactggttttgccctgggaagtatcgaggggagagttgctattcactatatcaaccccccgaaccccgccaaagataacttcacctttaaatgtcatcgatctaatggaaccaacacttcagctcctcaggacatttatgcggtaaatggaatcgcgttccatcctgttcatggcacccttgcaactgtgggatctgatggtagattcagcttctgggacaaagatgccagaacaaaactaaaaacttcggaacagttagatcagcccatctcagcttgctgtttcaatcacaatggaaacatatttgcatacgcttccagctacgactggtcaaagggacatgaattttataatccccagaaaaaaaattacattttcctgcgtaatgcagccgaagagctaaagcccaggaataagaagtagtggctggagactctggctcagccagagttgtttctctccactctgcctcatctctgtacgaatttgggtcccagccttgttgggttgtcagccatggacatggatttcaacccctggagaaaacgatgtcattgttcagcagctgagagcccaggcgtccgcggcgacttgccgtctctccattccactgcctgttgcagagtttttctgtaactaagggggttgaggttattgtagacgttagattgcgggcaccgccagggattttgcagcgcttcagtgtacgtgttagagaatattggaaaagcgtctgtgagccccgtgctgtattttgtaataaagtcttttgcagattgcttcccgagcttcctttgtccttttctccccttgcccaccccgtaacctcaggaacatgcgtcctgcccagcatcagcgtggggttttgagttgagatttcagacaccctctgggaaatgcggcaaccttaggggaaagggagtccccagctgcgctcacttctgctgcgcggaacggcagcctctgtgagccctggtgggcagagtttgaatgtgtttttccttgcttccctcattcccatcttcaaaatccccagtgctttctggccttgctgctcagatttccgagtgactcaaatggggactgttacttgtgctgggtgacaggccatttgtgggtaacctcctaaggcccaagtgggtgacacttgcgtgactttcaagttagaacccaagccccctgcatgggaattgccctgaactcttacccaccccggtcccctgcatgggaattgccctgaaccctcagtagtggttgtttggctgttcttttgtattttgtgtaatttaaaattcctggttggtaagtattcaaaatgaaattcagctgggctgagaaaaagtgtgacttttgggtctgtcactgtatttctcacctgtgatctcaaatgcttcttaggcctttctgtttggactaatgtgtgaagtctgacttgctgagtgtaaaattctagtatcgatagtgttgtaagatgtgtttgcctactcataaaaaacaatgaaaataaaattttctactggaagagaccacctgca

SEQ ID NO: 1760 - DNA, 3679 bp, Homo sapiens
  source 1..3679: mol_type = genomic DNA
tagtaacaagtgatgatctgcttccaatacctagtgatgcatatgatgtcttacttttgcccatgcaagctgtcagatgttcattatctgatattcctgatcatataccagaagaagtggtggtgtggtttcaggagactattttagataagtcattgaaggctttagttgtagcaaaagatccagatggaacactgattatagaactatatggtgacaatattcaaattagtgctagtattaataagaagttggggctacttagttacaaagatagaataagaaaaaaagaaagtgaagtcctctgttctacaactgaaactcttgaagaaaaaaatgagaatatgaagttgccatgtacagagtatttaagtaaatcagtagggtacaagttacctaataaagaaattttggaagagtcatataaacctcagatcaactcatcatacaaggaactcaaacttttacaaagtttaacaaaaacaaacttagtcactcaatatcaagactctgtgggaaataaaaatagtcaagtgtttccattaacaacagaaaagaaagaagaaatttctgctgagacacccttgaaaacagcaagagtagaagctactctttcagagagaaaaataggagattcatgtgacaaagatttgcctctgaaattttgtgagttcccacagaagactataatgcctggatttaaaacaactgtatatgtttctcatataaatgacctttcagacttttatgttcaactaatagaagatgaagctgaaattagtcatctttcagagagattaaacagtgttaaaacaaggcccgaatattatgtaggtccacctttgcaaagaggagatatgatatgtgctgttttcccagaagataatttatggtatcgtgctgtgatcaaggagcaacaacccaatgaccttctctctgtgcagtttatagattatggcaatgtttctgtggttcatactaacaaaataggtaggcttgaccttgttaatgcaatattgccggggttgtgcattcattgctccttgcagggatttgaggttcctgacaataaaaattctaagaaaatgatgcattacttttcccaacggaccagcgaggctgcaataagatgtgaatttgttaaatttcaagacagatgggaagttattcttgctgatgaacatgggatcatagcagatgatatgattagcaggtatgctctcagtgaaaaatctcaagtagaactttctacccaagtaattaaaagtgccagttcaaagtctgttaacaaatcagacattgacacttcagtatttcttaactggtataatccagaaaaaaaaatgataagagcttatgccactgtgatagatggacctgagtacttttggtgtcagtttgctgatacggagaaacttcagtgtttagaagtagaagtacagactgctggagaacaggtagcagacaggagaaattgtatcccatgtccttatattggagatccttgtatagtaagatacagagaagatggacattattatagggcacttatcactaatatttgtgaagattatcttgtatctgtcaggcttgtggactttggaaacattgaagactgtgtggacccaaaagcactctgggccattccttctgaacttctgtcggttcccatgcaagcctttccatgttgcctctcagggtttaacatttcagaaggattatgttctcaagagggaaatgactatttctatgaaataataacagaagatgtgttggaaataacaatactagaaatcagaagggatgtttgtgatatccctttagcaattgttgacttgaaaagcaaaggtaaaagtattaatgagaaaatggagaaatattctaagactggtattaaaagtgctcttccctatgaaaatattgactcagagataaagcagactcttgggtcctacaatcttgatgtaggacttaagaaattaagtaataaagctgtacaaaataaaatatatatggaacaacagacagatgagcttgctgaaataactgaaaaagatgtaaacattattggaaccaaaccaagtaacttccgtgaccctaaaactgataacatttgtgaagggtttgaaaacccctgcaaagataaaattgatactgaggaactggaaggtgaattagagtgccatctggttgacaaagcagagtttgatgataaatacctgattacaggatttaacacattactaccacatgctaatgaaacaaaggagatactagaactgaattcacttgaggtgccgctttctcctgatgatgaatcaaaagaattcttagaactggaatctattgagttacagaattctctggtggtggatgaagaaaaaggggagctaagcccggtgccaccgaatgtgccactctcccaagagtgtgtcacaaaaggcgccatggagctatttacactgcagcttcctctcagctgtgaagctgagaaacagccagaactagaactacctacagcccagctgcctttagatgacaagatggatcctttgtctttaggagttagtcagaaagcacaggaatccatgtgtactgaggacatgagaaagtcaagttgtgtagaatcttttgatgaccagcgcaggatgtcattgcatctacatggagcagattgtgatcctaaaacacagaatgaaatgaatatatgtgaagaagaatttgtagagtataaaaacagggatgccatttcggcattgatgcctttgttctctgaggaagaaagcagtgatggaagcaagcacaataatggtttaccagatcatatctcagctcaactacagaacacctacactctgaaagcctttactgttggatctaaatgtgttgtgtggtcaagtctaagaaacacatggtctaaatgtgagattttagaaacagctgaagaaggaacaagggttttgaacctttcaaatggtatggaggagatagtgaaccctgagaatgtctggaatggcatacccaaattggataagagtccacctgaggctgtatcccaaagagtagggaaagatctttacttcatgtcagtgggtgataccactattaaagaaaaggggtttggaggtgatggagatttaaccgtggatctatagctgtggccaatcagtcagaagctgcccttgaacaagtggcatcttacgcagaccaacagagtatttgagaaaattgaaaacatgtaaccacaagaagttgtcattttcaaaaacttctatataggtggaaaacaaattaggtctcaggttgatggtggggtgtgtttatagtgatcctgttatatatacagatctgggatctttcgtctttattgtcttacgtttctaattagttgggaggatttattttgctaaacagtttactaacacattacatttcaaaaactattttggtacctttcaaatacagtgtttaaattaaaatagaaaaataagggctcatgacaagtacattatttgattctacttaggatagctttttagcaggatctccttcagaatttttgtcttgactttgaatctttgcctgtttgtctaaacatttgactaacattctgtttgaatttggaagtattctaatacaagatttgaataaagtttatccttaaataaagtttatcctt

SEQ ID NO: 1761 - DNA, 2497 bp, Homo sapiens
  source 1..2497: mol_type = genomic DNA
aaggcggagcggtccctgcaacccggccggcgggaactgccttctagtttttagtctcagaccagaccaccgggcgcaccccgatgccgagcccgcagcttctggtgctcttcggcagccagacaggcacggctcaggatgtgtcggagagactgggtcgcgaggcccggcgccggcggcttggctgccgggtgcaggccctggactcctacccggtggtgaatctgattaacgagcccctggtgatatttgtttgtgcaactacaggccaaggagacccccctgacaacatgaagaacttctggaggtttatattccggaagaacctgccctccactgccctctgtcagatggactttgccgtcctgggcctcggggactcctcatacgccaagttcaacttcgtggccaagaagctgcaccgacggctactgcagcttgggggcagcgccctcctgcccgtgtgcctgggcgatgaccagcatgagctggggcccgacgctgctgtggacccctggctgcgagacttgtgggacagggttctggggctgtacccgccgcctccgggcctcactgagatccctcccggagtccccctgccctccaagttcaccctgctgttcctccaagaggcacccagcacgggctctgaggggcagcgggtagctcaccccggctctcaggagcccccgtcagagtcgaagcccttcctagcacccatgatctccaaccagagagtcaccggcccctcccacttccaggacgttcggctgattgagtttgacatcttgggctctggcatcagctttgctgctggtgatgtggtgctgattcagccctccaactcggctgcccatgtccagcggttctgccaggtgctgggcctggaccctgaccagctcttcatgctgcagccgcgggagccagatgtctcctcccccacgaggctgccccagccctgctccatgcggcacctcgtgtcccactacctggacatcgccagcgtgcctcgccgctccttcttcgaactcctggcctgtctatccctccatgagctggagcgggagaagctgctggagttcagttctgcccaaggccaggaggagctctttgaatactgcaaccggccccgcaggaccatcctggaggtgctctgtgacttcccgcacacagctgccgccatccctcccgactacctgttggacctcatccccgttatccggccgagggccttctccatcgcctcctcgctgctgactcacccctcacggctgcagatcctcgtggctgtagtgcagttccagactcgcctcaaggagccccgccggggcctctgctcctcctggctggcatccctggaccctgggcaaggacctgtccgggtgcccctctgggtgcggcctgggagtctggccttcccagagacaccagacacacctgtgatcatggtggggcctggcactggggtagcccccttccgagcagccatccaggagcgtgtggcccagggccagactggaaacttcttgttttttggctgccgctggcgggaccaagacttctactgggaggctgagtggcaggagctggagaagcgggactgtctgaccctcatccctgccttctcccgggaacagcccccagccctgttctctgccctacaggagcagaaagtatatgtgcagcaccggctccgggagctggggtcgcttgtgtgggaactgctggaccgccagggtgcatacttctacctggcaggcaacgccaagtccatgccagcggacgtctcggaagccctgatgtccatcttccaggaggagggtggactctgcagcccggacgcagccgcgtatctagccaggctccagcagacacggcgcttccagacagagacgtgggcctgaggcccgcggctgcccgtgccccctctgacagccatcctcctgggagcccaggaaggcatccacgagggagctcctggccagcagccgtcatcctctcggaccagccagctggtcctctgggaacagccagctcccgagcacagccgcactcctgttgaccctggatcccaccctttgagcctgaccccactgcagcctctgcccagccagccctgcgctcccccaccctgacagtgagctgtgtcctcgtccccccacccccttcccagtcaaggtggtggcctgggccgctccacctcaccggtgcagtgacccaggacggcatcagcagcccagtgagcaccaggggtggcatagggcacccatgaggctgcgctgcactcctctgccctggggccacctcggctgctgcagcctgcccagcagcacattccagtcactgcccccgcactcccacagggctcaggctgggctcagaggccactgagatgccagctccttgagagcagtgggggtgtcccaggccagagcagcctcttcctctcctggtcccagaaaaacccttgcagtaaatggtggcctctgggtggtta

SEQ ID NO: 1762 - DNA, 809 bp, Homo sapiens
  source 1..809: mol_type = genomic DNA
cgcccgccatggccgagagcgactgggacacggtgacggtgctgcgcaagaagggccctacggccgcccaggccaaatccaagcaggctatcttagcggcacagagacgaggagaagatgtggagacttccaagaaatgggctgctggccagaacaaacaacattctattaccaagaacacggccaagctggaccgggagacagaggagctgcaccatgacagggtgaccctggaggtgggcaaggtgatccagcaaggtcggcagagcaaggggcttacgcagaaggacctggccacgaaaatcaatgagaagccacaggtgatcgcggactatgagagcggacgggccatacccaataaccaggtgcttggcaaaatcgagcgggccattggtgagtgtccctccacccttcgccgggtccgctgaacagggaggctacccgctcccagctggggttggtgagagtgggactcgggggaagaagatggccctgggggtcccctgttctctgaattctggagctttgcttctccaggtagtacagactgagggatggtggggtctctgcaggcctcaggaaacccctaagagcaagtggagtccgagtcccttccccttgccagttcccgtcagcctgtgctgttggcgatggttctctgagcctgagcacagcgggtccgggccctgtcagcatggggccggaagccagttccacagaggaccccggctccggttcttccggagaggggtgttcatgctctgctgtctaaggtgatcagactcatcctcttcaaaattagatgtggg

SEQ ID NO: 1763 - DNA, 790 bp, Homo sapiens
  source 1..790: mol_type = genomic DNA
ccggacggacgctcgtcttcgcccgccatggccgagagcgactgggacacggtgacggtgctgcgcaagaagggccctacggccgcccaggccaaatccaagcaggctatcttagcggcacagagacgaggagaagatgtggagacttccaagaaatgggctgctggccagaacaaacaacattctattaccaagaacacggccaagctggaccgggagacagaggagctgcaccatgacagggtgaccctggaggtgggcaaggtgatccagcaaggtcggcagagcaaggggcttacgcagaaggacctggccacgaaaatcaatgagaagccacaggtgatcgcggactatgagagcggacgggccatacccaataaccaggtgcttggcaaaatcgagcgggccattgatgtgggaaccaggagtgctcgtgtgctgagagcccagtgaggcacgggagcggcgtggccccccttccctgggaagatgttgaagaggggcagcgttggggggaggagggagctggtgctgcagtggccagtggctgtggctcatttcaggcctcaagctccggggaaaggacattggaaagcccatcgagaaggggcctagggcgaaatgaacacaaagcctcgaaatcagtgcgctccagctgatctcgttccgccggttccccttggccgccagttccgttctcctcacgggccgaacggaacaaggggtccagcttgcgggggaccctccccagcccattcctgctgtcaaacaaacaaaaccttgcaaagcg

SEQ ID NO: 1764 - DNA, 510 bp, Homo sapiens
  source 1..510: mol_type = genomic DNA
cacaacgttcccgtttgcttatagttgtcaacgaccatgatctctggacccacactacagtaacaagtttgtcagtcattttcagataaggtgcaaatcaagggatggctttgtccccacttcggcgcaggtgggacagacttggggaagacgcagctgaagagacaaattctcaggacatgggaaagcggaaccaccaaaaggagtgatgatcaacgatctcatgataaatctggatgctagttctcatgcctcaggacatcctactgggaacgacacaccagctcctgggatcagactttcatctacttaggacccctctttgcccagactactaaagccagtcttcactagccacgaatggctacccaaaggaaacacttggtgaaagattttaatccttacattacctgctatatctgtaaagggtatctgatcaagccaacaacagtgacggaatgcctccatacatctgcagaatcctactggatgtccacttggatgtcctga

SEQ ID NO: 1765 - DNA, 1979 bp, Homo sapiens
  source 1..1979: mol_type = genomic DNA
acatattcagcagggttagcttgtcctcccctccctcttcagcttcccagacactgagtctggaatgaaaattcacctgcctctgagttggctcctaatgggggtgggagtgttacttcggttcccaggttggaagattatctcacccggccccagctatataagctgaccggtgtggaggggcccagcagggccaactccagggattccttccacgacagaaaaacatacaagactccttcagccaacatgatggtactgaaagtagaggaactggtcactggaaagaagaatggcaatggggaggcaggggaattccttcctgaggatttcagagatggagagtatgaagctgctgttactttagagaagcaggaggatctgaagacacttctagcccaccctgtgaccctgggggagcaacagtggaaaagcgagaaacaacgagaggcagagctcaaaaagaaaaaactagaacaaagatcaaagcttgaaaatttagaagaccttgaaataatcattcaactgaagaaaaggaaaaaatacaggaaaactaaagttccagttgtaaaggaaccagaacctgaaatcattacggaacctgtggatgtgcctacgtttctgaaggctgctctggagaataaactgccagtagtagaaaaattcttgtcagacaagaacaatccagatgtttgtgatgagtataaacggacagctcttcatagagcatgcttggaaggacatttggcaattgtggagaagttaatggaagctggagcccagatcgaattccgtgatatgcttgaatccacagccatccactgggcaagccgtggaggaaacctggatgttttaaaattgttgctgaataaaggagcaaaaattagcgcccgagataagttgctcagcacagcgctgcatgtggcggtgaggactggccactatgagtgcgcggagcatcttatcgcctgtgaggcagacctcaacgccaaagacagagaaggagataccccgttgcatgatgcggtgagactgaaccgctataagatgatccgactcctgattatgtatggcgcggatctcaacatcaagaactgtgctgggaagacgccgatggatctggtgctacactggcagaatggaaccaaagcaatattcgacagcctcagagagaactcctacaagacctctcgcatagctacattctgaggcaaacgacagactcttaatcagtaaatgttcactggcattttgaaggcatggcccaagagaagagacactagccataaaatctagtttctatttatcaacgtgttgtgaagatgtacctaatgaagttttgagaaagcacagggttataggtgtttaaatttcctttagtgaaactcttatttatttttatgtattcctgtttatttatttactgccacgctactgatattcagaccttcatgatcatccatctggtgagcagagcttcatttgtatataacactttcagagccttcccacccataggtagttcttaaaccaggtgaaagagcaaagttcaagtgcctacttatgtgtcattcgctcatgtaagagtttttaagagagggctgattatcacagccctcttttctcctgaatttttaatgcagaagtttgaatgaagcaagggaaggcatgtagggacaggaaaggaaacaatggaaggaaagtgattctgtgaaaaggacagtgaagccagctattttacccccaggctggattttttttttttttttttttttttttttttaccgagtacacagagtacccaagtgaagagaacgtcatgagtgtaagtgcaaatcagtggaaggagcggcaaactgggacatgcagaattgaatttgctcaaaaaagatgaaaggaaatgcaaactgtaaatgtataaatgtatattgtattgtatgtacattttatattcataataaaggcaatcaaactctaaa

SEQ ID NO: 1766 - DNA, 2129 bp, Homo sapiens
  source 1..2129: mol_type = genomic DNA
cggcccaaggcgttcaggcacgcgctttcggtgctcggagcggaagcagcggcgagaggctcggaggcgcgggggcggccgagcggcgggcgacgggggcgggcgacgggggcgggcgacgcgggccgcggcacgggcggagccggggccatggagccgccgctgccgggctaggcaggtcgtgccccgccgggccggcggcgatgtcgggctaccagcgccgcccgggcgccaccccgctgtcccgagcccggagcctcgccattcccgacgatgacagatttgaagatctggaagaggcaaatccattctcttttagagagtttctgaagaccaagaacctcggcctctcgaaagaggatccggccagcagaatttatgcaaaggaagcctcgaggcattccctgggacttgaccacaactccccaccctcccaaaccggcgggtatggcctggagtatcagcagccatttttcgaggatccgacaggggctggtgacctcctggatgaggaggaggatgaggacaccggatggagtggggcctacctgccgtccgccatcgagcagactcaccccgagagggtccctgccggcacgtcgccctgcagcacatacctttcctttttctccaccccgtcggagctggcagggcctgagtctctgccctcgtgggcgttgagtgacactgattctcgcgtgtctccggcctctccggcagggagtcctagcgcagactttgcggttcatggagagtctctgggagacaggcacctgcggacgctgcagataagttacgacgcactgaaagatgaaaattctaagctgagaagaaagctgaatgaggttcagagcttctctgaagctcaaacagaaatggtgaggacgcttgagcggaagttagaagcaaaaatgatcaaggaggaaagcgactaccacgacctggagtcggtggttcagcaggtggagcagaacctggagctgatgaccaaacgggctgtaaaggcagaaaaccacgtcgtgaaactaaaacaggaaatcagtttgctccaggcgcaggtctccaacttccagcgagagaatgaagccctgcggtgcggccagggtgccagcctgaccgtggtgaagcagaacgccgacgtggccctgcagaacctccgggtggtcatgaacagtgcacaggcttccatcaagcaactggtttccggagctgagacactgaatcttgttgccgaaatccttaaatctatagacagaatttctgaagttaaagacgaggaggaagactcttgaggacccctgggtgttctcagcatgaagctccgtgtataccctgaggtcaccaccgctcgatctaaatgtgcagttgtgtccttaaatatgcagtcttcacccagagtaaagtgttgatcgcaagagtccagtgtcgtgccctcagccagttcttggccaccacaatgggagcagccctggccgagttgtctctgtggtttctatgcagcccttcttggcgaaattcctgcgatcttatagattctaatgagctcttggaagacattgtcataaaagccagtgattttaagaaaaagagtggttctggaatcaatgttttccagtcccatcccagaacatcagttgtaagataagtacaattggttgtccttgatttcataagtagaacaaacactaaatgtgcctctgagatggccaccccgggcagggacctgtgccttccgccgatgctcagggctccctctggctcccgggtcactcttgtggccccagtgggtggtccctgcagtcatggcctgagtgcgcaggggccaccgcgtggctgctgctgtcctcctccgggacccacggggaccaaggtcacacgttccgtgctgtgaagctgtccagatgtgcctctttggctgggggttctggtggacgtttcaagtggcattttgtacaatgcaggttagaattcaggaatttcaagtatgtgcccgggtctgtcaggtcccagttgcctttctgacggcccccctcagagggacggcgatgagcactaaatgcttttttgactattttcctatagattttttttaaaacttttttttcctcctgttccaattgatagctttc

SEQ ID NO: 1767 - DNA, 6419 bp, Homo sapiens
  source 1..6419: mol_type = genomic DNA
gaatttgaaaacggtaacatcgcagtgctgctcgcgggtctggctagtcaggcgaagtttgcagaatggaatctaattttaatcaagagggagtacctcgaccatcttatgtttttagtgctgacccaattgcaaggccttcagaaataaatttcgatggcattaagcttgatctgtctcatgaattttccttagttgctccaaatactgaggcaaacagtttcgaatctaaagattatctccaggtttgtcttcgaataagaccatttacacagtcagaaaaagaacttgagtctgagggctgtgtgcatattctggattcacagactgttgtgctgaaagagcctcaatgcatccttggtcggttaagtgaaaaaagctcagggcagatggcacagaaattcagtttttccaaggtttttggcccagcaactacacagaaggaattctttcagggttgcattatgcaaccagtaaaagacctcttgaaaggacagagtcgtctgatttttacttacgggctaaccaattcaggaaaaacatatacatttcaagggacagaagaaaatattggcattctgcctcgaactttgaatgtattatttgatagtcttcaagaaagactgtatacaaagatgaaccttaaaccacatagatccagagaatacttaaggttatcatcagaacaagagaaagaagaaattgctagcaaaagtgcattgcttcggcaaattaaagaggttactgtgcataatgatagtgatgatactctttatggaagtttaactaactctttgaatatctcagagtttgaagaatccataaaagattatgaacaagccaacttgaatatggctaatagtataaaattttctgtgtgggtttctttctttgaaatttacaatgaatatatttatgacttatttgttcctgtatcatctaaattccaaaagagaaagatgctgcgcctttcccaagacgtaaagggctattcttttataaaagatctacaatggattcaagtatctgattccaaagaagcctatagacttttaaaactaggaataaagcaccagagtgttgccttcacaaaattgaataatgcttccagtagaagtcacagcatattcactgttaaaatattacagattgaagattctgaaatgtctcgtgtaattcgagtcagtgaattatctttatgtgatcttgctggttcagaacgaactatgaagacacagaatgaaggtgaaaggttaagagagactgggaatatcaacacttctttattgactctgggaaagtgtattaacgtcttgaagaatagtgaaaagtcaaagtttcaacagcatgtgcctttccgggaaagtaaactgactcactattttcaaagtttttttaatggtaaagggaaaatttgtatgattgtcaatatcagccaatgttatttagcctatgatgaaacactcaatgtattgaagttctccgccattgcacaaaaagtttgtgtcccagacactttaaattcctctcaagagaaattatttggacctgtcaaatcttctcaagatgtatcactagacagtaattcaaacagtaaaatattaaatgtaaaaagagccaccatttcatgggaaaatagtctagaagatttgatggaagacgaggatttggttgaggagctagaaaacgctgaagaaactcaaaatgtggaaactaaacttcttgatgaagatctagataaaacattagaggaaaataaggctttcattagccacgaggagaaaagaaaactgttggacttaatagaagacttgaaaaaaaaactgataaatgaaaaaaaggaaaaattaaccttggaatttaaaattcgagaagaagttacacaggagtttactcagtattgggctcaacgggaagctgactttaaggagactctgcttcaagaacgagagatattagaagaaaatgctgaacgtcgtttggctatcttcaaggatttggttggtaaatgtgacactcgagaagaagcagcgaaagacatttgtgccacaaaagttgaaactgaagaaacacataattatgtaggatttgaagatattattgattctcttcaagataatgttgctgatattaagaaacaggctgaaattgctcacttatatattgcatctcttcctgacccccaggaagctactgcttgtttagaactaaagtttaatcaaattaaagctgaattagctaaaaccaaaggagaattaatcaaaaccaaagaagagttaaaaaagagagaaaatgaatcagattcattgattcaagagcttgagacatctaataagaaaataattacacagaatcaaagaattaaagaattgataaatataattgatcaaaaagaagatactatcaacgaatttcagaacctaaagtctcatatggaaaacacatttaaatgcaatgacaaggctgatacatcttctttaataataaacaataaattgatttgtaatgaaacagttgaagtacctaaggacagcaaatctaaaatctgttcagaaagaaaaagagtaaatgaaaatgaacttcagcaagatgaaccaccagcaaagaaagggtctatccatgttagttcagctatcactgaagaccaaaagaaaagtgaagaagtgcgaccgaacattgcagaaattgaagacatcagagttttacaagaaaataatgaaggactgagagcatttttactcactattgagaatgaacttaaaaatgaaaaggaagaaaaagcagaattaaataaacagattgttcattttcagcaggaactttctctttctgaaaaaaagaatttaactttaagtaaagaggtccaacaaattcagtcaaattatgatattgcaattgctgaattacatgtgcagaaaagtaaaaatcaagaacaggaggaaaagatcatgaaattgtcaaatgagatagaaactgctacaagaagcattacaaataatgtttcacaaataaaattaatgcacacgaaaatagacgaactacgtactcttgattcagtttctcagatttcaaacatagatttgctcaatctcagggatctgtcaaatggttctgaggaggataatttgccaaatacacagttagaccttttaggtaatgattatttggtaagtaagcaagttaaagaatatcgaattcaagaacccaatagggaaaattctttccactctagtattgaagctatttgggaagaatgtaaagagattgtgaaggcctcttccaaaaaaagtcatcagattgaggaactggaacaacaaattgaaaaattgcaggcagaagtaaaaggctataaggatgaaaacaatagactaaaggagaaggagcataaaaaccaagatgacctactaaaagaaaaagaaactcttatacagcagctgaaagaagaattgcaagaaaaaaatgttactcttgatgttcaaatacagcatgtagttgaaggaaagagagcgctttcagaacttacacaaggtgttacttgctataaggcaaaaataaaggaacttgaaacaattttagagactcagaaagttgaatgtagtcattcagccaagttagaacaagacattttggaaaaggaatctatcatcttaaagctagaaagaaatttgaaggaatttcaagaacatcttcaggattctgtcaaaaacaccaaagatttaaatgtaaaggaactcaagctgaaagaagaaatcacacagttaacaaataatttgcaagatatgaaacatttacttcaattaaaagaagaagaagaagaaaccaacaggcaagaaacagaaaaattgaaagaggaactctctgcaagctctgctcgtacccagaatctgaaagcagatcttcagaggaaggaagaagattatgctgacctgaaagagaaactgactgatgccaaaaagcagattaagcaagtacagaaagaggtatctgtaatgcgtgatgaggataaattactgaggattaaaattaatgaactggagaaaaagaaaaaccagtgttctcaggaattagatatgaaacagcgaaccattcagcaactcaaggagcagttaaataatcagaaagtggaagaagctatacaacagtatgagagagcatgcaaagatctaaatgttaaagagaaaataattgaagacatgcgaatgacactagaagaacaggaacaaactcaggtagaacaggatcaagtgcttgaggctaaattagaggaagttgaaaggctggccacagaattggaaaaatggaaggaaaaatgcaatgatttggaaaccaaaaacaatcaaaggtcaaataaagaacatgagaacaacacagatgtgcttggaaagctcactaatcttcaagatgagttacaggagtctgaacagaaatataatgctgatagaaagaaatggttagaagaaaaaatgatgcttatcactcaagcgaaagaagcagagaatatacgaaataaagagatgaaaaaatatgctgaggacagggagcgtttttttaagcaacagaatgaaatggaaatactgacagcccagctgacagagaaagatagtgaccttcaaaagtggcgagaagaacgagatcaactggttgcagctttagaaatacagctaaaagcactgatatccagtaatgtacagaaagataatgaaattgaacaactaaaaaggatcatatcagagacttctaaaatagaaacacaaatcatggatatcaagcccaaacgtattagttcagcagatcctgacaaacttcaaactgaacctctatcgacaagttttgaaatttccagaaataaaatagaggatggatctgtagtccttgactcttgtgaagtgtcaacagaaaatgatcaaagcactcgatttccaaaacctgagttagagattcaatttacacctttacagccaaacaaaatggcagtgaaacaccctggttgtaccacaccagtgacagttaagattcccaaggctcggaagaggaagagtaatgaaatggaggaggacttggtgaaatgtgaaaataagaagaatgctacacccagaactaatttgaaatttcctatttcagatgatagaaattcttctgtcaaaaaggaacaaaaggttgccatacgtccatcatctaagaaaacatattctttacggagtcaggcatccataattggtgtaaacctggccactaagaaaaaagaaggaacactacagaaatttggagacttcttacaacattctccctcaattcttcaatcaaaagcaaagaagataattgaaacaatgagctcttcaaagctctcaaatgtagaagcaagtaaagaaaatgtgtctcaaccaaaacgagccaaacggaaattatacacaagtgaaatttcatctcctattgatatatcaggccaagtgattttaatggaccagaaaatgaaggagagtgatcaccagattatcaaacgacgacttcgaacaaaaacagccaaataaatcacttatggaaatgtttaatataaattttatagtcatagtcattggaacttgcatcctgtattgtaaatataaatgtatatattatgcattaaatcactctgcatatagattgctgttttatacatagtataattttaattcaataaatgagtcaaaatttgtatatttttataaggcttttttataatagcttctttcaaactgtatttccctattatctcagacattggatcagtgaagatcctaggaaagaggctgttattctcatttattttgctatacaggatgtaataggtcaggtatttggtttacttatatttaacaatgtcttatgaattttttttactttatctgttatacaactgattttacatatctgtttggattatagctaggatttggagaataagtgtgtacagatcacaaaacatgtatatacattatttagaaaagatctcaagtctttaattagaatgtctcacttattttgtaaacattttgtgggtacatagtacatgtatatatttacggggtatgtgagatgttttgacacaggcatgcaatgtgaaatacgtgtatcatggagaatgaggtatccatcccctcaagcatttttcctttgaattacagataatccaattacattctttagatcatttaaaaatatacaagtaagttattattgattatagtcactctattgtgctatcagatagtagatcattctttttatcttatttgtttttgtacccattaaccatccccacctccccctgcaaccgtcagtacccttaccagccactggtaaccattcttctactctgtatgcccatgaggtcaattgattttatttttagatcccataaataaatgagaacatgcagtctt

SEQ ID NO: 1768 - DNA, 3130 bp, Homo sapiens
  source 1..3130: mol_type = genomic DNA
acttcctgccgggctgcgggcgcctgagcggctcttcagcgtttgcgccggcggctgccgcgtctctctcggctcccgcttcctttgaccgcctcccccccccggcccggcggcgcccgcctcctccacggccactccgcctcttccctcccttcgtcccttcttcctctcccttttttccttcttccttcccctcctcgccgccaccgcccaggaccgccggccgggggacgagctcggagcagcagccagaaagcataacccctactgtagaactaaatgcactgtgcatgaaacttggaaaaaaaccaatgtataagcctgttgacccttactctcggatgcagtccacctataactacaacatgagaggaggtgcttatcccccgaggtacttttacccatttccagttccacctttactttatcaagtggaactttctgtgggaggacagcaatttaatggcaaaggaaagacaagacaggctgcgaaacacgatgctgctgccaaagcgttgaggatcctgcagaatgagcccctgccagagaggctggaggtgaatggaagagaatccgaagaagaaaatctcaataaatctgaaataagtcaagtgtttgagattgcacttaaacggaacttgcctgtgaatttcgaggtggcccgggagagtggcccaccccacatgaagaactttgtgaccaaggtttcggttggggagtttgtgggggaaggtgaagggaaaagcaagaagatttcaaagaaaaatgccgccatagctgttcttgaggagctgaagaagttaccgcccctgcctgcagttgaacgagtaaagcctagaatcaaaaagaaaacaaaacccatagtcaagacaagcccagaatatggccaggggatcaatccgattagccgactggcccagatccagcaggcaaaaaaggagaaggagccagagtacacgctcctcacagagcgaggcctcccgcgccgcagggagtttgtgatgcaggtgaaggttggaaaccacactgcagaaggaacgggcaccaacaagaaggtggccaagcgcaatgcagccgagaacatgctggagatccttggtttcaaagtcccgcaggcgcagcccaccaaacccgcactcaagtcagaggagaagacacccataaagaaaccaggggatggaagaaaagtaaccttttttgaacctggctctggggatgaaaatgggactagtaataaagaggatgagttcaggatgccttatctaagtcatcagcagctgcctgctggaattcttcccatggtgcccgaggtcgcccaggctgtaggagttagtcaaggacatcacaccaaagattttaccagggcagctccgaatcctgccaaggccacggtaactgccatgatagcccgagagttgttgtatgggggcacctcgcccacagccgagaccattttaaagaataacatctcttcaggccacgtaccccatggacctctcacgagaccctctgagcaactggactatctttccagagtccagggattccaggttgaatacaaagacttccccaaaaacaacaagaacgaatttgtatctcttatcaattgctcctctcagccacctctgatcagccatggtatcggcaaggatgtggagtcctgccatgatatggctgcgctgaacatcttaaagttgctgtctgagttggaccaacaaagtacagagatgccaagaacaggaaacggaccaatgtctgtgtgtgggaggtgctgaaccttttctggccatgaaccattataaaatcccaacatatatactgaaaatactgaaactgctttgaaaatttggaatttctgatacctccagtgggccgagagacacggtgggtaaaggatgtgggcagcagcagggaagacaacagaaacacaaggaggcggctgtggccgggctggactgtgctggggtttgttgtgatggccactcggtgacctggcggtccctacgcaatagcagctgcctgtggggaagaagggctgcccagccagctggttctcccgggacaccagcagatccacaccctgggcacctccgtgtttggtcttttttttcccctgtgtgaaagaagaaacggcacgaccccttctcaagctggctcactcagacacattgggacaaaccctggacagccatgccagagagaggcctttgaccggccccagagctaaaagcaccagagaaaatcaaatgcttcctactcagcgtgacccaacttttctagtgtgccacggccccaccacctcctgcagtacccacaccatcaccactgctttctcttccaacagtgatctgtattcttagtttcattattttcttttgattgatatgacactatataaaattttcatttgagaatttctcaattgtatctagttaaatagcacagtttggaaacttgtctgagactgactttatcaataatctaaccgacaaagatcatatccatgtgtatgtggttagacatttttatttcattgactaacccaggacagtttcagtgatgcaaattgtgtgccctctggttcagctgaaacagtcctggactttcaaaaaccttgaataagtctcccacagttgtataaattggacaatttaggaattttaaactttagatgatcatttggttccatttttatttcatttttatttttgttaatgcaaacaggacttaaatgaactttgatctctgttttaaagattattaaaaaacattgtgtatctatacatatggctcttgaggacttagctttcactacactacaggatatgatctccatgtagtccatataaacctgcagagtgattttccagagtgctcgatactgttaattacatctccattagggctgaaaagaatgacctacgtttctgtatacagctgtgttgcttttgatgttgtgttactgtacacagaagtgtgtgcactgaggctctgcgtgtggtccgtatggaaagcctggtagccctgcgagttaagtactgcttccattcattgtttacgctggaatttttctccccatggaatgtaagtaaaacttaagtgtttgtcatcaataaatggtaatactaaa

SEQ ID NO: 1769 - DNA, 3154 bp, Homo sapiens
  source 1..3154: mol_type = genomic DNA
acttcctgccgggctgcgggcgcctgagcggctcttcagcgtttgcgccggcggctgccgcgtctctctcggctcccgcttcctttgaccgcctcccccccccggcccggcggcgcccgcctcctccacggccactccgcctcttccctcccttcgtcccttcttcctctcccttttttccttcttccttcccctcctcgccgccaccgcccaggaccgccggccgggggacgagctcggagcagcagccagaaagcataacccctactgtagaactaaatgcactgtgcatgaaacttggaaaaaaaccaatgtataagcctgttgacccttactctcggatgcagtccacctataactacaacatgagaggaggtgcttatcccccgaggtacttttacccatttccagttccacctttactttatcaagtggaactttctgtgggaggacagcaatttaatggcaaaggaaagacaagacaggctgcgaaacacgatgctgctgccaaagcgttgaggatcctgcagaatgagcccctgccagagaggctggaggtgaatggaagagaatccgaagaagaaaatctcaataaatctgaaataagtcaagtgtttgagattgcacttaaacggaacttgcctgtgaatttcgagtctttccctctgaaacaggtggcccgggagagtggcccaccccacatgaagaactttgtgaccaaggtttcggttggggagtttgtgggggaaggtgaagggaaaagcaagaagatttcaaagaaaaatgccgccatagctgttcttgaggagctgaagaagttaccgcccctgcctgcagttgaacgagtaaagcctagaatcaaaaagaaaacaaaacccatagtcaagccacagacaagcccagaatatggccaggggatcaatccgattagccgactggcccagatccagcaggcaaaaaaggagaaggagccagagtacacgctcctcacagagcgaggcctcccgcgccgcagggagtttgtgatgcaggtgaaggttggaaaccacactgcagaaggaacgggcaccaacaagaaggtggccaagcgcaatgcagccgagaacatgctggagatccttggtttcaaagtcccgcaggcgcagcccaccaaacccgcactcaagtcagaggagaagacacccataaagaaaccaggggatggaagaaaagtaaccttttttgaacctggctctggggatgaaaatgggactagtaataaagaggatgagttcaggatgccttatctaagtcatcagcagctgcctgctggaattcttcccatggtgcccgaggtcgcccaggctgtaggagttagtcaaggacatcacaccaaagattttaccagggcagctccgaatcctgccaaggccacggtaactgccatgatagcccgagagttgttgtatgggggcacctcgcccacagccgagaccattttaaagaataacatctcttcaggccacgtaccccatggacctctcacgagaccctctgagcaactggactatctttccagagtccagggattccaggttgaatacaaagacttccccaaaaacaacaagaacgaatttgtatctcttatcaattgctcctctcagccacctctgatcagccatggtatcggcaaggatgtggagtcctgccatgatatggctgcgctgaacatcttaaagttgctgtctgagttggaccaacaaagtacagagatgccaagaacaggaaacggaccaatgtctgtgtgtgggaggtgctgaaccttttctggccatgaaccattataaaatcccaacatatatactgaaaatactgaaactgctttgaaaatttggaatttctgatacctccagtgggccgagagacacggtgggtaaaggatgtgggcagcagcagggaagacaacagaaacacaaggaggcggctgtggccgggctggactgtgctggggtttgttgtgatggccactcggtgacctggcggtccctacgcaatagcagctgcctgtggggaagaagggctgcccagccagctggttctcccgggacaccagcagatccacaccctgggcacctccgtgtttggtcttttttttcccctgtgtgaaagaagaaacggcacgaccccttctcaagctggctcactcagacacattgggacaaaccctggacagccatgccagagagaggcctttgaccggccccagagctaaaagcaccagagaaaatcaaatgcttcctactcagcgtgacccaacttttctagtgtgccacggccccaccacctcctgcagtacccacaccatcaccactgctttctcttccaacagtgatctgtattcttagtttcattattttcttttgattgatatgacactatataaaattttcatttgagaatttctcaattgtatctagttaaatagcacagtttggaaacttgtctgagactgactttatcaataatctaaccgacaaagatcatatccatgtgtatgtggttagacatttttatttcattgactaacccaggacagtttcagtgatgcaaattgtgtgccctctggttcagctgaaacagtcctggactttcaaaaaccttgaataagtctcccacagttgtataaattggacaatttaggaattttaaactttagatgatcatttggttccatttttatttcatttttatttttgttaatgcaaacaggacttaaatgaactttgatctctgttttaaagattattaaaaaacattgtgtatctatacatatggctcttgaggacttagctttcactacactacaggatatgatctccatgtagtccatataaacctgcagagtgattttccagagtgctcgatactgttaattacatctccattagggctgaaaagaatgacctacgtttctgtatacagctgtgttgcttttgatgttgtgttactgtacacagaagtgtgtgcactgaggctctgcgtgtggtccgtatggaaagcctggtagccctgcgagttaagtactgcttccattcattgtttacgctggaatttttctccccatggaatgtaagtaaaacttaagtgtttgtcatcaataaatggtaatactaaa

SEQ ID NO: 1770 - DNA, 3332 bp, Homo sapiens
  source 1..3332: mol_type = genomic DNA
acttcctgccgggctgcgggcgcctgagcggctcttcagcgtttgcgccggcggctgccgcgtctctctcggctcccgcttcctttgaccgcctcccccccccggcccggcggcgcccgcctcctccacggccactccgcctcttccctcccttcgtcccttcttcctctcccttttttccttcttccttcccctcctcgccgccaccgcccaggaccgccggccgggggacgagctcggagcagcagccagacggagtctcgctcttttgccaggctggagtgcagtggcgcgatcctgagtcactgcaacctccacctcccaggttcaagcgattctcctgcttcagcctgccaagtagctgggactacagagtttattaaccacttaacctctcagaactgaacaaagacaacattgttcctggaacgccctctttttaaaaaagaaagcataacccctactgtagaactaaatgcactgtgcatgaaacttggaaaaaaaccaatgtataagcctgttgacccttactctcggatgcagtccacctataactacaacatgagaggaggtgcttatcccccgaggtacttttacccatttccagttccacctttactttatcaagtggaactttctgtgggaggacagcaatttaatggcaaaggaaagacaagacaggctgcgaaacacgatgctgctgccaaagcgttgaggatcctgcagaatgagcccctgccagagaggctggaggtgaatggaagagaatccgaagaagaaaatctcaataaatctgaaataagtcaagtgtttgagattgcacttaaacggaacttgcctgtgaatttcgaggtggcccgggagagtggcccaccccacatgaagaactttgtgaccaaggtttcggttggggagtttgtgggggaaggtgaagggaaaagcaagaagatttcaaagaaaaatgccgccatagctgttcttgaggagctgaagaagttaccgcccctgcctgcagttgaacgagtaaagcctagaatcaaaaagaaaacaaaacccatagtcaagccacagacaagcccagaatatggccaggggatcaatccgattagccgactggcccagatccagcaggcaaaaaaggagaaggagccagagtacacgctcctcacagagcgaggcctcccgcgccgcagggagtttgtgatgcaggtgaaggttggaaaccacactgcagaaggaacgggcaccaacaagaaggtggccaagcgcaatgcagccgagaacatgctggagatccttggtttcaaagtcccgcaggcgcagcccaccaaacccgcactcaagtcagaggagaagacacccataaagaaaccaggggatggaagaaaagtaaccttttttgaacctggctctggggatgaaaatgggactagtaataaagaggatgagttcaggatgccttatctaagtcatcagcagctgcctgctggaattcttcccatggtgcccgaggtcgcccaggctgtaggagttagtcaaggacatcacaccaaagattttaccagggcagctccgaatcctgccaaggccacggtaactgccatgatagcccgagagttgttgtatgggggcacctcgcccacagccgagaccattttaaagaataacatctcttcaggccacgtaccccatggacctctcacgagaccctctgagcaactggactatctttccagagtccagggattccaggttgaatacaaagacttccccaaaaacaacaagaacgaatttgtatctcttatcaattgctcctctcagccacctctgatcagccatggtatcggcaaggatgtggagtcctgccatgatatggctgcgctgaacatcttaaagttgctgtctgagttggaccaacaaagtacagagatgccaagaacaggaaacggaccaatgtctgtgtgtgggaggtgctgaaccttttctggccatgaaccattataaaatcccaacatatatactgaaaatactgaaactgctttgaaaatttggaatttctgatacctccagtgggccgagagacacggtgggtaaaggatgtgggcagcagcagggaagacaacagaaacacaaggaggcggctgtggccgggctggactgtgctggggtttgttgtgatggccactcggtgacctggcggtccctacgcaatagcagctgcctgtggggaagaagggctgcccagccagctggttctcccgggacaccagcagatccacaccctgggcacctccgtgtttggtcttttttttcccctgtgtgaaagaagaaacggcacgaccccttctcaagctggctcactcagacacattgggacaaaccctggacagccatgccagagagaggcctttgaccggccccagagctaaaagcaccagagaaaatcaaatgcttcctactcagcgtgacccaacttttctagtgtgccacggccccaccacctcctgcagtacccacaccatcaccactgctttctcttccaacagtgatctgtattcttagtttcattattttcttttgattgatatgacactatataaaattttcatttgagaatttctcaattgtatctagttaaatagcacagtttggaaacttgtctgagactgactttatcaataatctaaccgacaaagatcatatccatgtgtatgtggttagacatttttatttcattgactaacccaggacagtttcagtgatgcaaattgtgtgccctctggttcagctgaaacagtcctggactttcaaaaaccttgaataagtctcccacagttgtataaattggacaatttaggaattttaaactttagatgatcatttggttccatttttatttcatttttatttttgttaatgcaaacaggacttaaatgaactttgatctctgttttaaagattattaaaaaacattgtgtatctatacatatggctcttgaggacttagctttcactacactacaggatatgatctccatgtagtccatataaacctgcagagtgattttccagagtgctcgatactgttaattacatctccattagggctgaaaagaatgacctacgtttctgtatacagctgtgttgcttttgatgttgtgttactgtacacagaagtgtgtgcactgaggctctgcgtgtggtccgtatggaaagcctggtagccctgcgagttaagtactgcttccattcattgtttacgctggaatttttctccccatggaatgtaagtaaaacttaagtgtttgtcatcaataaatggtaatactaaa

SEQ ID NO: 1771 - DNA, 2455 bp, Homo sapiens
  source 1..2455: mol_type = genomic DNA
tttcctttcccctttcataaaagcacagacctaacagcaccctgggtggaaacctcttcagcatttgcttggaatcagtaagctaaaaacaaaatcaaccgggaccccagcttttcagaactgcagggaaacagccatcatgagtgaggtcaccaagaattccctggagaaaatccttccacagctgaaatgccatttcacctggaacttattcaaggaagacagtgtctcaagggatctagaagatagagtgtgtaaccagattgaatttttaaacactgagttcaaagctacaatgtacaacttgttggcctacataaaacacctagatggtaacaacgaggcagccctggaatgcttacggcaagctgaagagttaatccagcaagaacatgctgaccaagcagaaatcagaagtctagtcacttggggaaactacgcctgggtctactatcacttgggcagactctcagatgctcagatttatgtagataaggtgaaacaaacctgcaagaaattttcaaatccatacagtattgagtattctgaacttgactgtgaggaagggtggacacaactgaagtgtggaagaaatgaaagggcgaaggtgtgttttgagaaggctctggaagaaaagcccaacaacccagaattctcctctggactggcaattgcgatgtaccatctggataatcacccagagaaacagttctctactgatgttttgaagcaggccattgagctgagtcctgataaccaatacgtcaaggttctcttgggcctgaaactgcagaagatgaataaagaagctgaaggagagcagtttgttgaagaagccttggaaaagtctccttgccaaacagatgtcctccgcagtgcagccaaattttacagaagaaaaggtgacctagacaaagctattgaactgtttcaacgggtgttggaatccacaccaaacaatggctacctctatcaccagattgggtgctgctacaaggcaaaagtaagacaaatgcagaatacaggagaatctgaagctagtggaaataaagagatgattgaagcactaaagcaatatgctatggactattcgaataaagctcttgagaagggactgaatcctctgaatgcatactccgatctcgctgagttcctggagacggaatgttatcagacaccattcaataaggaagtccctgatgctgaaaagcaacaatcccatcagcgctactgcaaccttcagaaatataatgggaagtctgaagacactgctgtgcaacatggtttagagggtttgtccataagcaaaaaatcaactgacaaggaagagatcaaagaccaaccacagaatgtatctgaaaatctgcttccacaaaatgcaccaaattattggtatcttcaaggattaattcataagcagaatggagatctgctgcaagcagccaaatgttatgagaaggaactgggccgcctgctaagggatgccccttcaggcataggcagtattttcctgtcagcatctgagcttgaggatggtagtgaggaaatgggccagggcgcagtcagctccagtcccagagagctcctctctaactcagagcaactgaactgagacagaggaggaaaacagagcatcagaagcctgcagtggtggttgtgacgggtaggacgataggaagacagggggccccaacctgggattgctgagcagggaagctttgcatgttgctctaaggtacatttttaaagagttgttttttggccgggcgcagtggctcatgcctgtaatcccagcactttgggaggccgaggtgggcggatcacgaggtctggagtttgagaccatcctggctaacacagtgaaatcccgtctctactaaaaatacaaaaaattagccaggcgtggtggctggcacctgtagtcccagctacttgggaggctgaggcaggagaatggcgtgaacctggaaggaagaggttgcagtgagccaagattgcgcccctgcactccagcctgggcaacagagcaagactccatctcaaaaaaaaaaaaaaaaaaaaaaaagagttgttttctcatgttcattatagttcattacagttacatagtccgaaggtcttacaactaatcactggtagcaataaatgcttcaggcccacatgatgctgattagttctcagttttcattcagttcacaatataaccaccattcctgccctccctgccaagggtcataaatggtgactgcctaacaacaaaatttgcagtctcatctcattttcatccagacttctggaactcaaagattaacttttgactaaccctggaatatctcttatctcacttatagcttcaggcatgtatttatatgtattcttgatagcaataccataatcaatgtgtattcctgatagtaatgctacaataaatccaaacatttcaactctgttagaa

SEQ ID NO: 1772 - DNA, 2496 bp, Homo sapiens
  source 1..2496: mol_type = genomic DNA
cttccttcccctaaaagcaattactcaaaaacggagaaaacatcagctgatgcgtgccctactctcccacccctttatatagttccttcagtatttacttgaggcagacaggaagacttctgaagaacaaatcagcctggtcaccagcttttcggaacagcagagacacagagggcagtcatgagtgaggtcaccaagaattccctggagaaaatccttccacagctgaaatgccatttcacctggaacttattcaaggaagacagtgtctcaagggatctagaagatagagtgtgtaaccagattgaatttttaaacactgagttcaaagctacaatgtacaacttgttggcctacataaaacacctagatggtaacaacgaggcagccctggaatgcttacggcaagctgaagagttaatccagcaagaacatgctgaccaagcagaaatcagaagtctagtcacttggggaaactacgcctgggtctactatcacttgggcagactctcagatgctcagatttatgtagataaggtgaaacaaacctgcaagaaattttcaaatccatacagtattgagtattctgaacttgactgtgaggaagggtggacacaactgaagtgtggaagaaatgaaagggcgaaggtgtgttttgagaaggctctggaagaaaagcccaacaacccagaattctcctctggactggcaattgcgatgtaccatctggataatcacccagagaaacagttctctactgatgttttgaagcaggccattgagctgagtcctgataaccaatacgtcaaggttctcttgggcctgaaactgcagaagatgaataaagaagctgaaggagagcagtttgttgaagaagccttggaaaagtctccttgccaaacagatgtcctccgcagtgcagccaaattttacagaagaaaaggtgacctagacaaagctattgaactgtttcaacgggtgttggaatccacaccaaacaatggctacctctatcaccagattgggtgctgctacaaggcaaaagtaagacaaatgcagaatacaggagaatctgaagctagtggaaataaagagatgattgaagcactaaagcaatatgctatggactattcgaataaagctcttgagaagggactgaatcctctgaatgcatactccgatctcgctgagttcctggagacggaatgttatcagacaccattcaataaggaagtccctgatgctgaaaagcaacaatcccatcagcgctactgcaaccttcagaaatataatgggaagtctgaagacactgctgtgcaacatggtttagagggtttgtccataagcaaaaaatcaactgacaaggaagagatcaaagaccaaccacagaatgtatctgaaaatctgcttccacaaaatgcaccaaattattggtatcttcaaggattaattcataagcagaatggagatctgctgcaagcagccaaatgttatgagaaggaactgggccgcctgctaagggatgccccttcaggcataggcagtattttcctgtcagcatctgagcttgaggatggtagtgaggaaatgggccagggcgcagtcagctccagtcccagagagctcctctctaactcagagcaactgaactgagacagaggaggaaaacagagcatcagaagcctgcagtggtggttgtgacgggtaggacgataggaagacagggggccccaacctgggattgctgagcagggaagctttgcatgttgctctaaggtacatttttaaagagttgttttttggccgggcgcagtggctcatgcctgtaatcccagcactttgggaggccgaggtgggcggatcacgaggtctggagtttgagaccatcctggctaacacagtgaaatcccgtctctactaaaaatacaaaaaattagccaggcgtggtggctggcacctgtagtcccagctacttgggaggctgaggcaggagaatggcgtgaacctggaaggaagaggttgcagtgagccaagattgcgcccctgcactccagcctgggcaacagagcaagactccatctcaaaaaaaaaaaaaaaaaaaaaaaagagttgttttctcatgttcattatagttcattacagttacatagtccgaaggtcttacaactaatcactggtagcaataaatgcttcaggcccacatgatgctgattagttctcagttttcattcagttcacaatataaccaccattcctgccctccctgccaagggtcataaatggtgactgcctaacaacaaaatttgcagtctcatctcattttcatccagacttctggaactcaaagattaacttttgactaaccctggaatatctcttatctcacttatagcttcaggcatgtatttatatgtattcttgatagcaataccataatcaatgtgtattcctgatagtaatgctacaataaatccaaacatttcaactctgttagaa

SEQ ID NO: 1773 - DNA, 3534 bp, Homo sapiens
  source 1..3534: mol_type = genomic DNA
acttcctgccgggctgcgggcgcctgagcggctcttcagcgtttgcgccggcggctgccgcgtctctctcggctcccgcttcctttgaccgcctcccccccccggcccggcggcgcccgcctcctccacggccactccgcctcttccctcccttcgtcccttcttcctctcccttttttccttcttccttcccctcctcgccgccaccgcccaggaccgccggccgggggacgagctcggagcagcagccaggtggagttttgctcttgtcgcccaggctggagtgcagtggcgtgatctcggctcactgcaacctccacctcccaggttcaagcgattttcccacttcagcctcccgataagctgagattacagagtttattaaccacttaacctctcagaactgaacaaagacaacattgttcctggaacgccctctttttaaaaaagaaagcataacccctactgtagaactaaatgcactgtgcatgaaacttggaaaaaaaccaatgtataagcctgttgacccttactctcggatgcagtccacctataactacaacatgagaggaggtgcttatcccccgaggtacttttacccatttccagttccacctttactttatcaagtggaactttctgtgggaggacagcaatttaatggcaaaggaaagacaagacaggctgcgaaacacgatgctgctgccaaagcgttgaggatcctgcagaatgagcccctgccagagaggctggaggtgaatggaagagaatccgaagaagaaaatctcaataaatctgaaataagtcaagtgtttgagattgcacttaaacggaacttgcctgtgaatttcgagtctttccctctgaaacaggtggcccgggagagtggcccaccccacatgaagaactttgtgaccaaggtttcggttggggagtttgtgggggaaggtgaagggaaaagcaagaagatttcaaagaaaaatgccgccatagctgttcttgaggagctgaagaagttaccgcccctgcctgcagttgaacgagtaaagcctagaatcaaaaagaaaacaaaacccatagtcaagccacagacaagcccagaatatggccaggggatcaatccgattagccgactggcccagatccagcaggcaaaaaaggagaaggagccagagtacacgctcctcacagagcgaggcctcccgcgccgcagggagtttgtgatgcaggtgaaggttggaaaccacactgcagaaggaacgggcaccaacaagaaggtggccaagcgcaatgcagccgagaacatgctggagatccttggtttcaaagtcccgcaggcgcagcccaccaaacccgcactcaagtcagaggagaagacacccataaagaaaccaggggatggaagaaaagtaaccttttttgaacctggctctggggatgaaaatgggactagtaataaagaggatgagttcaggatgccttatctaagtcatcagcagctgcctgctggaattcttcccatggtgcccgaggtcgcccaggctgtaggagttagtcaaggacatcacaccaaagattttaccagggcagctccgaatcctgccaaggccacggtaactgccatgatagcccgagagttgttgtatgggggcacctcgcccacagccgagaccattttaaagaataacatctcttcaggccacgtaccccatggacctctcacgagaccctctgagcaactggactatctttccagagtccagggattccaggttgaatacaaagacttccccaaaaacaacaagaacgaatttgtatctcttatcaattgctcctctcagccacctctgatcagccatggtatcggcaaggatgtggagtcctgccatgatatggctgcgctgaacatcttaaagttgctgtctgagttggaccaacaaagtacagagatgccaagaacaggaaacggaccaatgtctgtgtgtgggaggtgctgaaccttttctggccatgaaccattataaaatcccaacatatatactgaaaatactgaaactgctttgaaaatttggaatttctgatacctccagtgggccgagagacacggtgggtaaaggatgtgggcagcagcagggaagacaacagaaacacaaggaggcggctgtggccgggctggactgtgctggggtttgttgtgatggccactcggtgacctggcggtccctacgcaatagcagctgcctgtggggaagaagggctgcccagccagctggttctcccgggacaccagcagatccacaccctgggcacctccgtgtttggtcttttttttcccctgtgtgaaagaagaaacggcacgaccccttctcaagctggctcactcagacacattgggacaaaccctggacagccatgccagagagaggcctttgaccggccccagagctaaaagcaccagagaaaatcaaatgcttcctactcagcgtgacccaacttttctagtgtgccacggccccaccacctcctgcagtacccacaccatcaccactgctttctcttccaacagtgatctgtattcttagtttcattattttcttttgattgatatgacactatataaaattttcatttgagaatttctcaattgtatctagttaaatagcacagtttggaaacttgtctgagactgactttatcaataatctaaccgacaaagatcatatccatgtgtatgtggttagacatttttatttcattgactaacccaggacagtttcagtgatgcaaattgtgtgccctctggttcagctgaaacagtcctggactttcaaaaaccttgaataagtctcccacagttgtataaattggacaatttaggaattttaaactttagatgatcatttggttccatttttatttcatttttatttttgttaatgcaaacaggacttaaatgaactttgatctctgttttaaagattattaaaaaacattgtgtatctatacatatggctcttgaggacttagctttcactacactacaggatatgatctccatgtagtccatataaacctgcagagtgattttccagagtgctcgatactgttaattacatctccattagggctgaaaagaatgacctacgtttctgtatacagctgtgttgcttttgatgttgtgttactgtacacagaagtgtgtgcactgaggctctgcgtgtggtccgtatggaaagcctggtagccctgcgagttaagtactgcttccattcattgtttacgctggaatttttctccccatggaatgtaagtaaaacttaagtgtttgtcatcaataaatggtaatactaaatttttttgttaatttattctcaaatgccactactgctaggttggtcccctcccaacttgcccctatcctttttttatttttaagaaaaaaactttgtaatgcttgtgattccatctgggcaaaagtctgaagatctgaaataactttatatcaaaccattgatcaataaacagctactaatg

SEQ ID NO: 1774 - DNA, 1454 bp, Homo sapiens
  source 1..1454: mol_type = genomic DNA
gccgcgtcttcctgaggtagctcctgtcagcccactgatcccaccacccgctccctactgccccgcggtcttcgcgtgagctcggagactgagggacaacaaaaatggcggaggggagccagtcggcgcctgaggcaggcaatgatatgggaaatgatgatgccattggagggaatgtgagcaaatatatagtgcttccaactggctattgtggacagcccaagaaaggacatcttatctttgatgcttgctttgaaagtggtaacctgggccgggtggaccaggtctctgagtttgagtatgatctgttcattaggccggacacctgtaatccacgcttccgagtctggttcaactttactgttgaaaatgtgaaagaatcacagagggtcattttcaacattgttaacttcagtaaaaccaagagtctctatagagatgggatggcccctatggtgaaatctaccagcagaccaaaatggcaaaggctgccacccaaaaatgtttactactaccgctgcccggaccataggaagaactatgtgatgtcctttgccttttgttttgaccgagaagaagatatttaccagtttgcttactgctacccatatacatacactcgcttccaacattaccttgacagcctgcaaaagagaaacatggattacttctttcgggagcagctgggccagagtgtgcaacaacgaaagcttgacctcctgacgataaccagccctgctggaagatggagctggtgaaatcatttgcttctgaaggagaatggtggcctttccaaatttgactatcagatatgaatttgacctaatctcgggaatgtttccggctggaagatggagctggtgaaatcatttgcttctgaaggagaatggtggcctttccaaatttgactatcagatatgaatttgacctaatctcgggaatgtttccggtaagactgcagactctcaggtgcttaagaagtcactgaggctctggacaaacaggaacgtattagctttttgcctactgactacacagcctccaccattcacccaaaatggatctgcatctcccaggtgcatctgcaagcacacaaaaacacacactgggaaggggtatgagctgaggttagtcctaggtgctgcactttctattcctgacatatcaggatgtgtgggagggaggccaaagctgcagcaccaggctgggcttccagtcctgttgctactgtggaagctggctccagacaggtgggggcagcaaagagccagcctgtatggtcagctgggattctagttgaccaaagctgttgggagaactcaagctcatcagtgtggcaagttagacaacttgatctggacacatgcataaatggaacaggggtccagatacccacaggattaatactaataaaccattttgcttaagcagcaaaactcggtttatatattgaa

SEQ ID NO: 1775 - DNA, 1353 bp, Homo sapiens
  source 1..1353: mol_type = genomic DNA
aggcaaccgtcgtgccgcgtcttcctgaggtagctcctgtcagcccactgatcccaccacccgctccctactgccccgcggtcttcgcgtgagctcggagactgagggacaacaaaaatggcggaggggagccagtcggcgcctgaggcaggcaatgatatgggaaatgatgatgccattggagggaatgtgagcaaatatatagtgcttccaactggctattgtggacagcccaagaaaggacatcttatctttgatgcttgctttgaaagtggtaacctgggccgggtggaccaggtctctgagtttgagtatgatctgttcattaggccggacacctgtaatccacgcttccgagtctggttcaactttactgttgaaaatgtgaaagaatcacagagggtcattttcaacattgttaacttcagtaaaaccaagagtctctatagagatgggatggcccctatggtgaaatctaccagcagaccaaaatggcaaaggctgccacccaaaaatgtttactactaccgctgcccggaccataggaagaactatgtgatgtcctttgccttttgttttgaccgagaagaagatatttaccagtttgcttactgctacccatatacatacactcgcttccaacattaccttgacagcctgcaaaagagaaacatggattacttctttcgggagcagctgggccagagtgtgcaacaacgaaagcttgacctcctgacgataaccagccctgacaatctccgggaaggggcagagcagaaggtggtattcatcacaggacgagtccacccaggggaaacaccctcatcatttgtgtgccaagggatcattgacttccttgtaagccagcaccctattgcctgtgtcctccgggaatacctggtcttcaagatcgcaccaatgctcaatcctgatggagtctacctgggcaattacaggtgttctctgatgggatttgatctgaatcgtcactggctggatccctctccatgggtccatcctaccctgcatggagtgaaacaactcatcgtccagatgtacaacgacccagtaagtaactgaatgccctccacagctgctgatctatggcttgatctgggaaagggcagcattgtattgggaaagtccactagaagctgcaaattaggaatacatagctaaaaccagggaggcactaggcctgctcttctctgaatccagcagacccaaggaccttctcccaatctcttttcctgcaacctctcacaaatagtggattcagttttggaggtctggagggttaaaggaaatatattggagtgtatccatatttgtcagggatctttggttacaagc

SEQ ID NO: 1776 - DNA, 2947 bp, Homo sapiens
  source 1..2947: mol_type = genomic DNA
aggcaaccgtcgtgccgcgtcttcctgaggtagctcctgtcagcccactgatcccaccacccgctccctactgccccgcggtcttcgcgtgagctcggagactgagggacaacaaaaatggcggaggggagccagtcggcgcctgaggcaggcaatgatatgggaaatgatgatgccattggagggaatgtgagcaaatatatagtgcttccaactggctattgtggacagcccaagaaaggacatcttatctttgatgcttgctttgaaagtggtaacctgggccgggtggaccaggtctctgagtttgagtatgatctgttcattaggccggacacctgtaatccacgcttccgagtctggttcaactttactgttgaaaatgtgaaagaatcacagagggtcattttcaacattgttaacttcagtaaaaccaagagtctctatagagatgggatggcccctatggtgaaatctaccagcagaccaaaatggcaaaggctgccacccaaaaatgtttactactaccgctgcccggaccataggaagaactatgtgatgtcctttgccttttgttttgaccgagaagaagatatttaccagtttgcttactgctacccatatacatacactcgcttccaacattaccttgacagcctgcaaaagagaaacatggattacttctttcgggagcagctgggccagagtgtgcaacaacgaaagcttgacctcctgacgataaccagccctgacaatctccgggaaggggcagagcagaaggtggtattcatcacaggacgagtccacccaggggaaacaccctcatcatttgtgtgccaagggatcattgacttccttgtaagccagcaccctattgcctgtgtcctccgggaatacctggtcttcaagatcgcaccaatgctcaatcctgatggagtctacctgggcaattacaggtgttctctgatgggatttgatctgaatcgtcactggctggatccctctccatgggtccatcctaccctgcatggagtgaaacaactcatcgtccagatgtacaacgacccaaaaacaagcctggagttttatattgacatccatgcccactccaccatgatgaatggcttcatgtatggcaacatctttgaggatgaggaacggttccagaggcaggccatttttcccaagctcctctgccagaatgctgaggacttctcctattccagcacatcctttaaccgggacgctgtgaaagcaggaactggccgtcgcttcctcggtggactcctggaccacacttcctattgctacaccctagaggtctccttctacagctacatcatcagtggcaccacggctgctgtgccctacactgaagaagcctatatgaagctggggcggaatgtggcaagaacctttttggactattatcggctgaaccccgtggttgaaaaggtggcaattcccatgccgagactgcgaaataaagaaatagaagtccagagaaggaaagaaaaatcccctccttacaagcacccactcctgcggggcccagccagcaactaccccaacagcaaaggggacaagaagagctcagtgaaccacaaagacccttcaacccctttttaaagacacggagtcctgggaggtcttatggggacaggagcatgcattttctgctggggaatgaaattaatcactcttctctagcttccaaggatttgtggattaatgcataggctagtgaaagggaagggatacaatgagaaacttcatcactgattttccctttttccaatggaaaatcaattgtaagccttcagctcaaaaagctcaggaacaaaataggagatcggaaccaggtgagcacagatgctattttctacaacatagagatcttccaagatgaggaaaacctacacatcccttttaagagatttgacacatatcaggtcagttctttcaaagccactttacatttttaagttttatagttactgcagatggttaccttttaaataggcttggttgtttacagctttagaaatgcagtgtttgtattttctgatccaaaacaacagcaacaacacatgcaaccaaagggcaaatgcatcctagggaacaatgggacagaatttttgaaatcaacggtggacttaaatatatggtcactgtatctaagctgcatgcttgctgattccctcaaaccccagcatgcagatttagaaaactgttttgagagctgtttcccaatttcctcggtagtttaattaaaattttagctctaaagacaaaaagcactggtcactcattttaaaaggtttattatggttaaggtctccagatcccaggtgacagggattaagcctggcccctgaagatgtaggcattgctaatctgcaatgaggaaagggtgattgccaggcaaggaagatgcaaaagacagaaggatgcaccctgaggcagggaggaatgataaaataaaacagtagtagcaattcccaaggtgtggcaagctaaatattggcatttttgtgaagagtaaagtgcctttgtatgatgaatgggtccaggggggtctgctcccttcctgtctgtggaaacagcaggctgagtcaccatgacagcctgctaattaaaatgacctcccggaaatgaggattagaacacagggagaggaagggaggctccagggaggaaaatcccttagcacagagctccactaaagcattttttgtttgtttgtttgtttgtttgtttgtttgagttggagattattgaagtttgctacaaaaatcaaaaagaaaacttgttctcctttgcatgctagttttcagaaatgatgacaaagagccatatgttgattggctacaaatgtcatgttgtatatacagcttctcccctgggttcgttttgcccagaggaacacaaataaagtgttttgtgc

SEQ ID NO: 1777 - DNA, 3500 bp, Homo sapiens
  source 1..3500: mol_type = genomic DNA
acttcctgccgggctgcgggcgcctgagcggctcttcagcgtttgcgccggcggctgccgcgtctctctcggctcccgcttcctttgaccgcctcccccccccggcccggcggcgcccgcctcctccacggccactccgcctcttccctcccttcgtcccttcttcctctcccttttttccttcttccttcccctcctcgccgccaccgcccaggaccgccggccgggggacgagctcggagcagcagccagagtttattaaccacttaacctctcagaactgaacaaagacaacattgttcctggaacgccctctttttaaaaaaggtagaactttagacttcatagcactgaattaacctgcactgaaagctgtttacctgcatttgttcacttttgttgaaagtgaccatgtctcaagttcaagtgcaagttcagaacccatctgctgctctctcagggagccaaatactgaacaagaaccagtctcttctctcacagcctttgatgagtattccttctactactagctctctgccctctgaaaatgcaggtagacccattcaaaactctgctttaccctctgcatctattacatccaccagtgcagctgcagaaagcataacccctactgtagaactaaatgcactgtgcatgaaacttggaaaaaaaccaatgtataagcctgttgacccttactctcggatgcagtccacctataactacaacatgagaggaggtgcttatcccccgaggtacttttacccatttccagttccacctttactttatcaagtggaactttctgtgggaggacagcaatttaatggcaaaggaaagacaagacaggctgcgaaacacgatgctgctgccaaagcgttgaggatcctgcagaatgagcccctgccagagaggctggaggtgaatggaagagaatccgaagaagaaaatctcaataaatctgaaataagtcaagtgtttgagattgcacttaaacggaacttgcctgtgaatttcgaggtggcccgggagagtggcccaccccacatgaagaactttgtgaccaaggtttcggttggggagtttgtgggggaaggtgaagggaaaagcaagaagatttcaaagaaaaatgccgccatagctgttcttgaggagctgaagaagttaccgcccctgcctgcagttgaacgagtaaagcctagaatcaaaaagaaaacaaaacccatagtcaagccacagacaagcccagaatatggccaggggatcaatccgattagccgactggcccagatccagcaggcaaaaaaggagaaggagccagagtacacgctcctcacagagcgaggcctcccgcgccgcagggagtttgtgatgcaggtgaaggttggaaaccacactgcagaaggaacgggcaccaacaagaaggtggccaagcgcaatgcagccgagaacatgctggagatccttggtttcaaagtcccgcaggcgcagcccaccaaacccgcactcaagtcagaggagaagacacccataaagaaaccaggggatggaagaaaagtaaccttttttgaacctggctctggggatgaaaatgggactagtaataaagaggatgagttcaggatgccttatctaagtcatcagcagctgcctgctggaattcttcccatggtgcccgaggtcgcccaggctgtaggagttagtcaaggacatcacaccaaagattttaccagggcagctccgaatcctgccaaggccacggtaactgccatgatagcccgagagttgttgtatgggggcacctcgcccacagccgagaccattttaaagaataacatctcttcaggccacgtaccccatggacctctcacgagaccctctgagcaactggactatctttccagagtccagggattccaggttgaatacaaagacttccccaaaaacaacaagaacgaatttgtatctcttatcaattgctcctctcagccacctctgatcagccatggtatcggcaaggatgtggagtcctgccatgatatggctgcgctgaacatcttaaagttgctgtctgagttggaccaacaaagtacagagatgccaagaacaggaaacggaccaatgtctgtgtgtgggaggtgctgaaccttttctggccatgaaccattataaaatcccaacatatatactgaaaatactgaaactgctttgaaaatttggaatttctgatacctccagtgggccgagagacacggtgggtaaaggatgtgggcagcagcagggaagacaacagaaacacaaggaggcggctgtggccgggctggactgtgctggggtttgttgtgatggccactcggtgacctggcggtccctacgcaatagcagctgcctgtggggaagaagggctgcccagccagctggttctcccgggacaccagcagatccacaccctgggcacctccgtgtttggtcttttttttcccctgtgtgaaagaagaaacggcacgaccccttctcaagctggctcactcagacacattgggacaaaccctggacagccatgccagagagaggcctttgaccggccccagagctaaaagcaccagagaaaatcaaatgcttcctactcagcgtgacccaacttttctagtgtgccacggccccaccacctcctgcagtacccacaccatcaccactgctttctcttccaacagtgatctgtattcttagtttcattattttcttttgattgatatgacactatataaaattttcatttgagaatttctcaattgtatctagttaaatagcacagtttggaaacttgtctgagactgactttatcaataatctaaccgacaaagatcatatccatgtgtatgtggttagacatttttatttcattgactaacccaggacagtttcagtgatgcaaattgtgtgccctctggttcagctgaaacagtcctggactttcaaaaaccttgaataagtctcccacagttgtataaattggacaatttaggaattttaaactttagatgatcatttggttccatttttatttcatttttatttttgttaatgcaaacaggacttaaatgaactttgatctctgttttaaagattattaaaaaacattgtgtatctatacatatggctcttgaggacttagctttcactacactacaggatatgatctccatgtagtccatataaacctgcagagtgattttccagagtgctcgatactgttaattacatctccattagggctgaaaagaatgacctacgtttctgtatacagctgtgttgcttttgatgttgtgttactgtacacagaagtgtgtgcactgaggctctgcgtgtggtccgtatggaaagcctggtagccctgcgagttaagtactgcttccattcattgtttacgctggaatttttctccccatggaatgtaagtaaaacttaagtgtttgtcatcaataaatggtaatactaaa

SEQ ID NO: 1778 - DNA, 1326 bp, Homo sapiens
  source 1..1326: mol_type = genomic DNA
ggaccctgaaggagggacagggcacctcggtggtggcccaaggcccaagccggcccctgcccagcacggccaacgtggtggtcattggtggaggcagcttgggctgccagaccctgtaccacctggccaagctgggcatgagtggggcggtgctgctggagcgggagcggctgacctccgggaccacctggcacacggcaggcctgctgtggcagctgcggcccagtgacgtggaggtggagcttctggcccacactcggcgggtggtgagccgggagctggaggaggagacgggactacacacgggctggatccagaatgggggcctcttcatcgcgtccaaccggcagcgcctggacgagtacaagaggctcatgtcgctgggcaaggcgtatggtgtggaatcccatgtgctgagcccggcagagaccaagactctgtacccgctgatgaatgtggacgacctctacgggaccctgtatgtgccgcacgacggtaccatggaccccgctggcacctgtaccaccctcgccagggcagcttctgcccgaggagcacaggtcattgagaactgcccagtgaccggcattcgtgtgtggacggatgattttggggtgcggcgggtcgcgggtgtggagactcagcatggttccatccagacaccctgcgtggtcaactgtgcaggagtgtgggcaagtgctgtgggccggatggctggagtcaaggtcccgctggtggccatgcaccatgcctatgtcgtcaccgagcgcatcgaggggattcagaacatgcccaatgtccgtgatcatgatgcctctgtctacctccgcctccaaggggatgccttgtctgtgggtggctatgaggccaaccccatcttttgggaggaggcagtcaaatacagacccagggcagctggagggctttgcctcaaaacatccacagagaaggtctgcgcagtgtggagtgatgacctcagaagggcatgagagcacacaagtcctacgtccttcagcaaatgacactgccctcccaaccagctgctgcagcggcatttcccctggcctgggctgtttcccgggcagcttctggggttagggcagccctgcagccctgttctatgtgtatatgcatttagtccacacatggaacgactgagtggctactttgggctaaaaactgctttaatttctggagaaagagggaaactaagataaaagtccctgactctgggtgcctatattttggtggagagacatacaataaacaaacaaatggctgggcacggtggctcacacctgtaatcccagcactttgggaggctga

SEQ ID NO: 1779 - DNA, 2266 bp, Homo sapiens
  source 1..2266: mol_type = genomic DNA
gtgccgtgtcggcagttaggagggcaggtggcggggtggggggttgtctgcaggagcagcggccagggaggggcatggggctgtggggctgtggggtgtctgatgggggcagatcccagggaggccaaggcagtggcagaaaagctggactctggagcccacgcacctgcctggcttcgtgccactgccaggtccaggacttgtctgtgcccttgggcgagatataacttctctgcgcctcactttcctcatctgtagaaaggggcacacctggtaggagtgtaagacgcttcccgcaggggctggcccagagcaggagctgggcctgggattgccgtggctccagggagcagccctggctgaggtcctgggtaaccacctctccctgtcgttccccaccttgggtgcatccagctcctcctccagcctcctgggccctggctgggctctcagacccaccaggcaaccctgcggcctcctttgtgcctctgttttgcctggacctcatgggggccccctgcccgcgtccacaacacacgggcactcagtgcagggctctccgagggcagggccaggcctgaccccatcacagcctcagcgggaccccgctctggggagggaagcggggaggggccaaagaggcaggctgaggaccacgtcttttcttcccaggtcctcgagtacgactactacggggcttacgggagccgcgcgcacgaggactacgcctaccgcaggctgctggcagacgagtacaccttcgccttcccgccccaccacgacacgatcaagaaggagtgcctggcctgcagaggggccgccgctgtgtttgacatgtcctacttcgggaagttctacctggtggggctggatgcaaggaaggctgccgactggctcttctccgcagatgtcagccgacccccaggctccaccgtgtacacgtgcatgctcaaccaccgtgggggcaccgagagtgacctgactgtcagccgcctggcacccagccaccaggcctccccgctggcccccgcctttgaaggggacggttactacctggccatgggcggggccgtggcccagcacaactggtcccacatcaccaccgtgctgcaggaccagaagtcccagtgccagctcatcgacagctccgaggacctgggtatgatcagtatccagggcccagccagccgagccattttgcaggaggtgctggacgcagacctgagcaacgaggccttcccgttctccacccacaagctactgagagccgcagggcacctggtccgagccatgcggctgtcctttgtgggggagctgggctgggagctgcacattccaaaggcgtcctgcgtgcctgtgtaccgggctgtgatggccgcgggtgccaagcacggcctcatcaacgcagggtaccgcgccatcgactccctgagcattgagaaaggctaccggcactggcacgcggacctgcggccagacgacagccccctggaggcaggcctggccttcacctgcaagctcaagtcgccggtgcccttcctggggagggaggccctggagcagcagcgggccgcaggcctccgccggcgcctggtgtgcttcaccatggaggagccgctgtggacgcgtccccaccctgcggtttctggggccccagctttctctactgcttcttccagcaaagtacccatgtttggcctggaggccatctggaggaacggccaagtggtgggccatgtccggagggctgactttgggttcgccatcgacaagaccatcgcctacggttacatccatgaccccagcggtgggccggtctcgctggactttgtgaagagcggggactatgccctggagagaatgggggtgacctatggtgcccaggctcacctgaagtcgcccttcgaccccaacaacaagagggtgaagggaatctactgagggctcagaccacatgccccatcccatgctgtccatccattctcacaggtcccaaatggccctgggtcccaggaccctggacccagccagaacttgtgccctccctgtccttagcctaggcctagtcctgcgaaaacccccaaaccagatacggacagagaccaagatggcccatcctgtggtcactgactggaaggcagtctctaatccaccccaatcctcccagaaagcaaacctgtaagtgtcttgggctcagggaccatggcttgtagccctttccaagcttctagaaggtgcttagtaaatacttgataagccccacgtg

SEQ ID NO: 1780 - DNA, 3344 bp, Homo sapiens
  source 1..3344: mol_type = genomic DNA
agtgtgggctacccggccactgccctggagctgtggtgactgctgcgtttttctcccatgcacttgcacgtccaggactcctgggagaacttgggccacactccttccttgccctcttgagctcattcgtcaccctgttgggtgagcacagccctagctcaggccactgggcaagccacaccatccaaagaggaggtcctctgccccaggacccccacaccaccccagctccctgtttcgctgaggcctggagcccccatggcctcactgagccgagccctacgtgtggctgctgcccaccctcgccagagccctacccggggcatggggccatgcaacctgtccagcgcagctggccccacagccgagaagagtgtgccatatcagcggaccctgaaggagggacagggcacctcggtggtggcccaaggcccaagccggcccctgcccagcacggccaacgtggtggtcattggtggaggcagcttgggctgccagaccctgtaccacctggccaagctgggcatgagtggggcggtgctgctggagcgggagcggctgacctccgggaccacctggcacacggcaggcctgctgtggcagctgcggcccagtgacgtggaggtggagcttctggcccacactcggcgggtggtgagccgggagctggaggaggagacgggactacacacgggctggatccagaatgggggcctcttcatcgcgtccaaccggcagcgcctggacgagtacaagaggctcatgtcgctgggcaaggcgtatggtgtggaatcccatgtgctgagcccggcagagaccaagactctgtacccgctgatgaatgtggacgacctctacgggaccctgtatgtgccgcacgacggtaccatggaccccgctggcacctgtaccaccctcgccagggcagcttctgcccgaggagcacaggtcattgagaactgcccagtgaccggcattcgtgtgtggacggatgattttggggtgcggcgggtcgcgggtgtggagactcagcatggttccatccagacaccctgcgtggtcaactgtgcaggagtgtgggcaagtgctgtgggccggatggctggagtcaaggtcccgctggtggccatgcaccatgcctatgtcgtcaccgagcgcatcgaggggattcagaacatgcccaatgtccgtgatcatgatgcctctgtctacctccgcctccaaggggatgccttgtctgtgggtggctatgaggccaaccccatcttttgggaggaggtgtcagacaagtttgccttcggcctctttgacctggactgggaggtgttcacccagcacattgaaggcgccatcaacagggtccccgtgctggagaagacaggaatcaagtccacggtctgcggccctgaatccttcacgcccgaccacaagcccctgatgggggaggcacctgagctccgagggttcttcctgggctgtggcttcaacagcgcaggaatgatgctgggtggtggctgtgggcaggagctggcccactggatcatccatgggcgcccggagaaggacatgcatggctatgacatcaggcgcttccatcactcgctcacggaccacccccgctggatccgagagcgaagccatgagtcctacgccaagaactactccgtcgtcttcccccacgatgagccgctggccgggcgcaacatgaggagagacccgctgcacgaggaactccttggacaaggctgcgtgttccaggagcggcatggctgggagcgaccgggatggtttcatccccgaggcccagctccggtcctcgagtacgactactacggggcttacgggagccgcgcgcacgaggactacgcctaccgcaggctgctggcagacgagtacaccttcgccttcccgccccaccacgacacgatcaagaaggagtgcctggcctgcagaggggccgccgctgtgtttgacatgtcctacttcgggaagttctacctggtggggctggatgcaaggaaggctgccgactggctcttctccgcagatgtcagccgacccccaggctccaccgtgtacacgtgcatgctcaaccaccgtgggggcaccgagagtgacctgactgtcagccgcctggcacccagccaccaggcctccccgctggcccccgcctttgaaggggacggttactacctggccatgggcggggccgtggcccagcacaactggtcccacatcaccaccgtgctgcaggaccagaagtcccagtgccagctcatcgacagctccgaggacctgggtatgatcagtatccagggcccagccagccgagccattttgcaggaggtgctggacgcagacctgagcaacgaggccttcccgttctccacccacaagctactgagagccgcagggcacctggtccgagccatgcggctgtcctttgtgggggagctgggctgggagctgcacattccaaaggcgtcctgcgtgcctgtgtaccgggctgtgatggccgcgggtgccaagcacggcctcatcaacgcagggtaccgcgccatcgactccctgagcattgagaaaggctaccggcactggcacgcggacctgcggccagacgacagccccctggaggcaggcctggccttcacctgcaagctcaagtcgccggtgcccttcctggggagggaggccctggagcagcagcgggccgcaggcctccgccggcgcctggtgtgcttcaccatggaggacaaagtacccatgtttggcctggaggccatctggaggaacggccaagtggtgggccatgtccggagggctgactttgggttcgccatcgacaagaccatcgcctacggttacatccatgaccccagcggtgggccggtctcgctggactttgtgaagagcggggactatgccctggagagaatgggggtgacctatggtgcccaggctcacctgaagtcgcccttcgaccccaacaacaagagggtgaagggaatctactgagggctcagaccacatgccccatcccatgctgtccatccattctcacaggtcccaaatggccctgggtcccaggaccctggacccagccagaacttgtgccctccctgtccttagcctaggcctagtcctgcgaaaacccccaaaccagatacggacagagaccaagatggcccatcctgtggtcactgactggaaggcagtctctaatccaccccaatcctcccagaaagcaaacctgtaagtgtcttgggctcagggaccatggcttgtagccctttccaagcttctagaaggtgcttagtaaatacttgataagccccacgtgaaaa

SEQ ID NO: 1781 - DNA, 1854 bp, Homo sapiens
  source 1..1854: mol_type = genomic DNA
ggttttgctccgctttagcagcggcgaagggaggacccccgggagccggtccccggcgtccggtcgcccagcccttttcaggcttgggcccgcatggaggggaccgtggagtcccagacgcctgacctgcgggatgtggagggtaaggtgggcaggaagacccctgaagggctgctccgcgggctgcgaggcgagtgtgagctgggaacctctggcgccctgctgctcccaggggcgtctagcaccggccacgacttgggggacaagatcatggcgctgaagatggagctggcttacctgcgagccatcgatgtgaagatcctgcagcagctggtgaccttgaatgagggcatcgaggcagtgcgctggctgttggaggagcgggggacgttgaccagtcattgcagcagcctcaccagcagtcaatatagcctgacaggcgggagcccaggccgctcaaggcgaggcagctgggacagcctgccagacaccagcaccaccgaccggctggacagtgtctctattggcagcttcctggacacagtggcccccagcgagctggatgaacagggcccacctggggctccacgttccgagatggactgggcaaaagttatagctggtggagagagggccaggactgaggtggatgtggcagccaccaggctagggagcttgagagctgtgtggaagcccccaggggagaggcttcaaggtggaccacctgagtcaccagaggatgagagtgccaagctgggcttcgaggcccactggttctgggagcagtgccaggatgatgtgaccttcttgtaacaactattccacccttttgtaatcctgtggctcttttatccattagatgtggtctcccccaaaattgattctccctcagtctgagactaggaagaggctgcactgaaatcagttaccatggaaacctggctcatcatttctctagtccctagggagtctctgcctttatccctcaattattgggtccctagagctagcttgctctttctttctttctttctttttttgagacagggtcttatgctgttacccaagatagagagcagtggcatgatcacagctcactgcagccttgacctcctgggctcaagcgatcctcctatttcagcctcccccatagttaggaccacaggcatgcaccaccatgcccagctaattgtttatttatttattttttttttgtagagatagggtttccctgtgttgcccaggctggtctcaaactcctgggctcaagggatcctcccgcctcagcctcccaaagtgctgggattatgcccagcccctagagatacttctatagagatattgactctaaaggattgacctatggcttttggtatttagtatctctcactactccccccagctaagtaaggatttaaggaatttaggactccctggagttaacagatgaagagatgggggcataattacttcacccaaagtctagaagccttggcctctctcttggccaagatggaggattgaggagggacatggaccttcaggactaaccctctatggattggccctcccagaagcgtttgggctggtagacccaccccttcctacctgctgagtgatgtcatttcctgccaggatgggtagccctttgtacgggtccttggatggtagtaggtcatataggggcatctgagcccctgctgctaagtgagatcacattatttatcgtccataccattacttcttgtgaacagtaacatgtcactcctcctggcaggaaagtttctcattgtcagatgtttgtgcttcttttcaggtcttactttttaaatagagtgttctcattttatccta

SEQ ID NO: 1782 - DNA, 609 bp, Homo sapiens
  source 1..609: mol_type = genomic DNA
agtttctgcgacttgtgttgggactgctgataggaagatgtcttcaggaaatgctaaaattgggcaccctgcccccaacttcaaagccacagctgatgaaggcatctcgttcaggggcctttttatcattgatgataagggtattcttcggcagatcactgtaaatgacctccctgttggccgctctgtggatgagactttgagactagttcaggccttccagttcactgacaaacatggggaagtgtgcccagctggctggaaacctggcagtgataccatcaagcctgatgtccaaaagagcaaagaatatttctccaagcagaagtgagcgctgggctgttttagtgccaggctgcggtgggcagccatgagaacaaaacctcttctgtattttttttttccattagtaaaacacaagacttcagattcagccgaattgtggtgtcttacaaggcaggcctttcctacagggggtggagagaccagcctttcttcctttggtaggaatggcctgagttggcgttgtgggcaggctactggtttgtatgatgtattagtagagcaacccattaatcttttgtagtttgtattaaacttgaactgaga

SEQ ID NO: 1783 - DNA, 3028 bp, Homo sapiens
  source 1..3028: mol_type = genomic DNA
tcagtctttcgcggcccgggagctcagcagagctaccagctgccctgttggcttcgctggtcggatcgtcctcctggccccgccaaacaggcggggggagcggccccgactgtggggccatggcagtagtctcctcgttcgccgccgccgctagcctagctgagtcgccggcttctgcgctaggggctcccaccgcctccgcaggctaaggagccgctgccaccaacgagctgtgagggttactatgctccctctttgccgccgtctcctcctcttgcccgcgcaggcacccctctggctgctcagtcctgcctcagtgtcaaaccagaagagaagtaaaattcaacaaaaatttatgtgtggagttccttcttaaaagaagaaaaaagtgattatttagactatggatcggagcaaacggaattcaattgcaggatttcctccacgtgtggagcgtcttgaagagtttgaaggaggtggtggaggagaaggaaatgtgagccaggtgggaagagtttggccatcttcgtatcgagctcttataagtgccttttccagactgacgcgtttggatgatttcacctgtgaaaaaatagggtctggcttcttttctgaagtgttcaaggtacgacaccgagcttctggtcaggtgatggctcttaagatgaacacattgagcagtaaccgggcaaacatgctgaaagaagtacagctcatgaatagactctcccatcccaacatccttaggtatatcaactccgggaacctggaacagttgctagacagtaacctgcatttgccttggactgtgagggtaaaactggcctatgacatagcagtgggcctcagctaccttcacttcaaaggcatttttcatcgggacctcacatctaagaactgcctgataaagagggatgagaatggttactctgcagtggtagctgactttggcctggctgagaagatccccgatgtcagcatggggagtgagaagctggccgtggtgggttccccattctggatggcacctgaggttctccgagatgagccctataatgaaaaggcagatgtgttctcttatggtatcatcctctgcgagatcatcgcccgcatccaggccgatccggactatcttccccgcacagagaatttcgggctggactatgatgctttccagcacatggtgggagactgtcccccagattttctgcaacttactttcaactgctgtaacatggatcccaaactgcgcccatcttttgtggagattgggaagaccctggaggaaattctgagccgcctacaggaagaagagcaggagagggataggaagctgcagcccacagccaggggactcttggagaaagcacctggggtgaagcgactaagctcactggatgacaagatcccccacaagtcaccatgcccaagacgtaccatctggctgtctcgaagccagtcagatatcttttcccgtaagcccccacgtacagtgagtgtcttggacccatactaccggccacgagatggtgctgcccgcacccccaaagtcaacccttttagtgctcgccaggacctcatggggggcaagatcaagttttttgacctgcccagcaagtctgtcatctctctggtatttgacctggatgcaccagggcccggaactatgcccctggctgactggcaggagcccctggccccacctattcgccggtggcgttccttgcctggttcgcctgagttcttgcatcaagaggcttgtccatttgtgggccgggaagaatcgctatctgatgggcccccaccacgcctaagtagtctcaagtacagagttaaagagatcccaccattccgggcatctgccctaccagctgctcaagcccatgaggctatggactgctccattctccaggaagaaaatggttttgggtccaggccccaggggaccagtccatgccctgcgggtgcttctgaggagatggaggtagaagaaaggccagcaggctcaactccagccaccttctccacctcaggcataggcctgcaaacccagggaaagcaggatgggtgagggggtttagtccctgcctcaccttggggatggaccttcagctgaaaccatatggccccctaggtgcacagccttgattcttccctggagcctacagagcaggcaggctaggccaagccaggctcaacttctgggctcccagtgcccattggctgtgtatgacgggaggcagcagtgagaggccttcctagttagggccaacagctgataccaagcctctgaaatccagcaaggaggtctgcctcccaccagaccctctccagtgtacttccccagataggaccagaggatgtctagttctaggctgagctggcaggcagctattaccccggttctttccccaccccaggtctgtctcttgccttttcttggggcatataagctactgagtggaacatggagctgatcaagaggccgtaatggtcatggctgtttcccagacctgaatattggggtgcttcttgccagtattctaagacatttgagtaattgctgtttgcacttactgcatggtcagaccacgtcactacatttctatgcaaggggacagcaaggcagcgtggtggtcatggctcttagctaacctattcaaagaccttttcctgttgattaatctattttcatatttataaaggagtcttaatgttctgccccataagactttcaaccttgtggttgggagtggggctggttttgtaggccctagggcctgcttctatgtatttatcaacatgtgatacattcaattggttaaatggtttatacagggactgatttgcttcccttcctgccatggctggagctttgggaacagtctgtccttacagagctgcaataagaaataaccaaagatgaagctggtcaaatattttcataacttgcttctgttgatttttttttttgtaaaactttcccaagacattttcagacttaaaaataaagtcagtgttacaggtg

SEQ ID NO: 1784 - DNA, 2600 bp, Homo sapiens
  source 1..2600: mol_type = genomic DNA
tgattatttagactatggatcggagcaaacggaattcaattgcaggatttcctccacgtgtggagcgtcttgaagagtttgaaggaggtggtggaggagaaggaaatgtgagccaggtgggaagagtttggccatcttcgtatcgagctcttataagtgccttttccagactgacgcgtttggatgatttcacctgtgaaaaaatagggtctggcttcttttctgaagtgttcaaggtacgacaccgagcttctggtcaggtgatggctcttaagatgaacacattgagcagtaaccgggcaaacatgctgaaagaagtacagctcatgaatagactctcccatcccaacatccttaggttcatgggtgtatgtgttcatcaaggacaattgcatgcacttacagagtatatcaactccgggaacctggaacagttgctagacagtaacctgcatttgccttggactgtgagggtaaaactggcctatgacatagcagtgggcctcagctaccttcacttcaaaggcatttttcatcgggacctcacatctaagaactgcctgataaagagggatgagaatggttactctgcagtggtagctgactttggcctggctgagaagatccccgatgtcagcatggggagtgagaagctggccgtggtgggttccccattctggatggcacctgaggttctccgagatgagccctataatgaaaaggcagatgtgttctcttatggtatcatcctctgcgagatcatcgcccgcatccaggccgatccggactatcttccccgcacagagatggatcccaaactgcgcccatcttttgtggagattgggaagaccctggaggaaattctgagccgcctacaggaagaagagcaggagagggataggaagctgcagcccacagccaggggactcttggagaaagcacctggggtgaagcgactaagctcactggatgacaagatcccccacaagtcaccatgcccaagacgtaccatctggctgtctcgaagccagtcagatatcttttcccgtaagcccccacgtacagtgagtgtcttggacccatactaccggccacgagatggtgctgcccgcacccccaaagtcaacccttttagtgctcgccaggacctcatggggggcaagatcaagttttttgacctgcccagcaagtctgtcatctctctggtatttgacctggatgcaccagggcccggaactatgcccctggctgactggcaggagcccctggccccacctattcgccggtggcgttccttgcctggttcgcctgagttcttgcatcaagaggcttgtccatttgtgggccgggaagaatcgctatctgatgggcccccaccacgcctaagtagtctcaagtacagagttaaagagatcccaccattccgggcatctgccctaccagctgctcaagcccatgaggctatggactgctccattctccaggaagaaaatggttttgggtccaggccccaggggaccagtccatgccctgcgggtgcttctgaggagatggaggtagaagaaaggccagcaggctcaactccagccaccttctccacctcaggcataggcctgcaaacccagggaaagcaggatgggtgagggggtttagtccctgcctcaccttggggatggaccttcagctgaaaccatatggccccctaggtgcacagccttgattcttccctggagcctacagagcaggcaggctaggccaagccaggctcaacttctgggctcccagtgcccattggctgtgtatgacgggaggcagcagtgagaggccttcctagttagggccaacagctgataccaagcctctgaaatccagcaaggaggtctgcctcccaccagaccctctccagtgtacttccccagataggaccagaggatgtctagttctaggctgagctggcaggcagctattaccccggttctttccccaccccaggtctgtctcttgccttttcttggggcatataagctactgagtggaacatggagctgatcaagaggccgtaatggtcatggctgtttcccagacctgaatattggggtgcttcttgccagtattctaagacatttgagtaattgctgtttgcacttactgcatggtcagaccacgtcactacatttctatgcaaggggacagcaaggcagcgtggtggtcatggctcttagctaacctattcaaagaccttttcctgttgattaatctattttcatatttataaaggagtcttaatgttctgccccataagactttcaaccttgtggttgggagtggggctggttttgtaggccctagggcctgcttctatgtatttatcaacatgtgatacattcaattggttaaatggtttatacagggactgatttgcttcccttcctgccatggctggagctttgggaacagtctgtccttacagagctgcaataagaaataaccaaagatgaagctggtcaaatattttcataacttgcttctgttgatttttttttttgtaaaactttcccaagacattttcagacttaaaaataaagtcagtgttacaggtg

SEQ ID NO: 1785 - DNA, 3074 bp, Homo sapiens
  source 1..3074: mol_type = genomic DNA
agtctttcgcggcccgggagctcagcagagctaccagctgccctgttggcttcgctggtcggatcgtcctcctggccccgccaaacaggcggggggagcggccccgactgtggggccatggcagtagtctcctcgttcgccgccgccgctagcctagctgagtcgccggcttctgcgctaggggctcccaccgcctccgcaggctaaggagccgctgccaccaacgagctgtgagggttactatgctccctctttgccgccgtctcctcctcttgcccgcgcaggcacccctctggctgctcagtcctgcctcagtgtcaaaccagaagagaagtaaaattcaacaaaaatttatgtgtggagttccttcttaaaagaagaaaaaagtgattatttagactatggatcggagcaaacggaattcaattgcaggatttcctccacgtgtggagcgtcttgaagagtttgaaggaggtggtggaggagaaggaaatgtgagccaggtgggaagagtttggccatcttcgtatcgagctcttataagtgccttttccagactgacgcgtttggatgatttcacctgtgaaaaaatagggtctggcttcttttctgaagtgttcaaggtacgacaccgagcttctggtcaggtgatggctcttaagatgaacacattgagcagtaaccgggcaaacatgctgaaagaagtacagctcatgaatagactctcccatcccaacatccttaggttcatgggtgtatgtgttcatcaaggacaattgcatgcacttacagagtatatcaactccgggaacctggaacagttgctagacagtaacctgcatttgccttggactgtgagggtaaaactggcctatgacatagcagtgggcctcagctaccttcacttcaaaggcatttttcatcgggacctcacatctaagaactgcctgataaagagggatgagaatggttactctgcagtggtagctgactttggcctggctgagaagatccccgatgtcagcatggggagtgagaagctggccgtggtgggttccccattctggatggcacctgaggttctccgagatgagccctataatgaaaaggcagatgtgttctcttatggtatcatcctctgcgagatcatcgcccgcatccaggccgatccggactatcttccccgcacagagaatttcgggctggactatgatgctttccagcacatggtgggagactgtcccccagattttctgcaacttactttcaactgctgtaacatggatcccaaactgcgcccatcttttgtggagattgggaagaccctggaggaaattctgagccgcctacaggaagaagagcaggagagggataggaagctgcagcccacagccaggggactcttggagaaagcacctggggtgaagcgactaagctcactggatgacaagatcccccacaagtcaccatgcccaagacgtaccatctggctgtctcgaagccagtcagatatcttttcccgtaagcccccacgtacagtgagtgtcttggacccatactaccggccacgagatggtgctgcccgcacccccaaagtcaacccttttagtgctcgccaggacctcatggggggcaagatcaagttttttgacctgcccagcaagtctgtcatctctctggtatttgacctggatgcaccagggcccggaactatgcccctggctgactggcaggagcccctggccccacctattcgccggtggcgttccttgcctggttcgcctgagttcttgcatcaagaggcttgtccatttgtgggccgggaagaatcgctatctgatgggcccccaccacgcctaagtagtctcaagtacagagttaaagagatcccaccattccgggcatctgccctaccagctgctcaagcccatgaggctatggactgctccattctccaggaagaaaatggttttgggtccaggccccaggggaccagtccatgccctgcgggtgcttctgaggagatggaggtagaagaaaggccagcaggctcaactccagccaccttctccacctcaggcataggcctgcaaacccagggaaagcaggatgggtgagggggtttagtccctgcctcaccttggggatggaccttcagctgaaaccatatggccccctaggtgcacagccttgattcttccctggagcctacagagcaggcaggctaggccaagccaggctcaacttctgggctcccagtgcccattggctgtgtatgacgggaggcagcagtgagaggccttcctagttagggccaacagctgataccaagcctctgaaatccagcaaggaggtctgcctcccaccagaccctctccagtgtacttccccagataggaccagaggatgtctagttctaggctgagctggcaggcagctattaccccggttctttccccaccccaggtctgtctcttgccttttcttggggcatataagctactgagtggaacatggagctgatcaagaggccgtaatggtcatggctgtttcccagacctgaatattggggtgcttcttgccagtattctaagacatttgagtaattgctgtttgcacttactgcatggtcagaccacgtcactacatttctatgcaaggggacagcaaggcagcgtggtggtcatggctcttagctaacctattcaaagaccttttcctgttgattaatctattttcatatttataaaggagtcttaatgttctgccccataagactttcaaccttgtggttgggagtggggctggttttgtaggccctagggcctgcttctatgtatttatcaacatgtgatacattcaattggttaaatggtttatacagggactgatttgcttcccttcctgccatggctggagctttgggaacagtctgtccttacagagctgcaataagaaataaccaaagatgaagctggtcaaatattttcataacttgcttctgttgatttttttttttgtaaaactttcccaagacattttcagacttaaaaataaagtcagtgttacaggtg

SEQ ID NO: 1786 - DNA, 2530 bp, Homo sapiens
  source 1..2530: mol_type = genomic DNA
ctgtcctcctgcagaggtggctgtggtcctggacctatgggcccttcccttcccccaacattgagccttgtgtgtctgcatggaggaggttcccaaggtctcatagtataagctgttcaagggtcagagaagcccccaggtcctgccttttcctgtccctttatgttggggagttgggggtgttacaggtatgctaaactctttagctgcagtctatctacccatgccagattcatcaagatcctcgatagtgtcctgcaccacctggtacctgcctgggaccacacactgggcaccttcagtgagattaagcaagtgaagcagttcctactgctgtcccgccagcggccaggcctggtggctcagtgcctgcgtgactctgagagcagcaagcccagcttcatgccacgcctatacatcaaccgccgtcttgccatggaacaccgtgcctgcccctctcgagaccctgcctgcaagaatgcagtcttcacccaggtatatgaaggcctcaagccctctgacaaatatgaaaagcccctggactacaggtggcccatgcgctatgaccagtggtgggagtgtaaatttattgcagaaggcatcattgaccaagggggtggtttccgggacagcctggcagatatgtcagaagagctgtgccctagctcagcggatacccccgtgcccctgcccttctttgtacgcacagccaaccagggcaatggcactggtgaggctcgggacatgtatgtacccaacccctcctgccgagactttgccaagtatgaatggatcggacagctgatgggggctgcccttcggggtaaggagttcctggtcctggccctgcctggttttgtgtggaagcagctttctggtgaggaggtgagctggagcaaggacttcccagctgtggactctgtgctggtgaagctcctggaagtgatggaaggaatggacaaggagacgtttgagttcaagtttgggaaggaactaacattcaccactgtactgagtgaccaacaggtggtggagctgatccctgggggtgcaggcatcgtcgtgggatatggggaccgttctcgtttcatccaactggtccagaaggcacggctagaggagagcaaggagcaggtggcagctatgcaggcaggtctgctgaaggtggtaccacaggctgtgctggacttgctgacctggcaagagttggagaagaaagtgtgtggggatccagaggtcactgtggatgctctgcgcaagctcacccggtttgaggacttcgagccatctgactcgcgggtgcagtatttctgggaggcactgaacaacttcaccaacgaggaccggagccgcttcctgcgctttgtcacgggccgcagtcgcctgccagcacggatctacatctacccagacaagctgggctacgagaccacagacgcgctgcccgagtcttccacttgctccagcaccctcttcctgccacactatgccagtgccaaggtatgcgaggagaagctccgctatgcggcctacaactgcgtggccatcgacactgacatgagcccttgggaggagtgaggcgtgccgccggctgtgggaccagcaagactgcacgtgtccctcttggccttgcccagggcgaagacaccttccctgccctggtttggctgacgtgctcagcaaaaccccatgtgccctgctcctgtgtgcagttggggtaggggcagctggcatggtcaggtaacactagtggcccagccccgcagacccacaagccctacccgtgctggggcttgcttcccgaggtatttcacctcttaagagggaatcttccacaagcccagcacaagctgccaggcctgagctacttgaagggggccatctaggtccccaacccatggactttgcctccattttcagctccgccttttttctcctattttctctctggctttcttcagccatgactcacaactaaaaacataaaacactggaggttagtggaggcccctccccaagcagggagcctgggatgggcagggagtgatagccaaactccttggtcacctgctccaagaaggaagcagtagctgagcacctgccctcacattctgctcttttcccctctccctccataccagagatgtggtgagctctgttcttctaccaacccagtctcaacacacaaagtgccaccaccttccctgactcagaacccacatccactcaatgtgaactctactaccacgacctccccatattcctcacttctccatcacctccagcctgactccctgtctgccctttcacccccaagattttgcacaggttaaggccagttatggcctttttgaaatctgtaatagctcccctttccccaactctaaagcctagaccttaaacctgttcctagagctatgcacacccctgccccagtttaccgttcctccctcagggcctccgtgacactccatgaaaagaagttcttgcataccggaaagttgaataaatggatgaattcattccttca

SEQ ID NO: 1787 - DNA, 1301 bp, Homo sapiens
  source 1..1301: mol_type = genomic DNA
atgatgccccgcgagacctttattctaaccgcaaggagtagcggaggggaggtcgtgatggcggcgccggaggcggaggttctgtcctcagccgcagtccctgatttggagtggtatgagaagtccgaagaaactcacgcctcccagatagaactacttgagacaagctctacgcaggaacctctcaacgcttcggaggccttttgcccaagagactgcatggtaccagtggtgtttcctgggcctgtgagccaggaaggctgctgtcagtttacttgtgaacttctaaagcatatcatgtatcaacgccagcagctccctctgccctatgaacagcttaagcacttttaccgaaaaccttctccccaggcagaggagatgctgaagaagaaacctcgggccaccactgaggtgagcagcaggaaatgccaacaagccctggcagaactggagagtgtcctcagccacctggaggacttctttgcacggacactagtaccgcgagtgctgattctccttgggggcaatgccctaagccccaaggagttctatgaactcgacttgtctctgctggccccctacagcgtggaccagagcctgagcacagcagcttgtttgcgccgtctcttccgagccatattcatggctgatgcctttagcgagcttcaggctcctccactcatgggcaccgtcgtcatggcacagggacaccgcaactgtggagaagattggtttcgacccaagctcaactatcgagtgcccagccggggccataaactgactgtgaccctgtcatgtggcagaccttccatccgaaccacggcttgggaagactacatttggttccaggcaccagtgacatttaaaggcttccgcgagtgaatgagtgcttcttaatcctaaaaacacaatggctgaattatctttctccatgtggcgctgaatcacccatctggtttggagctagagttgcttcctggtgagagaggaagcaactctccttctggttgtctgcctcccctcagatttcctgataggctgatggcatgtggctgtgactgtgactgtaatcattgctgaacaacatctctttgaatcaaaggttgattttcccagagggtgctgggtcaggcatttctattaggagttggaaagcaaaaatgggtccatagacactctatggaggtgtccctttctgctctttgctgtgtcctttcagaatttttaccaggaacataatgtggatgtgacttatgaacttaaatataaaataaatagattcttattatattttcctgaaa

SEQ ID NO: 1788 - DNA, 3610 bp, Homo sapiens
  source 1..3610: mol_type = genomic DNA
gctctgtccgcggtcgcgccagctgttccccgggcagggtcgcctctaggtgctcacctccgccacttcgccatggcgggtcctggcccgggcgcggtgctggagtccccccggcagctgctgggccgcgtgcgcttcttggcagaggcagcgcggagcctccgcgccgggcggccgctgccagcagcgctggctttcgtgccgcgagaggtgctctacaagctttacaaggacccagcgggaccgtcgcgcgtgcttctgccggtgtgggaggcagagggcctggggctgcgtgtgggcgccgcaggcccagcccccggtaccggctccgggcccctccgcgccgcccgcgacagcattgagctccggcgcggcgcctgcgtgcgcaccacgggcgaggagctgtgcaatggccacgggctctgggtgaagctgacaaaggagcagctggcagagcacctgggcgactgcgggctgcaggaaggctggctgctggtgtgccgcccggcggagggcggagcccgcctggtacccatcgacactcccaaccacctccagcggcagcagcagctctttggcgtggattatcggccggtgctcaggtgggaacaggtggtggacctgacatactcacatcgcctgggatcgagacctcagccggcagaggcatacgcagaagctgtacaaaggctactctatgtacccccgacatggacctacgagtgcgacgaggacctgatccacttcttgtatgaccacctgggcaaggaggatgagaacctgggtagcgtgaagcagtatgtggagagcatagacgtttcctcctacacggaggagttcaacgtgtcctgcctgacagacagcaatgccgatacctactgggagagcgatgggtcccagtgccaacactgggtacggcttactatgaagaagggcaccattgtcaagaagctgctactcacagtggataccacagatgacaactttatgccaaagcgggtggtggtctatgggggtgaaggggacaacctgaagaagctgagtgacgtgagcattgacgagaccctcatcggggatgtctgtgtcctggaggacatgaccgtccacctcccgatcatcgagatccgcatcgtggagtgccgagatgatgggattgatgttcgtctccgaggggtcaagatcaagtcatctagacagcgggaactagggttgaatgcagacctgttccagccaactagtctggtgcgatatccacgcctagaaggcaccgaccctgaagtactgtaccgcagagctgtcctcctgcagagattcatcaagatcctcgatagtgtcctgcaccacctggtacctgcctgggaccacacactgggcaccttcagtgagattaagcaagtgaagcagttcctactgctgtcccgccagcggccaggcctggtggctcagtgcctgcgtgactctgagagcagcaagcccagcttcatgccacgcctatacatcaaccgccgtcttgccatggaacaccgtgcctgcccctctcgagaccctgcctgcaagaatgcagtcttcacccaggtatatgaaggcctcaagccctctgacaaatatgaaaagcccctggactacaggtggcccatgcgctatgaccagtggtgggagtgtaaatttattgcagaaggcatcattgaccaagggggtggtttccgggacagcctggcagatatgtcagaagagctgtgccctagctcagcggatacccccgtgcccctgcccttctttgtacgcacagccaaccagggcaatggcactggtgaggctcgggacatgtatgtacccaacccctcctgccgagactttgccaagtatgaatggatcggacagctgatgggggctgcccttcggggtaaggagttcctggtcctggccctgcctggttttgtgtggaagcagctttctggtgaggaggtgagctggagcaaggacttcccagctgtggactctgtgctggtgaagctcctggaagtgatggaaggaatggacaaggagacgtttgagttcaagtttgggaaggaactaacattcaccactgtactgagtgaccaacaggtggtggagctgatccctgggggtgcaggcatcgtcgtgggatatggggaccgttctcgtttcatccaactggtccagaaggcacggctagaggagagcaaggagcaggtggcagctatgcaggcaggtctgctgaaggtggtaccacaggctgtgctggacttgctgacctggcaagagttggagaagaaagtgtgtggggatccagaggtcactgtggatgctctgcgcaagctcacccggtttgaggacttcgagccatctgactcgcgggtgcagtatttctgggaggcactgaacaacttcaccaacgaggaccggagccgcttcctgcgctttgtcacgggccgcagtcgcctgccagcacggatctacatctacccagacaagctgggctacgagaccacagacgcgctgcccgagtcttccacttgctccagcaccctcttcctgccacactatgccagtgccaaggtatgcgaggagaagctccgctatgcggcctacaactgcgtggccatcgacactgacatgagcccttgggaggagtgaggcgtgccgccggctgtgggaccagcaagactgcacgtgtccctcttggccttgcccagggcgaagacaccttccctgccctggtttggctgacgtgctcagcaaaaccccatgtgccctgctcctgtgtgcagttggggtaggggcagctggcatggtcaggtaacactagtggcccagccccgcagacccacaagccctacccgtgctggggcttgcttcccgaggtatttcacctcttaagagggaatcttccacaagcccagcacaagctgccaggcctgagctacttgaagggggccatctaggtccccaacccatggactttgcctccattttcagctccgccttttttctcctattttctctctggctttcttcagccatgactcacaactaaaaacataaaacactggaggttagtggaggcccctccccaagcagggagcctgggatgggcagggagtgatagccaaactccttggtcacctgctccaagaaggaagcagtagctgagcacctgccctcacattctgctcttttcccctctccctccataccagagatgtggtgagctctgttcttctaccaacccagtctcaacacacaaagtgccaccaccttccctgactcagaacccacatccactcaatgtgaactctactaccacgacctccccatattcctcacttctccatcacctccagcctgactccctgtctgccctttcacccccaagattttgcacaggttaaggccagttatggcctttttgaaatctgtaatagctcccctttccccaactctaaagcctagaccttaaacctgttcctagagctatgcacacccctgccccagtttaccgttcctccctcagggcctccgtgacactccatgaaaagaagttcttgcataccggaaagttgaataaatggatgaattcattccttca

SEQ ID NO: 1789 - DNA, 2315 bp, Homo sapiens
  source 1..2315: mol_type = genomic DNA
ggagttgcagtttgagagcagttccgggcagggaggcgcctttgctgccctcacagacttggcccctagcagtgcagaactacaagtcccagggatcctagcgaccgtccgtccgtagtcaagttgccggtggaattggcccaggatgacagctggagaatggagtcagttttatccaagtatgaagatcagattactattttcactgactacctagaagaatatccagatacagatgagctggtatggatcttagggaagcagcatctccttaaaacagaaaaatctaagctgttgtctgatataagtgctcgtctatggtttacatacagaaggaaattttcaccaattggtggaacgggcccttcatcagatgctggttggggatgtatgctacgctgtggacagatgatgctggctcaagcccttatctgtagacacttgggaagggactggagctgggagaaacaaaaagaacaacccaaagaataccaacgcatcctacagtgcttcttagatagaaaagattgttgctactctatccatcaaatggcacaaatgggtgtaggagaagggaaatcaattggagaatggtttggaccaaatacagttgcacaggtgttaaaaaaacttgctttatttgacgaatggaattccttggctgtttatgtttcaatggataacacagtggtcattgaagatatcaaaaaaatgtgccgtgtccttcccttgagtgctgacacagctggtgacaggcctcccgattctttaactgcttcaaaccagagtaagggcacctctgcctactgctcagcctggaaacccctgctgctcattgtgccccttcgcctgggcataaaccaaatcaatcctgtctatgttgatgcattcaaagagtgttttaagatgccacagtctttaggggcattaggaggaaaaccaaataacgcgtattatttcataggattcttaggtgacgagctcatcttcttggaccctcatacaacccagacctttgttgacactgaagagaatggaacggttaatgaccagactttccattgcctgcagtccccacagcgaatgaacatcctaaacctggatccttcagttgcattgggatttttctgcaaagaagaaaaagactttgataactggtgtagccttgttcagaaggaaattctaaaggagaatttaaggatgtttgaattagttcagaaacatccatcacactggcctccctttgtacctccagccaagccagaagtgacaaccactggggcagaattcattgactctactgagcaactggaggagtttgatctggaggaagattttgagattctgagtgtgtagaatcctgggaactcaacttgaaggtctgtcttccatctggcaccataaaaacatgaacttattgcataaaacttttctagtcagcaagtgcctgatatgccaatagcatacaaactcaatagcaatcatgactgagccaatcactgtttctcagaaaaacaaaacaaaacaaaacaaatgacagtaacccttccccggaaagaaatagaacaatcatggagcctaggagcagagagatgaggaggagttcattgcttcccagcttgtgttatatggctacagcaagtcttcagctgctgcaatgaggaaatgggcatctggaagacaaacagcaactctcagcttgcttcaagaaccagcagataagagatggttaagctgttcttcaccctttcagatgtgacctcttttggactaagcagcaatctgttctcttgctcaaataataaagtgactgaatcagggaggaaaaggttcttgttaaattatttgattgtgtagttgaagtaattataatttatatcaaaacgtttgtcaaagaaacgatgtcaaatatacacttcttgatctcccttctgtttgcggggatcttactatttgatgggtcactgtccccattcttactgatacttttgtcagatatcaccctgtccttaaatcatgatcacttaaatcaggggtcagcaaactttttctgtaaagggccagacgggaaatattttgggctttgcaggccatgcggcctctgtcacatctactcaactctgctgttgacatgcaaaagcagcaatagacaatatgcgtgtaaatgagtgtggctgtaatccaagaaaactttatttacaaaagcaggtggagggctgggtttggcctgcaggctgtagcttgccaatcagtgacttaaattgttgatttttgtttgataaattaaaaataaattgtgtttgaagtatacccta

SEQ ID NO: 1790 - DNA, 2650 bp, Homo sapiens
  source 1..2650: mol_type = genomic DNA
atggacttacaccgggcagccttcaagatggagaactcatcctaccttcccaaccctctggcatccccagcactgatggtcctggcatccacggctgaggccagccgtgatgcttccatcccttgtcagcagccacgaccctttggtgtacctgtctcagttgacaaggacgtgcatattcctttcaccaacggttcctatacctttgcctctatgtaccatcggcaaggtggggtgccaggcacttttgccaatcgtgatttccccccttctctactacacctccaccctcaatttgctcccccaaatctagattgcaccccaatcagtatgctgaatcatagtggtgtgggggctttccggccctttgcctccaccgaggaccgggagagctatcagtcagcctttacgccggccaagcgacttaagaactgccatgacacagagtctccccacttgcgcttctcagatgcagatggcaaggaatatgactttgggacacagctgccatctagctcccccggttcactaaaggttgatgacactgggaagaagatttttgctgtctctggcctcatttctgatcgggaagcctcatctagcccagaggatcggaatgacagatgtaagaagaaagcagcggcattgttcgacagccaggccccaatttgccccatctgccaggtcctgctgaggcccagtgagctgcaggagcatatggagcaggaactggagcagctagcccaactgccctcgagcaagaattcccttctgaaggatgccatggctccaggcaccccaaagtccctcctgttgtctgcttccatcaagagggaaggagagtctccaacggcatcaccccactcatctgccaccgatgacctccaccattcagacagataccagacctttctgcgagtacgagccaaccggcagacccgactgaatgctcggattgggaaaatgaaacggaggaagcaagatgaagggcagagggaaggctcctgcatggctgaggatgatgctgtggacatcgagcatgagaacaacaaccgctttgaggagtatgagtggtgtggacagaagcggatacgggccaccactctcctggaaggtggcttccgaggctctggcttcatcatgtgcagcggcaaagagaacccggacagtgatgctgacttggatgtggatggggatgacactctggagtatgggaagccacaatacacagaggctgatgtcatcccctgcacaggcgaggagcctggtgaagccaaggagagagaggcacttcggggcgcagtcctaaatggcggccctcccagcacgcgcatcacacctgagttctctaaatgggccagtgatgagatgccatccaccagcaatggtgaaagcagcaagcaggaggccatgcagaagacctgcaagaacagcgacatcgagaaaatcaccgaagattcagctgtgaccacgtttgaggctctgaaggctcgggtcagagaacttgaacggcagctatctcgtggggaccgttacaaatgcctcatctgcatggactcgtactcgatgcccctaacgtccatccagtgttggcacgtgcactgcgaggagtgctggctgcggaccctgggtgccaagaagctctgccctcagtgcaacacgatcacagcgcccggagacctgcggaggatctacttgtgagctatctgccccaggcaggcctcgcctccagcagccccacctgcccccagcctctgtgacagtgaccgtctccctttgtacatacttgcacacaggttccccatgtacatacatgcacatactcaaacatgcgtacacacacacacatttacacacgcaggactctggagccagagtagaggctgtggcccaggcactacctgctggctcccacctatggtttgggggccatacctgttccagctctgttcccagggtggggcagggaggtgggggttgggggagtagtggggcacggctcctaagatccagcccccatactgacagacggacagacagacatgcaaacaccagactgaagcacatgtaatatagaccgtgtatgtttacaatgttgtgtataaatgggacaactcctcgccctctacctgtcccctccccctttggttgtatgattttcttcttttttaagaacccctggaagcagcgcctccttcagggttggctgggagctcggcccatccacctcttggggtacctgcctctctctctcctgtggtgtcccttccctctcccatgtgctcggtgttcagtggtgtatatttcttctcccagacatggggcacacgccccaagggacatgatcctctccttagtcttagctcatggggctctttataaggagttggggggtagaggcaggaaatgggaaccgagctgaagcagaggctgagttagggggctagaggacagtgctcctggccacccagcctctgctgagaaccattcctgggattagagctgcctttcccagggaaaaagtgtcgtctccccgaccctcccgtgggccctgtggtgtgatgctgtgtctgtatattctatacaaaggtacttgtcctttccctttgtaaactacatttgacatggattaaaccagtataaacagttg

SEQ ID NO: 1791 - DNA, 1878 bp, Homo sapiens
  source 1..1878: mol_type = genomic DNA
atgccgagagcccggagcggccggaggagcagaggggccggcgggagggaggaaacctttctgcgagtacgagccaaccggcagacccgactgaatgctcggattgggaaaatgaaacggaggaagcaagatgaagggcaggtatgtcccctgtgcaaccgccccctggcaggatcggagcaggagatgagtaggcatgtggagcattgcctttctaagagggaaggctcctgcatggctgaggatgatgctgtggacatcgagcatgagaacaacaaccgctttgaggagtatgagtggtgtggacagaagcggatacgggccaccactctcctggaaggtggcttccgaggctctggcttcatcatgtgcagcggcaaagagaacccggacagtgatgctgacttggatgtggatggggatgacactctggagtatgggaagccacaatacacagaggctgatgtcatcccctgcacaggcgaggagcctggtgaagccaaggagagagaggcacttcggggcgcagtcctaaatggcggccctcccagcacgcgcatcacacctgagttctctaaatgggccagtgatgcagagatgccatccaccagcaatggtgaaagcagcaagcaggaggccatgcagaagacctgcaagaacagcgacatcgagaaaatcaccgaagattcagctgtgaccacgtttgaggctctgaaggctcgggtcagagaacttgaacggcagctatctcgtggggaccgttacaaatgcctcatctgcatggactcgtactcgatgcccctaacgtccatccagtgttggcacgtgcactgcgaggagtgctggctgcggaccctgggtgccaagaagctctgccctcagtgcaacacgatcacagcgcccggagacctgcggaggatctacttgtgagctatctgccccaggcaggcctcgcctccagcagccccacctgcccccagcctctgtgacagtgaccgtctccctttgtacatacttgcacacaggttccccatgtacatacatgcacatactcaaacatgcgtacacacacacacatttacacacgcaggactctggagccagagtagaggctgtggcccaggcactacctgctggctcccacctatggtttgggggccatacctgttccagctctgttcccagggtggggcagggaggtgggggttgggggagtagtggggcacggctcctaagatccagcccccatactgacagacggacagacagacatgcaaacaccagactgaagcacatgtaatatagaccgtgtatgtttacaatgttgtgtataaatgggacaactcctcgccctctacctgtcccctccccctttggttgtatgattttcttcttttttaagaacccctggaagcagcgcctccttcagggttggctgggagctcggcccatccacctcttggggtacctgcctctctctctcctgtggtgtcccttccctctcccatgtgctcggtgttcagtggtgtatatttcttctcccagacatggggcacacgccccaagggacatgatcctctccttagtcttagctcatggggctctttataaggagttggggggtagaggcaggaaatgggaaccgagctgaagcagaggctgagttagggggctagaggacagtgctcctggccacccagcctctgctgagaaccattcctgggattagagctgcctttcccagggaaaaagtgtcgtctccccgaccctcccgtgggccctgtggtgtgatgctgtgtctgtatattctatacaaaggtacttgtcctttccctttgtaaactacatttgacatggattaaaccagtataaacagtt

SEQ ID NO: 1792 - DNA, 2199 bp, Homo sapiens
  source 1..2199: mol_type = genomic DNA
cgcctttgctgccctcacagacttggcccctagcagtgcagaactacaagtcccagggatcctagcgaccgtccgtccgtagtcaagttgccggtggaattggcccaggatgacagctggagaatggagtcagttttatccaagtatgaagatcagattactattttcactgactacctagaagaatatccagatacagatgagctggtatggatcttagggaagcagcatctccttaaaacaggtggaacgggcccttcatcagatgctggttggggatgtatgctacgctgtggacagatgatgctggctcaagcccttatctgtagacacttgggaagggactggagctgggagaaacaaaaagaacaacccaaagaataccaacgcatcctacagtgcttcttagatagaaaagattgttgctactctatccatcaaatggcacaaatgggtgtaggagaagggaaatcaattggagaatggtttggaccaaatacagttgcacaggtgttaaaaaaacttgctttatttgacgaatggaattccttggctgtttatgtttcaatggataacacagtggtcattgaagatatcaaaaaaatgtgccgtgtccttcccttgagtgctgacacagctggtgacaggcctcccgattctttaactgcttcaaaccagagtaagggcacctctgcctactgctcagcctggaaacccctgctgctcattgtgccccttcgcctgggcataaaccaaatcaatcctgtctatgttgatgcattcaaagagtgttttaagatgccacagtctttaggggcattaggaggaaaaccaaataacgcgtattatttcataggattcttaggtgacgagctcatcttcttggaccctcatacaacccagacctttgttgacactgaagagaatggaacggttaatgaccagactttccattgcctgcagtccccacagcgaatgaacatcctaaacctggatccttcagttgcattgggatttttctgcaaagaagaaaaagactttgataactggtgtagccttgttcagaaggaaattctaaaggagaatttaaggatgtttgaattagttcagaaacatccatcacactggcctccctttgtacctccagccaagccagaagtgacaaccactggggcagaattcattgactctactgagcaactggaggagtttgatctggaggaagattttgagattctgagtgtgtagaatcctgggaactcaacttgaaggtctgtcttccatctggcaccataaaaacatgaacttattgcataaaacttttctagtcagcaagtgcctgatatgccaatagcatacaaactcaatagcaatcatgactgagccaatcactgtttctcagaaaaacaaaacaaaacaaaacaaatgacagtaacccttccccggaaagaaatagaacaatcatggagcctaggagcagagagatgaggaggagttcattgcttcccagcttgtgttatatggctacagcaagtcttcagctgctgcaatgaggaaatgggcatctggaagacaaacagcaactctcagcttgcttcaagaaccagcagataagagatggttaagctgttcttcaccctttcagatgtgacctcttttggactaagcagcaatctgttctcttgctcaaataataaagtgactgaatcagggaggaaaaggttcttgttaaattatttgattgtgtagttgaagtaattataatttatatcaaaacgtttgtcaaagaaacgatgtcaaatatacacttcttgatctcccttctgtttgcggggatcttactatttgatgggtcactgtccccattcttactgatacttttgtcagatatcaccctgtccttaaatcatgatcacttaaatcaggggtcagcaaactttttctgtaaagggccagacgggaaatattttgggctttgcaggccatgcggcctctgtcacatctactcaactctgctgttgacatgcaaaagcagcaatagacaatatgcgtgtaaatgagtgtggctgtaatccaagaaaactttatttacaaaagcaggtggagggctgggtttggcctgcaggctgtagcttgccaatcagtgacttaaattgttgatttttgtttgataaattaaaaataaattgtgtttgaagt

SEQ ID NO: 1793 - DNA, 779 bp, Homo sapiens
  source 1..779: mol_type = genomic DNA
aagtagttgctgggacagcgaaatggaggggtgtgtgtctaacctaatggtctgcaacctggcctacagcgggaagctggaagagttgaaggagagtattctggccgataaatccctggctactagaactgaccaggacagcagaactgcattgcactgggcatgctcagctggacatacagaaattgttgaatttttgttgcaacttggagtgccagtgaatgataaagacgatgcagcttcgaaaaacaggcatgagatcgctgtcatgttactggaaggcggggctaatccagatgctaaggaccattatgaggctacagcaatgcaccgggcagcagccaagggtaacttgaagatgattcatatccttctgtactacaaagcatccacaaacatccaagacactgagggtaacactcctctacacttagcctgtgatgaggagagagtggaagaagcaaaactgctggtgtcccaaggagcaagtatttacattgagaataaagaagaaaagacacccctgcaagtggccaaaggtggcctgggtttaatactcaagagaatggtggaaggttaaacagcttggatttattcttactttgtatgttgtgttgttgtccccagtgtcctacaaactaatgtatttgtgcacaagacatcatctatgaatgatgaagttttctcaccttcaaagtcttataaacatgttgactcttgttcctgctgagttacttgttcgaagcttacagcttgttttccaggcatcgaataactgt

SEQ ID NO: 1794 - DNA, 878 bp, Homo sapiens
  source 1..878: mol_type = genomic DNA
aagtagttgctgggacagcgaaatggaggggtgtgtgtctaacctaatggtctgcaacctggcctacagcgggaagctggaagagttgaaggagagtattctggccgataaatccctggctactagaactgaccaggacagcagaactgcattgcactgggcatgctcagctggacatacagaaattgttgaatttttgttgcaacttggagtgccagtgaatgataaagacgatgcagcttcgaaaaacaggcatgagatcgctgtcatgttactggaaggcggggctaatccagatgctaaggaccattatgaggctacagcaatgcaccgggcagcagccaaggacacttagcctgtgatgaggagagagtggaagaagcaaaactgctggtgtcccaaggagcaagtatttacattgagaataaagaagaaaagacacccctgcaagtggccaaaggtggcctgggtttaatactcaagagaatggtggaaggttaaacagcttggatttattcttactttgtatgttgtgttgttgtccccagtgtcctacaaactaatgtatttgtgcacaagacatcatctatgaatgatgaagttttctcaccttcaaagtcttataaacatgttgactcttgttcctgctgagttacttgttcgaagcttacagcttgttttccaggcatcgaataactgttgagattgttctactgttgtcgtatattcttctatattgaattctggttaatttggagtaactaattctgtggctgttgtgagtcttcagcaccctcccatgtaccttatatccctctctgaaacagaacagctccaatagcaacaagctagttgttctgccagatgtttctatgtgg

SEQ ID NO: 1795 - DNA, 1201 bp, Homo sapiens
  source 1..1201: mol_type = genomic DNA
cttcacttcatctcttccccctcacccacagcagcactggctccttggtgtgtgtatggccgaagagggcctggacacagggtaccctgggtgaaagatggggctgaggctccaaggctcctgctgtacttttcttctttttgagcaggagctggagggtgcctcaggaatacaggagggacatgggaggagggctgttgggctgagggctccctgtctggctgccatctcttcttcctgctaccctgttcacaaactgggggtgcttaactccctctgtgaatcaacatgaagtcactgctggcaacctagagcctgcgagacatctggccctgatggagggggagggaaaggtgtctggaacccaaactttctgcattatgatccccacccccaacctctctcacgtacacctgcgtgttcatgtacacatacatgtacatagcatcccttgagctgtcctcacctgacctactgaactctgaggtggtccgggtcccccagagatggctgggtagctggttttggcagcctctacctgtgaggtgtgaagttgggggctggggtggcaggtgagtgggggggatggtccttggagctggctggggctgggcttaccagctccacctcctgcaggctctgaagcggaagccagatttgttcctgtgtgaacgattggatgtcaaagctgtgttccagtgtgctgtgctggccctcaagttccctgaggcacctactgtcaaggcctcctgtggcttctttacagagctgctgcctcggtgtggggaagtagagtctgtgggaaaggtggtacaggaagacggtcgtatgctgctcatagcagtgctggaggccattgggggccaggcctcccgcagcctcatggactgctttgccgatatcctgttcgccctgaacaagcactgcttcagcctcctgagcatgtggatcaaggaggccctgcagccacctggtttcccctctgcccgcctcagccctgaacagaaggataccttcagccagcagatccttcgcgagcgagtgaacaagaggcgggtgaaggagatggtgaaggagttcacactgctgtgccggggtctccatggcacagattacacagctgactactgaggggtgcccccatcccatccaccccttctcttcatccttccctattcccaaagagtaaacctggaccctc

SEQ ID NO: 1796 - DNA, 3894 bp, Homo sapiens
  source 1..3894: mol_type = genomic DNA
cggccggcctggcttgtcttgtcagtcactggggcggaggcagcggctgtagcggggctgtagccgggcgttgagcacagcgcgggccaggccgaacggaagggacctgccacagcccctcaactccacggactcttcgccctagactagcggagctgcatctccgcgcttcgttggacgcctccgtaaccacgaagggctctctctctcccgtgaccctccagccccatgacctgttcatagcagccgagagctcacccaggcgggggtgttgtgggtacaggccatcgaccctgtgacccctcaagagccagggactcggtttcccccgcaggcctccctcccctgtgactccctccacacagattctggggacagagctgttacctgccactaggatccccgcctgagagctcctcactgacggctccctcctcggagtccccttcattgggtctcctaagagcaccaattttggtctctggcaagcctcccacccccaaacgaggtggggaggcctcggcagccatgcccgccctgggccccccctcaccccaccactccctgggcacccaagccggggtctagcagggggccagcagccaaggggctggggcaggagacagatcagggcccacctccctgccagggagggagcaaagatggagcggcgggaggagcagccgggggctgcaggggctggagcagcaccagccttggacttcactgtggagaacgtggagaaggcgctgcaccagctctactatgatcccaacattgagaataagaacctggctcagaagtggctgatgcaggcccaggtctccccacaggcctggcacttcagctggcagctactgcagcccgacaaggtaccagagatccagtactttggggccagtgctcttcacatcaagatctctcgctactggagtgacatccccactgaccagtatgaaagcctaaaggcacagctcttcacccagatcacccgctttgccagtggctccaagattgtactgactcggctgtgcgtggcactggcctcactggctctcagcatgatgcctgacgcttggccatgtgctgtggcagatatggtacgactcttccaggctgaggactcaccagtggatgggcagggccgctgcctagccctgttagagctgctgacagtgctgcctgaggagttccagaccagtcgcctaccccagtaccgcaaaggcctggtgcggaccagcctggcggtggaatgtggggctgtcttcccgctgctggagcagctgctacagcagcccagctcacccagctgtgtgcgtcagaaggtgctcaagtgtttctccagctgggtgcagctggaggtgccgctgcaggactgtgaggcgctcattcaggctgcctttgctgctctgcaggactcggagctcttcgacagcagtgtggaggccattgtgaatgccatctcacagcctgatgcccagaggtacgtgaacacactcctgaaactcatcccgctggtgctgggtctgcaggaacaactgcggcaggcagtgcagaatggggacatggagacctcccatggcatctgtcgcatcgctgtggccctgggcgagaaccactcccgggccttgctggaccaagtagagcactggcagagtttcctggcactcgtcaacatgattatgttctgcacaggcatccctggccactatcctgtcaatgagaccaccagctccctaaccctcaccttctggtacacactgcaggatgatattctatcctttgaggcagagaagcaggctgtataccagcaggtgtaccggccagtctacttccagctggtggatgtgcttctgcacaaggcccagttcccttctgatgaggaatatggattctggtcctcagacgagaaggagcagttccgaatttacagggtggacatctcagacacgctcatgtatgtctatgagatgttgggggccgagctgctcagcaacctctatgacaagctgggtcgtttgctcaccagctcagaggagccctactcctggcagcacacagaggccctcctctacggcttccaatccatcgcagagaccattgacgtcaactattctgatgtggtgcctgggctcattggcctcatcccacggatcagcatcagcaacgtgcagctggcagacactgtcatgttcaccattggagctctgtctgaatggctggctgaccaccccgtcatgatcaacagtgttctgcccttggtactgcatgccctaggcaatcctgagctgtctgtctcttctgtgtccaccctcaagaagatctgccgagagtgcaagtatgacctgcctccctatgctgccaacattgtggctgtgtcccaggatgtgctgatgaaacagatccacaagacaagccagtgcatgtggctgatgcaggcgctgggcttcctgctgtcagctcttcaagtggaggagatccttaagaacctgcactcgcttatctcaccctatatccagcaactggagaagctggcagaggagatacccaatccctccaacaagctggccattgttcacatcttggggcttctctccaacctcttcaccacactggacatcagtcatcatgaggatgatcatgaaggccctgagcttcggaagctgccagtgccacagggacccaaccccgtggtggtggtgctgcagcaggtcttccagcttatccagaaggtgctgagcaaatggttgaatgatgcccaggttgtggaggcggtgtgcgctatctttgagaagtctgttaagacgctgctggatgactttgcccccatggtgccacagctgtgtgagatgctgggtcggatgtacagcaccatcccccaggcctctgctcttgacctcactcgacagctggtccacatctttgctcatgagcctgcccactttcccccaattgaggccctcttcctgctcgtcacctccgtcacactcactctcttccagcaagggcccagggatcatcctgatattgttgattcatttatgcaactcctggcacaggctctgaagcggaagccagatttgttcctgtgtgaacgattggatgtcaaagctgtgttccagtgtgctgtgctggccctcaagttccctgaggcacctactgtcaaggcctcctgtggcttctttacagagctgctgcctcggtgtggggaagtagagtctgtgggaaaggtggtacaggaagacggtcgtatgctgctcatagcagtgctggaggccattgggggccaggcctcccgcagcctcatggactgctttgccgatatcctgttcgccctgaacaagcactgcttcagcctcctgagcatgtggatcaaggaggccctgcagccacctggtttcccctctgcccgcctcagccctgaacagaaggataccttcagccagcagatccttcgcgagcgagtgaacaagaggcgggtgaaggagatggtgaaggagttcacactgctgtgccggggtctccatggcacagattacacagctgactactgaggggtgcccccatcccatccaccccttctcttcatccttccctattcccaaagagtaaacctggaccctcactgctgtctctgcctcctttctgctgtcaccaccacctaactgaaagcctgggtccagaaggcctgggggaaggatgggaggatgcttggacccaggccttgggagggaatggtgggaacatcctctagctcccaggttggaagagatactactgtagccaagccacctaggctggagcccttcagaatactgtcattgtccttggggcggggtggttgcagtagtgtcatcaacccccccatccccattaaattaatcccaacatgca

SEQ ID NO: 1797 - DNA, 2907 bp, Homo sapiens
  source 1..2907: mol_type = genomic DNA
atgaggttgctgaggcatacagagagtgagcagtggtttcatcgcttccctctgtgtccttctctcactttctgggccccagtggccatgtggccacagacacactgtgtaggtggtcggtcatcaggcttaacgaaatggacatattcattttcagcatcactccaagatgggtcgttcccctatgactctgtcccttggcagcagaacaccaaccagcctcccggctccctttccgtggtcaccacggtttggggagtaaccaacacatcccagagccaggctgacgttctcatcccccacgccacctgccgcccaggcccgctccttatcaccgcttgggaaccctatggccaatgccaacaaccccatgaatccaggcggcaaccccatggcgtcgggcatgaccaccagcaacccaggcctcaactccccacagtttgcggggcagcagcagcagttctcagccaaggctggccccgctcagccctacatccagcagagcatgtatggccggcccaactaccccggcagcgggggctttggggccagcccgcggcagccgctgcagcagcggcagtggcagcagcagcagccacagctacagccacagccacggccactgtggcagccctgcaggagacacagaacaaggatataaaccagtatggaccggccccagtgctgctccctgaccttctgaaggatgggttaggggatgaggagaggggagcccccataggaatgcagaacagcatgaaccccgcgagcatggcggctggcatgacgccctcggggatgagcggccctcccatgggcatgaaccagccccggccgcccggcatcagcccctttggcacacacgggcagcggatgccccagcagacctacccgggcccccggccccagtcccttcctattcagaacataaagaggccataccctggagagcccaactatggaaaccagcaatatggaccaaacagccagttccccacccagccaggccagtacccagcccccaaccccccgaggccactcacctcccccaactacccaggacagaggatgcccagccagccgagctccgggcagtacccgccccccacggtcaacatggggcagtattacaagccagaacagtttaatggacaaaataacacgttctcgggaagcagctacagtaactacagccaagggaatgtcaacaggcctcccaggccggttcctgtggcaaattacccccactcacctgttccagggaaccccacaccccccatgacccctgggagcagcatccctccatacctgtcccccagccaagacgtcaaaccacccttcccgcctgacatcaagccaaatatgagcgctctgccaccacccccagaccacaatgacgagctgcggctcacattccctgtgcgggatggcgtggtgctggagcccttccgcctggagcacaacctggcggtcagcaaccatgtgttccacctgcggcccacggtccaccagacgctgatgtggtctgacctggagctgcagttcaagtgctaccaccacgaggaccggcagatgaacaccaactggcccgcctcggtgcaggtcagcgtgaacgccacgcccctcaccattgagcgcggcgacaacaagacctcccacaagcccctgcacctgaagcacgtgtgccagccgggccgcaacaccatccagatcaccgtcacggcctgctgctgctcccacctcttcgtgctgcagctggtacaccggccctccgtccgctctgtgctgcaaggactcctcaagaagcgcctcctgcccgcagagcactgtatcacgaaaaagcggaatttcagcagcgtggctgcctcctcgggcaacacgaccctcaacggggaggatggggtggagcagacggccatcaaggtgtctctgaagtgccccatcacattccggcgcatccagctgcctgctcgaggacacgattgcaagcatgtgcagtgctttgatctggagtcatacctgcagctgaattgcgagagagggacctggaggtgtcctgtgtgcaaaaccgctctgctggagggcctggaggtggatcagtacatgtggggaatcctgaatgccatccactccgagtttgaagaggtcaccatcgatcccacgtgcagctggcggccggtgcccatcaagtcggacttacacatcaaggacgaccctgatggcatcccctccaagcggttcaagaccatgagtcccagccagatgatcatgcccaatgtcatggagatgatcgcagccctgggccccggcccgtccccctatcccctcccgcctcccccagggggcaccaactccaacgactacagcagccaaaacaactaccaaggccatggcaactttgacttcccccacgggaaccctggagggacatccatgaatgacttcatgcacgggcccccccagctctcccaccccccggacatgcccaacaacatggccgccctcgagaaacccctcagccaccccatgcaggaaactatgccacacgctggcagctctgaccagccccacccctccatacaacaaggtttgcacgtaccacaccccagcagccagtcagggcctccattacatcacagtggggctcctcctcctcctccttcccagcctccccggcagccgccacaggccgctcccagcagccatccacacagcgacctgacctttaacccctcctcagccttagagggtcaggccggagcgcagggagcgtccgacatgccggagccttcgctggatctccttcccgaactcacaaatcctgacgagctcctgtcttatctggacccccccgacctgccgagcaatagtaacgatgacctcctgtctctatttgagaacaactga

SEQ ID NO: 1798 - DNA, 607 bp, Homo sapiens
  source 1..607: mol_type = genomic DNA
ccaagatggcgatggagatgaggcttccagtggctcgcaagcctcttagcgagagactgggccgcgacactaagaaacatctagtggtgccgggggatacaatcactacggacacaggattcatgcggggccatggaacgtatatgggagaagagaagctcattgcatctgttgctggctctgtggagagagtaaacaagttgatctgtgtgaaagctttgaaaaccagatacattggtgaagtaggagacatcgtagtgggacgaatcacagaggttcaacagaagaggtggaaggtggagaccaactccaggctggattcggtcttgctgctctcgtccatgaaccttcctggaggagagctgaggagaagatctgcagaagatgagcttgcaatgagaggtttcttacaggaaggggaccttatcagtgctgaggtccaggcagtgttctctgacggagctgtctctttgcacacgaggagcctgaaatatggaaaaacccactttcatgatttgccatgtggtgcctcagtgattctcggtaacaacggcttcatctggatttacccaacacctgagcacaaagaagaggaagcagggggctt

SEQ ID NO: 1799 - DNA, 1885 bp, Homo sapiens
  source 1..1885: mol_type = genomic DNA
gccaagatggcgatggagatgaggcttccagtggctcgcaagcctcttagcgagagactgggccgcgacactaagaaacatctagtggtgccgggggatacaatcactacggacacaggattcatgcggggccatggaacgtatatgggagaagagaagctcattgcatctgttgctggctctgtggagagagtaaacaagttgatctgtgtgaaagctttgaaaaccagatacattggtgaagtaggagacatcgtagtgggacgaatcacagagaggagaagatctgcagaagatgagcttgcaatgagaggtttcttacaggaaggggaccttatcagtgctgaggtccaggcagtgttctctgacggagctgtctctttgcacacgaggagcctgaaatatggaaaactaggtcagggggttttggtccaggtttccccctccctggtgaaacggcagaagacccactttcatgatttgccatgtggtgcctcagtgattctcggtaacaacggcttcatctggatttacccaacacctgagcacaaagaagaggaagcagggggcttcattgcaaacctggagcctgtctctcttgctgatcgagaggtgatatcccggcttcggaactgcatcatctcgctggtaactcagaggatgatgctgtatgataccagcatcctgtactgctatgaagcatcccttccacatcagatcaaagacatcttaaagccagaaataatggaggagattgtgatggaaacacgccagaggcttttggaacaggagggataaggaggtgctccagaagcacgggactgtggaccttgcaggagtgaagactgtgatgtgtggtccccatatgtggctcagcaaagactcgagagatcatccctttgtctgcattgacggccctgtgacggcctccagcccacaggcctgctttctcctgtcctaacaccaagcctgggtggcagatgaacagtgcttccttgggttgccagctgagtcccggtattagggaatagtttcagctctttcaaagtgcacagtgttacagtcgaatgggctcccatcctggaataatatggagaatcctttgtcttccactcactgtcattcacaaggcacagtgccccatgaaattgccccaatagaaaacatggcatccctgacctccaaatggtctgttttggcctccattcctatatcctttaaatgactgagaatgcagctggtaaagttggaagaataaagttaaccaagcaggccaggcacggtggctcacgcctataatcccagcacttagggaggccaaggcgggcagatcacctgaggtcaatagttcgagaccagcctggccaacaaggtgaaaccccatctctactaaaaatacaaaaaattagccaggtgtggtggtgtgcacctgtagtcccagctatttgggaggctgaggtgggagaatcacttgaacctgggaggcggaggttgcagtgagctgaaatcgcgtaccacactccagcctgggtgacagagcgagactgtgtttcaaagaaaaaaaaaaacaagcagccttttgcttggttggaatctgattttctgttgcgtgttccttgtagccatagatgtgattatgtccacaccgggctgccttaatctgtcctgcttggagagtgacttgtaagatgctgaattattcatgataatacagtgaatgttctgggtccatgtactcagataaacatgaagaaaataagcaaagaaaaatggagactgggaaagcaaagctgttttcatcctataattgaagtagtgtggagcattaacttgtggatgattcagagttaaaagataaaaagacgccagagttctcgctgaagaa

SEQ ID NO: 1800 - DNA, 1957 bp, Homo sapiens
  source 1..1957: mol_type = genomic DNA
attggcgccaagatggcgatggagatgaggcttccagtggctcgcaagcctcttagcgagagactgggccgcgacactaagaaacatctagtggtgccgggggatacaatcactacggacacaggattcatgcggggccatggaacgtatatgggagaagagaagctcattgcatctgttgctggctctgtggagagagtaaacaagttgatctgtgtgaaagctttgaaaaccagatacattggtgaagtaggagacatcgtagtgggacgaatcacagaggttcaacagaagaggtggaaggtggagaccaactccaggctggattcggtcttgctgctctcgtccatgaaccttcctggaggagagctgaggagaagatctgcagaagatgagcttgcaatgagaggtttcttacaggaaggggaccttatcagtgctgaggtccaggcagtgttctctgacggagctgtctctttgcacacgaggagcctgaaatatggaaaagtttccccctccctggtgaaacggcagaagacccactttcatgatttgccatgtggtgcctcagtgattctcggtaacaacggcttcatctggatttacccaacacctgagcacaaagaagaggaagcagggggcttcattgcaaacctggagcctgtctctcttgctgatcgagaggtgatatcccggcttcggaactgcatcatctcgctggtaactcagaggatgatgctgtatgataccagcatcctgtactgctatgaagcatcccttccacatcagatcaaagacatcttaaagccagaaataatggaggagattgtgatggaaacacgccagaggcttttggaacaggagggataaggaggtgctccagaagcacgggactgtggaccttgcaggagtgaagactgtgatgtgtggtccccatatgtggctcagcaaagactcgagagatcatccctttgtctgcattgacggccctgtgacggcctccagcccacaggcctgctttctcctgtcctaacaccaagcctgggtggcagatgaacagtgcttccttgggttgccagctgagtcccggtattagggaatagtttcagctctttcaaagtgcacagtgttacagtcgaatgggctcccatcctggaataatatggagaatcctttgtcttccactcactgtcattcacaaggcacagtgccccatgaaattgccccaatagaaaacatggcatccctgacctccaaatggtctgttttggcctccattcctatatcctttaaatgactgagaatgcagctggtaaagttggaagaataaagttaaccaagcaggccaggcacggtggctcacgcctataatcccagcacttagggaggccaaggcgggcagatcacctgaggtcaatagttcgagaccagcctggccaacaaggtgaaaccccatctctactaaaaatacaaaaaattagccaggtgtggtggtgtgcacctgtagtcccagctatttgggaggctgaggtgggagaatcacttgaacctgggaggcggaggttgcagtgagctgaaatcgcgtaccacactccagcctgggtgacagagcgagactgtgtttcaaagaaaaaaaaaaacaagcagccttttgcttggttggaatctgattttctgttgcgtgttccttgtagccatagatgtgattatgtccacaccgggctgccttaatctgtcctgcttggagagtgacttgtaagatgctgaattattcatgataatacagtgaatgttctgggtccatgtactcagataaacatgaagaaaataagcaaagaaaaatggagactgggaaagcaaagctgttttcatcctataattgaagtagtgtggagcattaacttgtggatgattcagagttaaaagataaaaagacgccagagttctcgctgaagaa

SEQ ID NO: 1801 - DNA, 2040 bp, Homo sapiens
  source 1..2040: mol_type = genomic DNA
ggcctggagttgtggagtcggatatcgcagctcccgactgagctgcgcctgcgcaactcattggcgccaagatggcgatggagatgaggcttccagtggctcgcaagcctcttagcgagagactgggccgcgacactaagaaacatctagtggtgccgggggatacaatcactacggacacaggattcatgcggggccatggaacgtatatgggagaagagaagctcattgcatctgttgctggctctgtggagagagtaaacaagttgatctgtgtgaaagctttgaaaaccagatacattggtgaagtaggagacatcgtagtgggacgaatcacagaggttcaacagaagaggtggaaggtggagaccaactccaggctggattcggtcttgctgctctcgtccatgaaccttcctggaggagagctgaggagaagatctgcagaagatgagcttgcaatgagaggtttcttacaggaaggggaccttatcagtgctgaggtccaggcagtgttctctgacggagctgtctctttgcacacgaggagcctgaaatatggaaaactaggtcagggggttttggtccaggtttccccctccctggtgaaacggcagaagacccactttcatgatttgccatgtggtgcctcagtgattctcggtaacaacggcttcatctggatttacccaacacctgagcacaaagaagaggaagcagggggcttcattgcaaacctggagcctgtctctcttgctgatcgagaggtgatatcccggcttcggaactgcatcatctcgctggtaactcagaggatgatgctgtatgataccagcatcctgtactgctatgaagcatcccttccacatcagatcaaagacatcttaaagccagaaataatggaggagattgtgatggaaacacgccagaggcttttggaacaggagggataaggaggtgctccagaagcacgggactgtggaccttgcaggagtgaagactgtgatgtgtggtccccatatgtggctcagcaaagactcgagagatcatccctttgtctgcattgacggccctgtgacggcctccagcccacaggcctgctttctcctgtcctaacaccaagcctgggtggcagatgaacagtgcttccttgggttgccagctgagtcccggtattagggaatagtttcagctctttcaaagtgcacagtgttacagtcgaatgggctcccatcctggaataatatggagaatcctttgtcttccactcactgtcattcacaaggcacagtgccccatgaaattgccccaatagaaaacatggcatccctgacctccaaatggtctgttttggcctccattcctatatcctttaaatgactgagaatgcagctggtaaagttggaagaataaagttaaccaagcaggccaggcacggtggctcacgcctataatcccagcacttagggaggccaaggcgggcagatcacctgaggtcaatagttcgagaccagcctggccaacaaggtgaaaccccatctctactaaaaatacaaaaaattagccaggtgtggtggtgtgcacctgtagtcccagctatttgggaggctgaggtgggagaatcacttgaacctgggaggcggaggttgcagtgagctgaaatcgcgtaccacactccagcctgggtgacagagcgagactgtgtttcaaagaaaaaaaaaaacaagcagccttttgcttggttggaatctgattttctgttgcgtgttccttgtagccatagatgtgattatgtccacaccgggctgccttaatctgtcctgcttggagagtgacttgtaagatgctgaattattcatgataatacagtgaatgttctgggtccatgtactcagataaacatgaagaaaataagcaaagaaaaatggagactgggaaagcaaagctgttttcatcctataattgaagtagtgtggagcattaacttgtggatgattcagagttaaaagataaaaagacgccagagttctcgctgaagaa

SEQ ID NO: 1802 - DNA, 4474 bp, Homo sapiens
  source 1..4474: mol_type = genomic DNA
ggagtttcggccttcgcctgctggaaaagcagtaggatcggccagtggcgacagcaggagctgagcctaagccctggcggggctttgggctgtagattcctgtctgactaaagggacctcaaaaaggagggaaaatggcttctgagtctgaaactctgaatcccagtgctaggataatgaccttttatccaactatggaagagttccgaaacttcagtagatacattgcctacattgaatcccaaggagctcatcgggcagggctagccaaggttgttcctccaaaagagtggaagccacgagcatcctatgatgacattgatgatttggtcattcctgcccccattcaacagctggtgacggggcagtctggcctctttactcagtacaacatacagaagaaagccatgactgttcgagagttccgcaagatagccaatagcgataagtactgtaccccacgctatagtgagtttgaagagctcgagcggaaatactggaaaaatcttacattcaatcctccaatctatggtgcagatgtgaatggtaccctctatgaaaagcatgttgatgagtggaatattggccggctgagaacaatcctggacttggtggaaaaggagagtgggatcaccattgagggtgtgaacaccccatacctgtactttggcatgtggaagacatcctttgcttggcacactgaagacatggacctctacagcatcaactacctgcactttggagaaccaaagtcctggtactctgttccacctgagcatggaaagcggttggaacgcctcgccaaaggctttttcccaggaagtgctcaaagctgtgaggcatttctccgccacaagatgaccctgatttccccgttaatgctgaagaaatatggaattccctttgacaaggtgactcaagaggctggagagtttatgatcactttcccttatggttaccatgccggctttaaccatggttttaactgtgcggagtctaccaattttgctacccgtcggtggattgagtacggcaagcaagctgtgctgtgctcctgtagaaaggacatggtgaagatctccatggatgtgtttgtgagaaagttccagccagaaaggtacaaactttggaaagctgggaaggacaacacagttattgaccatactctgcccacgccagaagcagctgagtttcttaaggagagtgaactgcctccaagagctggcaacgaggaggagtgcccagaggaggacatggaaggggtggaggatggagaggaaggagacctgaagacaagcctggccaagcaccgaatagggacaaagaggcaccgagtttgtcttgaaataccacaggaggtgagtcagagtgagctcttccccaaggaggatctgagttctgagcagtatgagatgacggagtgcccggcagccctcgcccctgtgaggcccacccatagctctgtgcggcaagttgaggatggtcttaccttcccagattattctgactccactgaagtcaaatttgaagagcttaaaaatgtcaaactagaagaggaggatgaggaggaagaacaagcagcagctgccttggatctttctgtgaatcctgcgtctgtagggggacgccttgtcttctcaggctccaaaaagaaatcatcttctagcctgggctctggctcttcacgggattctatctcttctgattcagaaactagtgagcctctctcctgccgagcccaagggcaaacgggagttctcactgtgcacagttatgccaaaggggatggcagggtcactgtgggagagccatgcacgaggaagaaaggaagcgccgctagaagtttcagtgagcgggagctggcagaggttgcagatgaatacatgttttccctagaagagaataagaagtccaagggacgccgtcagcctttaagcaagctcccccgccatcacccacttgtgctgcaggagtgtgtcagtgatgatgagacatctgaacagctgacccctgaggaagaggctgaggagacagaggcctgggccaagcctctgagccaactgtggcagaaccgacctccaaactttgaggctgagaaggaattcaatgagaccatggcccaacaggcccctcactgcgctgtctgtatgatcttccagacttatcatcaggttgaatttggaggctttaatcagaactgtggaaatgcttcagatttagccccccagaagcagaggaccaagccattgattccagaaatgtgcttcacttcgactggctgcagcacggacatcaacctttctactccttatcttgaggaggatggcaccagcatactcgtttcctgcaagaagtgcagcgtccgggtccatgccagttgctatggggtcccccctgcaaaggcttctgaagactggatgtgttctcggtgttcagccaatgccctagaggaggactgctgtttatgctcattacgaggaggggccctgcagagagcaaatgatgacaggtgggtccacgtttcatgtgctgtggcaattctggaagcaaggtttgtcaacattgcagaaagaagtccggtggatgtgagcaaaatccccctgccccgcttcaaactgaaatgtatcttctgtaagaagcggaggaaaagaactgctggctgctgtgtgcagtgttctcacggccgctgcccaactgccttccatgtgagctgcgcccaggctgccggtgtgatgatgcagcctgacgactggccttttgtggtcttcattacctgctttcggcacaagattcctaatttggagcgtgccaagggggccttgcaaagcatcactgcaggccagaaagtcattagcaagcataagaacgggcgcttctaccagtgtgaagtggtcaggctcaccaccgagaccttctatgaagtcaactttgatgatggctccttcagcgacaatctttatcctgaggacatagtgagccaggactgtctccagtttggtcctcctgctgaaggggaagtggtccaagtgagatggacagacggccaagtctatggagccaagtttgtggcctcccaccctatccaaatgtaccaggtggagtttgaggatggctcacaacttgtggttaagagagatgatgtatacacactggatgaagagcttcccaagagagtcaaatctagactgtcagtagcctcagacatgcgcttcaatgagattttcacagagaaagaggttaagcaagaaaagaaacggcaacgagttatcaactcaagataccgggaagattatattgagcctgcactataccgggccatcatggagtaggtgcttccagggtccaagggattctcagccatccaggcaagagcactctgggttccacagcacagcagacatggaacgctgaagtctctgaaagtgaagttgtaaaaagaaaaggaatgaaataaccgacccatcatcttctcacccaccctcattgcattccgctgtagtgaaaggacgagccatttctgggcacgtggcagcagtcgctgatctcccagctgaggggctgagcactggaatgctgtggctgcactggccccagtccatagaggggtcaactatgctggctggactggctgccttgttcctggcctaggacttagcttcataactatcacctgcaccgactaggctgaggtgctggtacttgccccaacccctacttttgtatttatatgtgtgtgtgtgtgtgcgtgcgtgcgtgcgtgcgtgtatgtttggtctggaccagcttctgccagcccctggcctttactttcttccttgcctatgcagggcaaacaaaatgtgaaattctgccctcagctgagctgagtaagggctcctgggggttggctggagatgggtgtggcatctgtccaggcctggaaccgtctcaagacagtgctggcaaagctgcagtattgagatgctaaggagctgatgccacctctttgtcttcccctaaaggagaacatggggataacatgggtgtgtgcccacaacactctaggtgcagagcccctgtggcaaagtattacagggtgtgggtggggattaccctgaatcggggattttaatgatggaagcaggcagagcctggtgggtgattctgtcaacagaaaattgcaatcatgcaggggctgggagggttaggatgaaaaaactggggccattggaggcccactgtaggtgggagggagctgattttggggtggggggtgggactagagggcaatactgaaggggttaaacaggtttttgctcctcaagaatttgtttgcctgggcccaggattggagggcttcacaccaataccctgtgtatacaagaatcagatttataatacttccccttttttgttacgtatgaacactataaaccaaattattttgaaaactggtgcatcaccttgtccttagcaataaaatgtgttgagcaga

SEQ ID NO: 1803 - DNA, 4305 bp, Homo sapiens
  source 1..4305: mol_type = genomic DNA
ctcagagggggcgcgcttgactgacaggcggcggcggcgcagttgcgagtgcaggctccttgccagaggcctccactcactccagacccctatagcccgtcgctgtcagctgtcaacaaaggatgcgaatgctggccgcttcctgtgggcttcgtgtcacccagaggtgagcccaggccaggatgggggactccagggacctttgccctcaccttgactccataggagaggtgaccaaagaggacttgctgctcaaatctaagggaacctgtcagtcgtgtggggtcaccggaccaaacctatgggcctgtctgcaggttgcctgcccctatgttggctgcggagaatcctttgctgaccacagcaccattcatgcacaggcaaaaaagcacaacttgaccgtgaacctgaccacgttccgactgtggtgttacgcctgtgagaaggaggtattcctggagcagcggctggcagcccctctgctgggctcctcttccaagttctctgaacaggactccccgccaccctcccaccctctgaaagctgttcctattgctgtggctgatgaaggagagtctgagtcagaggacgatgacctgaaacctcgaggcctcacgggcatgaagaacctcgggaactcctgctacatgaacgctgccctgcaggccctgtccaattgcccgccgctgactcagttcttcttggagtgtggcggcctggtgcgcacagataagaagccagccctgtgcaagagctaccagaagctggtctctgaggtctggcataagaaacggccaagctacgtggtccccaccagtctgtctcatgggatcaagttggtcaacccaatgttccgaggctatgcccagcaggacacccaagagttccttcgctgcctgatggaccagctgcacgaggagctcaaggagccggtggtggccacggtggcgctgacggaggctcgggactcagattcgagtgacacggatgagaaacgggagggtgaccggagcccatcagaagatgagttcttgtcctgtgactcgagcagtgaccggggtgagggtgacgggcaggggcgtggcgggggcagctcgcaggccgagacggagctgctgatcccagatgaggcgggccgagccatctctgagaaggagcggatgaaggaccgcaagttctcctggggccagcagcgtacaaactcggagcaagtggacgaggacgctgatgtggacactgccatggctgcccttgacgaccagcccgcggaggcccagcccccgtcaccacggtcctccagcccctgccggacgccagagccggacaatgatgctcacctacgcagctcctctcgcccctgcagccccgtccaccaccacgagggccatgccaagctgtctagcagcccccctcgtgcaagccccgtgaggatggcaccgtcgtacgtgctcaagaaagcccaggtattgagtgctggcagccggaggcggaaggagcagcgctaccgcagcgtcatctcagacatctttgacggctccattctcagccttgtgcagtgtctcacctgtgaccgggtatccaccacagtggaaacgttccaggacttatcactgcccattcctggaaaggaggacctggccaagctccattcagccatctaccagaatgtgccggccaagccaggcgcctgtggggacagctatgccgcccagggctggctggccttcattgtggagtacatccgacggtttgtggtatcctgtacccccagctggttttgggggcctgtcgtcaccctggaagactgccttgctgccttctttgccgctgatgagttaaagggtgacaacatgtacagctgtgagcggtgtaagaagctgcggaacggagtgaagtactgcaaagtcctgcggttgcccgagatcctgtgcattcacctaaagcgctttcggcacgaggtgatgtactcattcaagatcaacagccacgtctccttccccctcgaggggctcgacctgcgccccttccttgccaaggagtgcacatcccagatcaccacctacgacctcctctcggtcatctgccaccacggcacggcaggcagtgggcactacatcgcctactgccagaacgtgatcaatgggcagtggtacgagtttgatgaccagtacgtcacagaagtccacgagacggtggtgcagaacgccgagggctacgtactcttctacaggaagagcagcgaggaggccatgcgggagcgacagcaggtggtgtccctggccgccatgcgggagcccagcctgctgcggttctacgtgtcccgcgagtggctcaacaagttcaacaccttcgcggagccaggccccatcaccaaccagaccttcctctgctcccacggaggcatcccgccccacaaataccactacatcgacgacctggtggtcatcctgccccagaacgtctgggagcacctgtacaacagattcgggggtggccccgccgtgaaccacctgtacgtgtgctccatctgccaggtggagatcgaggcactggccaagcgcaggaggatcgagatcgacaccttcatcaagttgaacaaggccttccaggccgaggagtcgccgggcgtcatctactgcatcagcatgcagtggttccgggagtgggaggcgttcgtcaaggggaaggacaacgagccccccgggcccattgacaacagcaggattgcacaggtcaaaggaagcggccatgtccagctgaagcagggagctgactacgggcagatttcggaggagacctggacctacctgaacagcctgtatggaggtggccccgagattgccatccgccagagtgtggcgcagccgctgggcccagagaacctgcacggggagcagaagatcgaagccgagacgcgggccgtgtgatctgctgggctagtctccccatgtgccccaccccgcggaaggcgtgtttgtgcccagaagagaggccgggctgctgcagaaccccgccgtgtaaagaggcagaaaagttggtttggtttgcagtaacgctgcaactagaaaatatatgcacttcaggcttgttgaaacgaccaagactctgtgacgttaatttgggtctttgtcctggcagtgcctctgccagtcactgtcatcgttgtgtcccccacaactgtcctcttgctagctcggcccagctttgtccctggagcccgatgctacccctgtcagacagaggctgcggcctgggccagagtcagggagtagctgctgcttcacggcgtctccactgtgcgattggcccggagccccgaagactcggagggagctgctcagggccggtgagcgcagccagaagccctggccagtgaggagctcacaggtcctccctggtggtcccgccgcacctctgcatctcctgggcgtcaccaggaaggctctgaagtcccgggctgctctcagcacttctcctgcagactgaagactctggactcattgctgattggaacaccaggaggaggttggatttctgccagtgggggatgtttctggaggcagctggtcccccacaccgcgtcctgctgagcctgccccctggattggctgtaatttgcctcgaagttcagcagttcatcttcatgggaaatttgctgagcccccaccagggaaccggatgatgaaacagggatacctcacagcttggccatttgaggcaaaggcagcttcccgagctgatgctaaagaagacagactttcccttcctcccagcagcagcagtgcagagcccacctggagggatgtgggggctgtgcagggtgcagcgctcaggtggatcctgggaagcagcctctggatgctgagtggagggagccactgagcacagcaaggcaccaaagcccctggagaaaccgccagggcgaggtgcgaccatcatcaggatcaaagcagacggggcgtgggtggggaaggggctctgggaccagaccccccacactactgcgtctttgtttctatcagtctttgtagaagcaggtggtggtggaaattccagcaggtgggtcccgcagaggccctgaggcctcacttttcggatcttctgtcccagatcctgctccctccctgctgagcctggggttcccctggcattggccccagccttctgaaagccggcgctgcagccagaggccgcacgctgcactgtcgcgacgcagagaggcttctgtgcaggctgggatcgggccccatgtctgtgctgtctagtttgtgttcaaaatgtcagaataaacacagaataaatgtt

SEQ ID NO: 1804 - DNA, 1985 bp, Homo sapiens
  source 1..1985: mol_type = genomic DNA
cggcaggcgggtgcgcggagggctggtgccccgcagcaggtgggcggggtgcggttggcggcggcggctgggccgggggctgccggctgcgctcgggccgtgcgcggcggccgtgcgggcacgccatggacttcaacatgaagaagctggcgtcggacgcgggcatcttcttcacccgggcggtgcagttcacggaggagaaatttggccaggctgagaagactgagcttgatgcccactttgaaaaccttctggcccgggcagacagcaccaagaactggacagagaagatcttgaggcagacagaggtgctgctgcagcccaaccccagtgcccgagtggaggagttcctgtatgagaagctggacaggaaggtcccctcaagggtcaccaacggggagctgctggctcagtacatggcagacgcggccagtgagctggggccgaccaccccctatgggaagacactgatcaaggtggcagaagctgaaaagcaactgggagccgcggagagggattttatccacacggcctccatcagcttcctcacacccttgcgcaacttcctggagggggactggaagaccatctcgaaggagaggcggctcctccaaaaccggcgtctggacttggatgcctgcaaagcgaggctgaagaaggccaaggctgcagaagccaaagccacgtgtgagggagatacggtgcctgactttcaggagactagacctcgtaattacattctctcggccagcgcctccgcgctctggaatgatgaagtggacaaggccgagcaggagctccgcgtggcccagacagagtttgaccggcaagcagaagtgacccgtctcttgctggagggaatcagtagcactcacgtgaaccacctgcgctgcctccacgagttcgtcaagtctcagacaacctactacgcacagtgctaccgccacatgctggacttgcagaagcagctgggcagctcccagggtgccatatttcccggcaccttcgtgggcaccacagagcccgcctccccacccctgagcagcacctcacccaccactgctgcggccactatgcctgtggtgccctctgtggccagcctggcccctccgggggaggcctcgctctgcctggaagaggtggccccccctgccagtgggacccgcaaagctcgggtgctctatgactacgaggcagccgacagcagtgagctggccctgctggctgatgagctcatcactgtctacagcctgcctggcatggaccctgactggctcattggcgagagaggcaacaagaagggcaaggtccctgtcacctacttggaactgctcagctaggcaggtgcccccatcccccccgcattctggcctaggcaggagaggatgggcgcagccctgccacttaacttgtttgttggtgacacagttgttcagagtggggagaattcaccccattctgtccctgcccctagtcacctagctgtgagggtgcctgaggctgaatggctccacccctcccccagccctgcttctgacctgtggctctggagcccctgcccctgcctgcatccccgagcaccccaccctccaggctccactaaggagggaggggctgtctgcagcagctgcactcagcacctaggccagggtggggccgccgcagatgggctcaggaagccccaggtgcactcagcgagagccctgcctttcagttgccaaaagctgcatcaggggaatgcggcaaggcacacagggctctggcagcccctggggactgggcgctgcccctgggaggggagagcctggccagggctggtgttgggcccggagcagcatcttccggtgctatcctcccctcccacccctcacagctcaagccaagtccagcggccgcagtcttcacctctccacactcactttttatctggtgtttttacttctgcctgcgtttgctctctagccaataaaccgtccttgtgtgcg

SEQ ID NO: 1805 - DNA, 1365 bp, Homo sapiens
  source 1..1365: mol_type = genomic DNA
ggctgggccgggggctgccggctgcgctcgggccgtgcgcggcggccgtgcgggcacgccatggacttcaacatgaagaagctggcgtcggacgcgggcatcttcttcacccgggcggtgcagttcacggaggagaaatttggccaggctgagaagactgagcttgatgcccactttgaaaaccttctggcccgggcagacagcaccaagaactggacagagaagatcttgaggcagacagaggtgctgctgcagcccaaccccagtgcccgagtggaggagttcctgtatgagaagctggacaggaaggtcccctcaagggtcaccaacggggagctgctggctcagtacatggcagacgcggccagtgagctggggccgaccaccccctatgggaagacactgatcaaggtggcagaagctgaaaagcaactgggagccgcggagagggattttatccacacggcctccatcagcttcctcacacccttgcgcaacttcctggagggggactggaagaccatctcgaaggagaggcggctcctccaaaaccggcgtctggacttggatgcctgcaaagcgaggctgaagaaggccaaggctgcagaagccaaagccacgacggtgcctgactttcaggagactagacctcgtaattacattctctcggccagcgcctccgcgctctggaatgatgaagtggacaaggccgagcaggagctccgcgtggcccagacagagtttgaccggcaagcagaagtgacccgtctcttgctggagggaatcagtagcactcacgtgaaccacctgcgctgcctccacgagttcgtcaagtctcagacaacctactacgcacagtgctaccgccacatgctggacttgcagaagcagctgggcagatttcccggcaccttcgtgggcaccacagagcccgcctccccacccctgagcagcacctcacccaccactgctgcggccactatgcctgtggtgccctctgtggccagcctggcccctccgggggaggcctcgctctgcctggaagaggtggccccccctgccagtgggacccgcaaagctcgggtgctctatgactacgaggcagccgacagcagtgagctggccctgctggctgatgagctcatcactgtctacagcctgcctggcatggaccctgactggctcattggcgagagaggcaacaagaagggcaaggtccctgtcacctacttggaactgctcagctagctcaagccaagtccagcggccgcagtcttcacctctccacactcactttttatctggtgtttttacttctgcctgcgtttgctctctagccaataaaccgtccttgtgtgcgagtca

SEQ ID NO: 1806 - DNA, 2982 bp, Homo sapiens
  source 1..2982: mol_type = genomic DNA
cgggcgggcaggcgggcaggccggcaggcgggtgcgcggagggctggtgccccgcagcaggtgggcggggtgcggttggcggcggcggctgggccgggggctgccggctgcgctcgggccgtgcgcggcggccgtgcgggcacgccatggacttcaacatgaagaagctggcgtcggacgcgggcatcttcttcacccgggcggtgcagttcacggaggagaaatttggccaggctgagaagactgagcttgatgcccactttgaaaaccttctggcccgggcagacagcaccaagaactggacagagaagatcttgaggcagacagaggtgctgctgcagcccaaccccagtgcccgagtggaggagttcctgtatgagaagctggacaggaaggtcccctcaagggtcaccaacggggagctgctggctcagtacatggcagacgcggccagtgagctggggccgaccaccccctatgggaagacactgatcaaggtggcagaagctgaaaagcaactgggagccgcggagagggattttatccacacggcctccatcagcttcctcacacccttgcgcaacttcctggagggggactggaagaccatctcgaaggagaggcggctcctccaaaaccggcgtctggacttggatgcctgcaaagcgaggctgaagaaggccaaggctgcagaagccaaagccacgacggtgcctgactttcaggagactagacctcgtaattacattctctcggccagcgcctccgcgctctggaatgatgaagtggacaaggccgagcaggagctccgcgtggcccagacagagtttgaccggcaagcagaagtgacccgtctcttgctggagggaatcagtagcactcacgtgaaccacctgcgctgcctccacgagttcgtcaagtctcagacaacctactacgcacagtgctaccgccacatgctggacttgcagaagcagctgggcagatttcccggcaccttcgtgggcaccacagagcccgcctccccacccctgagcagcacctcacccaccactgctgcggccactatgcctgtggtgccctctgtggccagcctggcccctccgggggaggcctcgctctgcctggaagaggtggccccccctgccagtgggacccgcaaagctcgggtgctctatgactacgaggcagccgacagcagtgagctggccctgctggctgatgagctcatcactgtctacagcctgcctggcatggaccctgactggctcattggcgagagaggcaacaagaagggcaaggtccctgtcacctacttggaactgctcagctaggcaggtgcccccatcccccccgcattctggcctaggcaggagaggatgggcgcagccctgccacttaacttgtttgttggtgacacagttgttcagagtggggagaattcaccccattctgtccctgcccctagtcacctagctgtgagggtgcctgaggctgaatggctccacccctcccccagccctgcttctgacctgtggctctggagcccctgcccctgcctgcatccccgagcaccccaccctccaggctccactaaggagggaggggctgtctgcagcagctgcactcagcacctaggccagggtggggccgccgcagatgggctcaggaagccccaggtgcactcagcgagagccctgcctttcagttgccaaaagctgcatcaggggaatgcggcaaggcacacagggctctggcagcccctggggactgggcgctgcccctgggaggggagagcctggccagggctggtgttgggcccggagcagcatcttccggtgctatcctcccctcccacccctcacagctcaagccaagtccagcggccgcagtcttcacctctccacactcactttttatctggtgtttttacttctgcctgcgtttgctctctagccaataaaccgtccttgtgtgcgagtcacctgggctcctgtcagggcctggccctgagggtggtaaagggaaaggtagactcaccctctgccccactcttccacagagtgagcaggggccctgtggctgccccggcccccagctctctagttgggaagaagtgcagccctccctgtcttctgcggggcctgtgcctctcagagggcagtgctgttcctggacatgaagccgcacaaggaacgttttattcctaagaaaaagtttcctaaatttggattgtggagcggactgtagaatgcgtctgacagttcagttcaagcacaagaagtgggtagcggtcagtgctgtctgcaggtcgggcgtttcacccagcatgtgcccccgtgccatgggttctcatgccgtcctcagtgtccacatttcacagatgagatcagcaagacagtcagctcctcaagggaccacagttggcaagtggccaagcagggactgaagcccaggcagcctgattctagaaaccctaagtgatgtctgtgttttagatggcccctagcaggacctagcattctgacttcagtcctgagaaggccaacagccagtaggccccactgttggggcttctgaagaggggatcgggggatgacgggggcacggggctataaataggaaggcacagagcttcaagaaaggctcacccagggatgagctcagcccactgggccaatgaaagcagggtcaaggacaggaccagcgcaggccaaggaagggaatatctgacagcgcccacccagccaaaccctcagcccaaggacaggaatgaggagatgctggtgaactagccatccatcagtacctgccttcccccgaggctgcagccccactcccaggcgcctggccaggggagttttctaggttctgagagccacgttgtcatccctgggctttgaagttaaacatcacacagctgtctataaacaagattttaatatctgtataaatagaccacagaattaccaaaactgcaaa

SEQ ID NO: 1807 - DNA, 962 bp, Homo sapiens
  source 1..962: mol_type = genomic DNA
gagctatgagctggacctgtccgcgttgccagcaacctgttttcttcgctgagaaggtgagctccctgggcaagaactggcaccgcttctgcctgaaatgtgagcgctgccacagcatcctgtcccctggcgggcatgcagagcacaatgggaggccatactgccacaagccatgctatggggctctctttggacccaggggggtgaacattggtggtgtaggctcctacttgtacaatccccccactcccagccctggctgcaccactcctctcagccccagcagcttcagccctcccaggccaaggactggcctcccccaaggcaagaaaagccctccccatatgaagacattcactggggagacctcgctgtgccctggctgtggggagcccgtctattttgctgagaaggtgatgtcattaggcagaaattggcaccgaccgtgtctgaggtgccagcgttgccacaagaccctgactgctgggagtcatgctgagcatgatggagtcccctactgccacgtcccctgctacggctacctgtttggccccaaaggtgtgaacattggcgatgtgggctgctacatctatgacccagtgaagataaaattcaaatgagacgctcacaaaaaaggtcaccctaactcaggcctcccatcatgcccctcatggtccaatggaagctacaaaaatctccagtcccatgggggttggggaaggtgggatcttgggggcctgggcctaggctccatggtaggccagagagtctagactttctctgccaattttttccctttcccatttctatctggttagggaacagcccgttttgaagggtatcctcctcctggccatcacaacccctttccccagcacattctggagcttcaaggtactcataaaacttgtgtttattgaatttcagcctctgtggcttcttcaataaaatgttggctccca

SEQ ID NO: 1808 - DNA, 1495 bp, Homo sapiens
  source 1..1495: mol_type = genomic DNA
agagccagttccaaccccgggatcgccgcggaaccacgcacagagtctgcagaagtgcacagctttatcgacagcgcttgaagcatggagtctcttcgcgggtacacccacagtgatattggctaccgcagcctggcagtcggcgaggacatcgaggaagtgaatgatgagaaacttaccgtgacctcgctgatggcaaggggaggagaggacgaggagaatacacggtccaaacctgagtacggaacagaagcggaaaacaacgttggcacggaagggtccgtcccctcggacgaccaagaccgtgagggtggcggcggccacgagccggagcaacagcaggaggagccgcccctgaccaagccggagcaacagcaggaggagccgcccctgctcgagctgaagcaagagcaggaggagccgccccagacgaccgtggaggggccacagccggcggaggggccacaaaccgctgagggaccacagcccccagagaggaaacgccgccgccgcaccgcgttcacgcagtttcagctgcaggagctagagaactttttcgatgaatctcaatatcccgacgttgtggcgcgagagagacttgcagcacgcctgaatttgactgaagacagagtgcaggtttggtttcagaacagaagagccaagtggaaacgaaatcagagggtgctaatgttgagaaacactgctactgctgacctggcccaccctttggacatgttcttgggtggggcctattatgctgctcctgctctggatcctgctttgtgtgttcatctggtgccacaactacctagaccacctgtgctgcctgtgccacctatgccacccaggccacccatggtccctatgccacccaggccacccatagcacctatgccacccatggcgcctgtgccacccggctcacgcatggcgcctgtgccacccgggccacgcatggcgcctgtgccaccctggccgcccatggcgcctgtgccaccctggccgcccatggcgcctgtgccaaccgggccgcccatggcgcctgtgccacccgggccgcccatggcgcgtgtgccacccgggccgcccatggcgcgtgtgccacccgggccgcccatggcgcctctgccacccgggccgcccatggcgcctctgccacccgggccgcccatggcgcctctgccacccgggccgcccatggcgcctctgccacccaggtcacatgtgcctcacactggcctggctcctgtacacatcacatgggcccctgtcatcaacagttattatgcatgtccctttttctaaagtaaggtattcataacagtttttccaaagttctttcctgccagatagaaattgtgcacagcacagcatcaagtaattcgttagatgcttgttaaatgaagtgggtaggtgaacaaagttaacgaatgccctgttatttttgtaggccacataattgtagtattttcaataaagatgtgacttaatagta

SEQ ID NO: 1809 - DNA, 1051 bp, Homo sapiens
  source 1..1051: mol_type = genomic DNA
gctactgtcacatttcagtgatgtcacagctgcaggtggtacagagccagcaccaccatctgatgcccagcctgagtgctggctgaactgagaggaacagggttggtgcctggcactggtgttgctccattcatctctgaggtctcacagccccagcatgagtccatcagcaaagaagaggcccaagaacagcagggtttccaagatgcaagatgagaaactgcgggacgagacagagcagcctgtgagcaaagtaattgagcggaaccgtctgagaacggtgttaaaaaacttgtcgctcttgaagctactcaagagctcaaaccgccggatccaagaactgcataagctggccaaaaggtgttggcattcactgctcagtgttccaaagattctccgcatctcctctggggaaaacagtgcctgcaataaaacaaaacaaaataatgaagagttccaggagatcgggtgctccgagaaggaactcaagtccaagaaattagagtccacaggggaccctaagaaaaaagagtacaaggagtggaagtcccaggtgcagtcagggatgaggaacaaggagaaaacgtcattggcggcaatgccacggaaagaaaagcatatagagcctgaggttccaaggacatcgagggatgatagcttgaaccctggagtccaggggaggcaaccactcaccgagggcccccgagtcatcttcattaagccctaccgcaatagaactcccatggggcacatgaagcagctggatgtagccgaccagtggatctggtttgaggggctgcccacacgaatccacctcccggcgcccagggtgatgtgcagatcctccaccctgcgttgggtcaagcgccgctgcacccgcttctgctccgcatcacttgaaatgcctatgtggcatccatacaaggttgatgtgacctggacgagagccagaggtgcgagcagagggtggagatcgcgccatcagctgaaggggaggaatgggtggcgaaattcacgagtctacaaataagatcttccatatggcacctaa

SEQ ID NO: 1810 - DNA, 5130 bp, Homo sapiens
  source 1..5130: mol_type = genomic DNA
gagaatcgaagtgaggagccgccagaggagagctgaggagaggagggggaggtcgacgacctgggccctgggcctctgaaggaaaggagctgtaacttctattgggaaaatgactgacttcaaagttggcaggaggtgtaatcaggctgcaggtcttggggtgattagggaatcattgaggaagagcagacaggtctgtttctttctaggttcctgtagagatctgtatgtagctgttcacttggaagttaattaagaaagaacaaaaactattcatttggattcaaggtccatctccactggtggctgtggtggctttggattgttggaagaccatcaccttcagcaggtctgcacttgggaacaatcattctcccccagcccgagcgtgcctctgccctctgtatcattgacagaggctgtatgtttggaaagagaactttgtgactgcagaactgacagttgactctaattcttgctaccaagtttttccccgacccagtgaaagagtgttaagacttcgacctaggacacattgagaaccaaggccaagactggacagggccatataactgggcttcaaccatggctgggactaagaataagacaagagcccaggccaaaactgaaaaaaaggctgctatacaagctaaagctggagcagagagggaggctactggtgttgttaggcctgtagccaagaccagggccaaagcaaaagccaagacagggtctaagacagatgcagtagcagagatgaaggcagtgtctaagaacaaggttgttgctgagacgaaggaaggagctctgtcagagcctaagactctgggcaaagccatgggagatttcactcccaaggctgggaatgagtccaccagctccacatgtaaaaatgaggctggtactgatgcctggttctgggctggggaagaggccactatcaattcctggttctggaatggagaagaggctggtaatagtttcagcactaagaatgataaacctgaaattggtgcccaggtctgtgctgaggagttggaacctgcggctggggccgattgcaaacctaggtcaggggctgaggaggaggaggaagagaatgttattgggaactggttttgggaaggagatgatactagttttgaccctaatcctaaacctgtgagcaggatagttaagcctcagcctgtgtatgaaattaatgaaaaaaataggcccaaggactggtctgaggtaactatctggcccaatgcccctgctgtaactccagctgtgttaggatttagatcccaggcaccatctgaggcaagccctccttcatatattgttctggcctccgctgaagaaaatgcctgttctttgcctgtggcaacagcttgccgcccttctaggaacactcgctcatgctcacagcctatccctgagtgtcgttttgattctgacccctgcatccagaccatagatgagattagacgtcaaatcaggatcagggaggtaaatgggattaagccatttgcttgtccttgcaaaatggaatgctatatggattctgaggaatttgaaaaacttgttagcttacttaagtcaactactgatcctcttattcataaaatagcacggattgcaatgggtgtccataatgttcacccatttgcccaagagtttattaacgaagtaggtgtagtgacacttattgaaagcttgctcagttttccttcccctgaaatgagaaaaaagactgtaattactctgaatcctccttctggggatgaaagacaacgcaaaattgaattacatgttaagcatatgtgtaaagaaaccatgtcatttcctttgaactcaccgggacagcaatctggattaaagatactaggacaactgactactgattttgtccatcactacattgttgccaattacttttcagagcttttccatttgctgtcctcaggaaattgcaaaaccagaaatcttgttttgaaactacttttaaatatgtctgaaaatccaactgcagccagagacatgatcaatatgaaggcattggcagcattaaaactcatctttaaccagaaagaggcaaaagccaatcttgttagtggtgtggccatatttattaacataaaggagcatatcagaaaaggctcaattgtagttgttgatcacttgagttataatacactcatggccattttcagggaagttaaagagattattgaaacaatgtaaaatgagccagagatagaacattttaagccatcttcaaactctagcaggctgtacattacagtgtacacattatacactgcatctttaacacagagtcacctgtgacaggctctaggtttgagctagactattttgggggtatcaaatgaatattataccttgggctgaaaatgtttgatttttatcttgtctagattggcatatttttaacattttacttaagatagcaaaccagttcgttttaagtaagctaacttgttcattagtatctgtggcttaaaatggcaaaaaagaaaatatccttgagtttgtaatctagttacagaagtaaggcatacacacacacaaagataacagtacctagagagagagtgtgtgtgagtgtgcgtgtctctgtgtgtgcacgtgcacgctcatggccaaatgtgcgcactctacataaaggaggcaggagttcctataggctatttaatgtaagagaaactatttttctcctgttccagctgtatcagatactcgttccgcaacacagaaatgactcagaatctcagacaaaatgtattatttgttcaattttaattttgctactacattcataactcttaaattgttaggctgtttcatttacatcaaagttatctcacaaaagagaaggcaggaaacgttttgtgagtgcctattctatgtcaaacactgtgttggcaccatattttacaagtttttttcctcttctcacagtgatcttgtgagttagttacttatatttttattagaactcattattctgggtaccctccaatgagaattagagaggttaaataccttttcctagattcccacagcaggaaggtggcatagctgttttgtctgacaccagaacccatctcaccacactgctttacagtcttcctgaaggacattttgaggtgggggggccttcaaagctcagagactggtttgaatggtttaattttgcaatggatcatgtccatgccaggtgttacaattcttaacttcctccaaattcgtgtgtccattagacatttggctacatctggctggaggtcaggagaaaattctgaggtaaatagatggattttatctggcagtgtcgaaaatagtaggagcctaaaactttgttcaatgagtaagatgtagatttggagtcatcagcaggggaaacttgttagatgtcctttgtatctttttctatccatttgtattttttctttcccaaagagctgaaatcattttataccctgaatttaaaaggtaattgcttttttcctccttgcgaaatcataccttaattttttttttttttttttttaccatttatgatttattctcctatgtgtcatatgaaaggccaaggggctttatcttttactagtaggcaagcctgggcatttctgcatttgtgccagctaacactacaaaatagacttaattagagaaatttagacccagaattgcagcttcaacaacacaaaacaggaaagctagaagaggttgctgtgtcaacctacaagatagtgattcttggaagttggtatggaccagaaagcattcccaggacatttaggctatggctgagttctctaagactcagggtgggaattataatccctggtctaagctgatatgaaagtttctatgtgtgaaaatatggagttatatgctttgagattttctgccagttaaactaaaacaagatcatactgtaaatgtttgtaacttgcttccccccactgtatactgtaaacatctttgcatgtcaataaatatgcctctacaacatatttttgaatcacttaatatttttcccatgttaacagttggtatatagtgttgtaaacctttattgcatattctcataacatacaatatacacattcttttgcaaaaatgggaacacagtattgagacttgccttttcctcttaacacttatcttttcaatttagtattatatagatctgtcacatgctttttatctaataactttatagaaatataattgccatacattaagctgcatgttgaaagtatacagtgtgatcagttttggaatgtatatacacacaaaaccataaccacaatcaaaattgtaaatacattcatcacccaccaaagctactttttttttgagacagagtcttgctctgtcacccaggctggagtacagtggcgcaatctcggcccactgcaacctctgcttcccaggttcaagtgattctcgtgccttagcctcctgagcagctgggactacaggtgcatgccaccacatccgactaatttttttttttattttttgtatttttagtagagacagggtttcaccatgttggccaggctggtcttgaactcctggtctcaagtgatctacccatcttggtctccctgagtgccaggattacaggcgtgagccaccatgcccagcctcccccaaagcttcttaatgcccttttgtaatccctccctcccctctctccctgtgcccctaacccaggcaaccatgggacattttctgacaaaatagaattgttttcatttcctgtaattgtgtataaatggactcatatagcatgtactctttggtcgggaggggatctggcttatttcacttagtgtaattatttgagattcatccatatcatgtgtctcactatttcattgctttttattgccaagtagtattccaccatatggctttaccacagtttatttatccattcacttattgatggacatttgggctgttcagagtttggccattataagtaaagcagctatgagcatttgtgtacaagtgtttttatggacataggctttcatatctttggaatgacatctaacaatattgaatcttcgacccatgaataaaatctctctccactta

SEQ ID NO: 1811 - DNA, 2322 bp, Homo sapiens
  source 1..2322: mol_type = genomic DNA
ttgtggcaagattctgaggggaagtgtagctcccaggttggttccaagtcttcttccaattaggatcttatccaggacgcttcattgcatttggtcttcatttctccttagtctcctccaggctgacatttcctcaatctttattggtcttccacagccctgacacttttggagataccagtcagcatttccaagttcgttctgtgagactgtagtgtcaggacaaagcaacaacaaaatgtgctctactctaaagaagtgtgggacatacagaactgaagttgcagaatgccatgaccatggtagcacttttcaaggaagaaagaaaggtgggagttctttccgggataattttgacaagaggagctgtcattatgaacatggtgggtatgagcgcccgccttcacactgccaggagaatgatggaagcgtggagatgagggatgtccacaaggaccaacaactaagacacactccttatagcatccgatgcgaaagaagaatgaaatggcatagtgaagacgaaatccgtattaccacgtggagaaatagaaaacctccggagagaaaaatgagtcagaacacacaggatggatacacaaggaactggtttaaggtcacaattccttacgggataaagtatgacaaggcatggctaatgaattcaatccagagccattgcagtgaccgcttcactccggttgatttccactacgtccgaaatcgggcatgcttctttgtccaggatgctagcgctgcctccgcattgaaggatgtcagttataagatttatgatgatgagaaccaaaagatatgtatatttgtcaatcattctactgcgccctactctgtgaagaataagttgaagccaggccaaatggagatgctaaagctgaccatgaacaaacggtacaatgtctcccagcaagctcttgatctccagaatctccgctttgacccagacttgatgggccgtgacattgatataatcctgaatcgaagaaactgcatggctgccaccctgaagatcattgaaagaaatttccctgagctgttgtctttgaacttgtgcaacaacaagctgtaccagctggatggcctttctgacattacagagaaggctcccaaagtcaagaccctgaatctctccaaaaataagctggagtcggcgtgggagttgggcaaggtgaaagggctgaagctcgaagagctatggctagaagggaacccgttgtgcagcaccttctcggaccagtccgcctatgtaagtgccatccgggattgtttccccaagttgttacgcctggacggccgagagttatccgcaccagtgattgttgacattgacagctctgagacaatgaaaccctgcaaggaaaactttactggatctgagaccctaaagcatttagtcctgcaattcctgcagcagtattactcgatctatgactctggagatcgacagggtctcctcggtgcttaccacgatgaggcctgcttctccttggctattcccttcgaccccaaggactcagccccgagcagcttgtgcaagtactttgaggatagcaggaatatgaaaacactcaaggacccctacctgaagggggaactgctgaggcgcacaaaacgtgacattgtggactccctcagtgcgttgcccaaaactcagcatgacctcagctccatcctggtggacgtgtggtgccagacggaaaggatgctctgcttttctgtcaatggggttttcaaggaagtggaaggacagtctcagggttctgttctcgccttcacccggaccttcattgctacccctggcagcagttccagtctgtgcatcgtgaatgacgagctgtttgtgagggatgccagcccccaagagactcagagtgccttctccatcccagtgtccacactctcctccagctctgagccctccctctcccaggagcagcaggaaatggtgcaggctttctctgcccagtctgggatgaaactggagtggtctcagaagtgccttcaggacaatgagtggaactacactagagctggccaggccttcactatgctccagaccgagggcaagatccccgcggaggccttcaagcaaatctcctaaaaggagccctccgatgtcttctttgtcttcgttcacatcctctttgtttcctcttttcaccagcctaaggcctggctgaccaggaagccaacgttaacttgcaggccacgtgacataaccacccaaagagccagttgctctgtgtattcgccccactcatgatcaccattttattttcataataaagagtgacgttacacgtt

SEQ ID NO: 1812 - DNA, 2884 bp, Homo sapiens
  source 1..2884: mol_type = genomic DNA
cctcctcctctgggatcttgaaaacgtagaattcccagagactctgctgatggacagaatccggctccaggaactggcattccagttgcaccagttaactgtcctggcctcagtcttgctagtggccagaagcttctctggtgaagttttattcagatcacctgaatttgtggatagactgaaatgcaccaccaaggccctaactgaggaatttatctccaggcctgaagagactatgctgagtgtgagtgaacaggtgtctcaggaagtccatcaaggccttaaggacatgggcctcactactctgagcagtgaaaacacagcatctcttctaggccaactccagaacatcaccaagaaagagaactgcattcgtagcattgttggagtctctgctacactttcctggaggcctcattctcattgaaaaggagttggcagaactgggctggaagtttctcaatctgatgcatcataatcagcagagtcatttttcacaaaacgaaatctttccagaagatcacgaataagagagatcaaagctaggcagcttgagttgaagtagagctggaagaaggagttttgaggactgtttcaaaaccactggactagatgatctctaaaggatcttatccaggacgcttcattgcatttggtcttcatttctccttagtctcctccaggctgacatttcctcaatctttattggtcttccacagccctgacacttttggagataccagtcagcatttccaagttcgttctgtgagactgtagtgtcaggacaaagcaacaacaaaatgtgctctactctaaagaagtgtgggacatacagaactgaagttgcagaatgccatgaccatggtagcacttttcaaggaagaaagaaaggtgggagttctttccgggataattttgacaagaggagctgtcattatgaacatggtgggtatgagcgcccgccttcacactgccaggagaatgatggaagcgtggagatgagggatgtccacaaggaccaacaactaagacacactccttatagcatccgatgcgaaagaagaatgaaatggcatagtgaagacgaaatccgtattaccacgtggagaaatagaaaacctccggagagaaaaatgagtcagaacacacaggatggatacacaaggaactggtttaaggtcacaattccttacgggataaagtatgacaaggcatggctaatgaattcaatccagagccattgcagtgaccgcttcactccggttgatttccactacgtccgaaatcgggcatgcttctttgtccaggatgctagcgctgcctccgcattgaaggatgtcagttataagatttatgatgatgagaaccaaaagatatgtatatttgtcaatcattctactgcgccctactctgtgaagaataagttgaagccaggccaaatggagatgctaaagctgaccatgaacaaacggtacaatgtctcccagcaagctcttgatctccagaatctccgctttgacccagacttgatgggccgtgacattgatataatcctgaatcgaagaaactgcatggctgccaccctgaagatcattgaaagaaatttccctgagctgttgtctttgaacttgtgcaacaacaagctgtaccagctggatggcctttctgacattacagagaaggctcccaaagtcaagaccctgaatctctccaaaaataagctggagtcggcgtgggagttgggcaaggtgaaagggctgaagctcgaagagctatggctagaagggaacccgttgtgcagcaccttctcggaccagtccgcctatgtaagtgccatccgggattgtttccccaagttgttacgcctggacggccgagagttatccgcaccagtgattgttgacattgacagctctgagacaatgaaaccctgcaaggaaaactttactggatctgagaccctaaagcatttagtcctgcaattcctgcagcagtattactcgatctatgactctggagatcgacagggtctcctcggtgcttaccacgatgaggcctgcttctccttggctattcccttcgaccccaaggactcagccccgagcagcttgtgcaagtactttgaggatagcaggaatatgaaaacactcaaggacccctacctgaagggggaactgctgaggcgcacaaaacgtgacattgtggactccctcagtgcgttgcccaaaactcagcatgacctcagctccatcctggtggacgtgtggtgccagacggaaaggatgctctgcttttctgtcaatggggttttcaaggaagtggaaggacagtctcagggttctgttctcgccttcacccggaccttcattgctacccctggcagcagttccagtctgtgcatcgtgaatgacgagctgtttgtgagggatgccagcccccaagagactcagagtgccttctccatcccagtgtccacactctcctccagctctgagccctccctctcccaggagcagcaggaaatggtgcaggctttctctgcccagtctgggatgaaactggagtggtctcagaagtgccttcaggacaatgagtggaactacactagagctggccaggccttcactatgctccagaccgagggcaagatccccgcggaggccttcaagcaaatctcctaaaaggagccctccgatgtcttctttgtcttcgttcacatcctctttgtttcctcttttcaccagcctaaggcctggctgaccaggaagccaacgttaacttgcaggccacgtgacataaccacccaaagagccagttgctctgtgtattcgccccactcatgatcaccattttattttcataataaagagtgacgttacacgtt

SEQ ID NO: 1813 - DNA, 3193 bp, Homo sapiens
  source 1..3193: mol_type = genomic DNA
cctgactcacctagctcctcctgcagcatggcgtgttcacttccaagcggggcagactctgctgatggacagaatccggctccaggaactggcattccagttgcaccagttaactgtcctggcctcagtcttgctagtggccagaagcttctctggtgaagttttattcagatcacctgaatttgtggatagactgaaatgcaccaccaaggccctaactgaggaatttatctccaggcctgaagagactatgctgagtgtgagtgaacaggtgtctcaggaagtccatcaaggccttaaggacatgggcctcactactctgagcagtgaaaacacagcatctcttctaggccaactccagaacatcaccaagaaagagaactgcattcgtagcattgttgatcagtggatccgtttttttctcaaatgctgtttgcttcatggcatgcaggagtctctgctacactttcctggaggcctcattctcattgaaaaggagttggcagaactgggctggaagtttctcaatctgatgcatcataatcagcagagtcatttttcacaaaacgaaatctttccagaagatcacgaataagagagatcaaagctaggcagcttgagttgaagtagagctggaagaaggagttttgaggactgtttcaaaaccactggactagatgatctctaaagtggtgacatggacataggataatggttatagacagtccccctcccaacgggaaaaaatgaaagcaagcaaaaagttaccagctccaagccaacttgaaatccaatcaggatcttatccaggacgcttcattgcatttggtcttcatttctccttagtctcctccaggctgacatttcctcaatctttattggtcttccacagccctgacacttttggagataccagtcagcatttccaagttcgttctgtgagactgtagtgtcaggacaaagcaacaacaaaatgtgctctactctaaagaagtgtgggacatacagaactgaagggatgatgcttcctgtctgtcacaaggctgagtgaacacaacatgcctgtaggtccagaacattcttcctacagagaccagatgtccagaaagccctatctgctggattcagggaacgcctctcctcatttctgtcagcactatttgcaaaagcctccttctctgagatcttcaaagctgcagttctagccacagtctgcagggagttgcagaatgccatgaccatggtagcacttttcaaggaagaaagaaaggtgggagttctttccgggataattttgacaagaggagctgtcattatgaacatggtgggtatgagcgcccgccttcacactgccaggagaatgatggaagcgtggagatgagggatgtccacaaggaccaacaactaagacagtaagtgaccaggcagcctggtttgcacgtagcagcccccgggactgtgcaaccctttcattctctgtggtcttccttttcttctctcattagagaactgacgaatgctggaagtggaatagtggctgagcagtcctaattgtagccctggcgtcagtgagtggagcatgtataggagactttcttagatttaatggatacccgccttctctcctcttccccacagcactccttatagcatccgatgcgaaagaagaatgaaatggcatagtgaagacgaaatccgtattaccacgtggagaaatagaaaacctccggagagaaaaatgagtcagaacacacaggatggatacacaaggaactggtttaaggtcacaattccttacgggataaagtatgacaaggcatggctaatgaattcaatccagagccattgcagtgaccgcttcactccggttgatttccactacgtccgaaatcgggcatgcttctttgtccaggatgctagcgctgcctccgcattgaaggatgtcagttataagatttatgatgatgagaaccaaaagatatgtatatttgtcaatcattctactgcgccctactctgtgaagaataagttgaagccaggccaaatggagatgctaaagctgaccatgaacaaacggtacaatgtctcccagcaagctcttgatctccagaatctccgctttgacccagacttgatgggccgtgacattgatataatcctgaatcgaagaaactgcatggctgccaccctgaagatcattgaaagaaatttccctgagctgttgtctttgaacttgtgcaacaacaagctgtaccagctggatggcctttctgacattacagagaaggctcccaaagtcaagaccctgaatctctccaaaaataagctggagtcggcgtgggagttgggcaaggtgaaagggctgaagctcgaagagctatggctagaagggaacccgttgtgcagcaccttctcggaccagtccgcctatgtaagtgccatccgggattgtttccccaagttgttacgcctggacggccgagagttatccgcaccagtgattgttgacattgacagctctgagacaatgaaaccctgcaaggaaaactttactggatctgagaccctaaagcatttagtcctgcaattcctgcagcagtattactcgatctatgactctggagatcgacagggtctcctcggtgcttaccacgatgaggcctgcttctccttggctattcccttcgaccccaaggactcagccccgagcagcttgtgcaagtactttgaggatagcaggaatatgaaaacactcaaggacccctacctgaagggggaactgctgaggcgcacaaaacgtgacattgtggactccctcagtgcgttgcccaaaactcagcatgacctcagctccatcctggtggacgtgtggtgccagacggtgccttcaggacaatgagtggaactacactagagctggccaggccttcactatgctccagaccgagggcaagatccccgcggaggccttcaagcaaatctcctaaaaggagccctccgatgtcttctttgtcttcgttcacatcctctttgtttcctcttttcaccagcctaaggcctggctgaccaggaagccaacgttaacttgcaggccacgtgacataaccacccaaagagccagttgctctgtgtattcgccccactcatgatcaccattttattttcataataaagagtgacgttacacgttgta

SEQ ID NO: 1814 - DNA, 2034 bp, Homo sapiens
  source 1..2034: mol_type = genomic DNA
gcagactgccataagatggcgtccgtggcggctgcacgagcagttcccgtgggcagtgggctcaggggcctgcaacggaccctacctcttgtagtgattctcggggccacgggcaccggcaaatccacgctggcgttgcagctaggccagcggctcggcggtgagatcgtcagcgctgactccatgcaggtctatgaaggcctagacatcatcaccaacaaggtttctgcccaagagcagagaatctgccggcaccacatgatcagctttgtggatcctcttgtgaccaattacacagtggtggacttcagaaatagagcaactgctctgattgaagatatatttgcccgagacaaaattcctattgttgtgggaggaaccaattattacattgaatctctgctctggaaagttcttgtcaataccaagccccaggagatgggcactgagaaagtgattgaccgaaaagtggagcttgaaaaggaggatggtcttgtacttcacaaacgcctaagccaggtggacccagaaatggctgccaagctgcatccacatgacaaacgcaaagtggccaggagcttgcaagtttttgaagaaacaggaatctctcatagtgaatttctccatcgtcaacatacggaagaaggtggtggtccccttggaggtcctctgaagttctctaacccttgcatcctttggcttcatgctgaccaggcagttctagatgagcgcttggataagagggtggatgacatgcttgctgctgggctcttggaggaactaagagattttcacagacgctataatcagaagaatgtttcggaaaatagccaggactatcaacatggtatcttccaatcaattggcttcaaggaatttcacgagtacctgatcactgagggaaaatgcacactggagactagtaaccagcttctaaagaaaggacctggtcccattgtcccccctgtctatggcttagaggtatctgatgtctcgaagtgggaagagtctgttcttgaacctgctcttgaaatcgtgcaaagtttcatccagggccacaagcctacagccactccaataaagatgccatacaatgaagctgagaacaagagaagttatcacctgtgtgacctctgtgatcgaatcatcattggggatcgcgaatgggcagcgcacataaaatccaaatcccacttgaaccaactgaagaaaagaagaagattggactcagatgctgtcaacaccatagaaagtcagagtgtttccccagaccataacaaagaacctaaagagaagggatccccagggcagaatgatcaagagctgaaatgcagcgtttaagagacatgtccagtggcctttggaaaggtggtggggatccagttcaggagggaggggtatgtttgtctcccagtctgggcaaaggagtgctatgcggaattctctgcatagcagaaaagctcccaccattttcttttgatgtggttttaaagtctcacgttctctataatagaaacagcaggtcttgtcagctccttgtgtggctgatgtgtctggaaatgatgtagttcaggaaagcattttttttttctttgaaccttaaaggttctattattaaaagcagcacagattccacatttttatacatgaggatcttctttgtggtgaataccaggattgactgcatccctttaaagaagttttatgtccctgactctggctaaaattatctaatttccagatgcttttgtagatgactgaagtatttgtgagccacatattgggagttctagatttgagtgaatggcaggaaagggccatctccattgagatgattaagtgaaccaaactagttctcagaattctacagagaaggagggaatcagactgaggaagctgtgacataggacttgaagaccaaagactttgaaatttgcgagctgctcatgtgtgagttattatcactgctgtctttctattgagttacaaatctatatttttattgaagtttaaataaagaaaaaatttacaaga

SEQ ID NO: 1815 - DNA, 1880 bp, Homo sapiens
  source 1..1880: mol_type = genomic DNA
cagactgccataagatggcgtccgtggcggctgcacgagcagttcccgtgggcagtgggctcaggggcctgcaacggaccctacctcttgtagtgattctcggggccacgggcaccggcaaatccacgctggcgttgcagctaggccagcggctcggcggtgagatcgtcagcgctgactccatgcagccccaggagatgggcactgagaaagtgattgaccgaaaagtggagcttgaaaaggaggatggtcttgtacttcacaaacgcctaagccaggtggacccagaaatggctgccaagctgcatccacatgacaaacgcaaagtggccaggagcttgcaagtttttgaagaaacaggaatctctcatagtgaatttctccatcgtcaacatacggaagaaggtggtggtccccttggaggtcctctgaagttctctaacccttgcatcctttggcttcatgctgaccaggcagatgagcgcttggataagagggtggatgacatgcttgctgctgggctcttggaggaactaagagattttcacagacgctataatcagaagaatgtttcggaaaatagccaggactatcaacatggtatcttccaatcaattggcttcaaggaatttcacgagtacctgatcactgagggaaaatgcacactggagactagtaaccagcttctaaagaaaggtattgaggctctgaaacaagtaactaagagatatgcccggaaacaaaaccgatgggttaaaaaccgttttttgagcagacctggtcccattgtcccccctgtctatggcttagaggtatctgatgtctcgaagtgggaagagtctgttcttgaacctgctcttgaaatcgtgcaaagtttcatccagggccacaagcctacagccactccaataaagatgccatacaatgaagctgagaacaagagaagttatcacctgtgtgacctctgtgatcgaatcatcattggggatcgcgaatgggcagcgcacataaaatccaaatcccacttgaaccaactgaagaaaagaagaagattggactcagatgctgtcaacaccatagaaagtcagagtgtttccccagaccataacaaagaacctaaagagaagggatccccagggcagaatgatcaagagctgaaatgcagcgtttaagagacatgtccagtggcctttggaaaggtggtggggatccagttcaggagggaggggtatgtttgtctcccagtctgggcaaaggagtgctatgcggaattctctgcatagcagaaaagctcccaccattttcttttgatgtggttttaaagtctcacgttctctataatagaaacagcaggtcttgtcagctccttgtgtggctgatgtgtctggaaatgatgtagttcaggaaagcattttttttttctttgaaccttaaaggttctattattaaaagcagcacagattccacatttttatacatgaggatcttctttgtggtgaataccaggattgactgcatccctttaaagaagttttatgtccctgactctggctaaaattatctaatttccagatgcttttgtagatgactgaagtatttgtgagccacatattgggagttctagatttgagtgaatggcaggaaagggccatctccattgagatgattaagtgaaccaaactagttctcagaattctacagagaaggagggaatcagactgaggaagctgtgacataggacttgaagaccaaagactttgaaatttgcgagctgctcatgtgtgagttattatcactgctgtctttctattgagttacaaatctatatttttattgaagtttaaataaagaaaaaatttacaagagcctctttgatcctt

SEQ ID NO: 1816 - DNA, 3661 bp, Homo sapiens
  source 1..3661: mol_type = genomic DNA
ctcctggcttccccgcggggcctcccagggcacctgcccaaggccacccagcgcgcggcagccgagacagcggagcagagccggacctcccagccgtcgatgaaggcggcgaccgcctagggccttcccacggctcggcggcgcgtcaccgcgggggcgagggggcgcctgggcgcccggagctgcggcgcaggaaagggccctgggaaagggcggtggcggcgcccccgaggcggggccggggcggggccggggcggggcctgacttcccgactgggagccttagccgcggggctgagaccaggcagcctgcgttcgccatgaagcgacccaaggagccgagcggctccgacggggagtccgacggacccatcgacgtgggccaagagggccagctgagccagatggccaggccgctgtccacccccagctcttcgcagatgcaagccaggaagaaacacagagggatcatagagaaacggcgtcgagaccgcatcaacagtagcctttctgaattgcgacgcttggtccccactgcctttgagaaacagggctcttccaagctggagaaagccgaggtcttgcagatgacggtggatcacttgaaaatgctccatgccactggtgggacaggattctttgatgcccgagccctggcagttgacttccggagcattggttttcgggagtgcctcactgaggtcatcaggtacctgggggtccttgaagggcccagcagccgtgcagaccccgtccggattcgccttctctcccacctcaacagctacgcagccgagatggagccttcgcccacgcccactggccctttggccttccctgcctggccctggtctttcttccatagctgtccagggctgccagccctgagcaaccagctcgccatcctgggaagagtgcccagccctgtcctccccggtgtctcctctcctgcttaccccatcccagccctccgaaccgctccccttcgcagagccacaggcatcatcctgccagcccggaggaatgtgctgcccagtcgaggggcatcttccacccggagggcccgccccctagagaggccagcgacccctgtgcctgtcgcccccagcagcagggctgccaggagcagccacatcgctcccctcctgcagtcttcctccccaacaccccctggtcctacagggtcggctgcttacgtggctgttcccacccccaactcatcctccccagggccagctgggaggccagcgggagccatgctctaccactcctgggtctctgaaatcactgaaatcggggctttctgagctgccccttcaccaccccgccccaaggaataaggaaggttcttttaccaggagcccaaaaaagggcactgccttttctgctttgcttcatggactggctcatatgtgaaggcacgttctccagccatcagaggccccctcctcctccaacccatctctccttctcactgttatcccagcttatccacccagctctcctggagctgttctggtctcagaggcttggttccatttctcacctgaacagatgagtcctgggagagaccctcagagatccgcccagacccctctcctgccctctgcacaccagcagcaggcatgaaccttgggtctgggaaaaagctttaacctgcagggcaccaggacccaaggcaggctgttccttggggcggtcagaccccagtcaggagcaatgactgactggctgcagccttcccacgccaagaggctggaacatagtgtctgcctcgcttcctggagatagtaactgagcaggggctacaaagaggtctcctgggaaccctgtctgccccttcccacctgtccttgggccacaccatcacactgaaccacaggacagaccctttctccaccacagccaaggcctggagactgggggcccagcagagcctgctcccaccctcctcccagcagcagacacccaccctctcactgactaacaggtccctgcacacagctggcctggtaaacccagctgggaggtttctaggcagcagcaaaactctgtgacagggtgtcctcacaccaggccttggacagctctcccagacaggagccagggttgagcaatggagagcccagcccccacgtcttacagtcgccatcctccaggcgtgtggtccctccccattgggtgcacagtgcagaggggccgtggccccatgtgatggtgcgcagagaggaacctcttgggattcagcaccagacgtctgtgctgcctggtttgcatccggctcacagagcccagactgctggaacagccaaggactgtcaggctggacaaaaataactgcaaggaggggcaagagaaaggatgattcgaggcaccttggcccttcaaggtcatgcagtgggtcgagcgcctgagatcctgttcaccaggactccacagagctggctctgctcagaagccatttcattccccggctccaccctaggccactttttctaacagaggaaacaaatggtccagcagtcgttcccagcagaacagcggagcctggactgacacccagtgggaccagtgttgccacaccagttgataaaatgcagaaacccttctgtactcgttggtaaatatctactcccccaagtgactccaggtgccccccaccgcctggcacttcccccaggactcctacgatctggttactgcctggccgatccaaggctgtggagtcccagagccagcagttcactggtgctcattccacactggttagatacttcagttgtcacccctgggaagattctcccacctcctccctttgatggaaccaccctccccagaggctgcattgaggagactccacagactgaaaagtgagtttgcagaaaccttggggaaaagggccctttcaaagaagtggataagagggaggagatcattgagtgacccagaaagctcttttgaaaagacagactcctcaaggagagataaagaggaaagcacctctttcattttttagtgtgagctaattccatcagactgctgtcctcctggacccatctgagatgtgcagtagcaaggagaggggggatcattttagagagtgggtcattggcagggagtgctccggagggaggcagaggggagactgtggtagaaggaagacagaactcacacatgctcccaggattggggacagggacagaggaggtaacagaaggcaaaggccagtttccccgttatcatgaaggggcccactcaggacaggaacaaggacaactcctcctcctcctcctcctctcctgctgctcctgggataccaggtcagtgatgtagtcttgcagtttggcaacttcctagcctgagaatccctagtggggctgtgggaaacacatttccacgttgcaagcatgcaactccaaagaatctgtgatgccactgaaatgagatgggaatgatccagctctttcagcatcttggttgaacttgctttcattgtccctgggatattgtggaaggaaaggtgactgtgtgatctgattctgtggtcaaggacttgcatcttgtgtttctatccccaagccttcctggtgtctccaactcctaccccattgcatgggttgttgcggacatccaataaagatttttttagtgcttctggaaa

SEQ ID NO: 1817 - DNA, 4121 bp, Homo sapiens
  source 1..4121: mol_type = genomic DNA
agccaacaccgcctttctcagcatggagacctttgagcccatcagccaagagcccctcagccaagccagctatgacaaagccccagacccagttcctgagctccaagactcgttctatgcagaactgcaacgtgcagagagcctccaagagaagagcataaaagaggccaagaccaaatgcaggacaattgcatccctgctcactgcagcccccaacccccactccaaaggggtacttatgtttaagaaacggcggcagagagccaagaagtacaccctggtgagcttcggggctgctgctgggacaggcgctgaggaggaggacggcgttccccccacgagtgagtccgagctggacgaagaagccttctctgacgcccgcagcctcaccaatcaatctgactgggacagtccctatctggacatggagcttgccagggcgggctcaagagcatcagagggccagggctctgggctgggagggcagctgagtgaggtctctgggcgaggggtgcagctctttgaacagcagcgccagcgcgcagactccagcacccaggaactggcacgggtcgaaccagcagccatgctcaacggggaaggcctgcagtcaccacctcgggcccagagtgctcccccagaggcagctgtgctcccacccagccccttgccggcgcctgtagccagccccagacccttccaaccaggtggtggagccccgaccccagctccaagcatctttaaccggtcagccaggccctttaccccgggcctacaagggcagcggccaactaccacctcggttattttccggcctttagcccccaaaagggcgaacgacagcctggggggcctcagccccgccccaccccccttcttgtcttcgcaggggcccacccctctgcccagcttcacttcaggggttcccagccacgcgccagtctctggttcccccagcaccccacgctcctcgggccctgtgacagccaccagctccctgtacatcccagcccctagtcggcctgtcaccccaggtggagctccagagccccccgctcctcctagcgcagctgccatgacctccaccgcttctatcttcctatctgcgcctttgcgaccctctgcgcgcccagaggcgcctgccccaggcccaggggctcctgagccccccagcgctcgcgagcagcgcatctctgtgccagctgcccgcacgggtatcctgcaggaggcccggcgccgggggacccggaagcagatgttccggccgggaaaggaggagacgaagaactcgcccaaccccgagctgctatcgctggtacagaacctggatgaaaagcctcgggccgggggtgcagaatctggtcctgaagaagatgctctgagcctcggggctgaagcctgcaacttcatgcagccagtaggggccaggagttacaagaccctgcctcacgtgacacctaagaccccccctccaatggctcccaagaccccgccccctatgactcctaagactccacccccagtggctcctaagcccccatctcgagggctccttgatgggctcgtgaatggggcagcctcttcggctggaatccctgagccaccaaggctgcagggcaggggtggggagctgtttgctaagcggcagagccgtgcggacaggtatgtggtggaaggtacacctggtcctggtcttggccctcggcctagaagtccttctcctaccccgtctctgcccccttcctggaaatattcacccaacatccgtgccccgcctcctattgcttacaacccactgctctctccctttttcccccaggcggcccgaactctccctaaggcccaatcccaggggcctcgggcaacacccaagcagggcatcaaggctctagattttatgcggcatcagccctatcaacttaaaactgccatgttctgttttgatgaggttcccccgactcctggccctatcgcctcagggtcccccaaaactgcccgagtccaggagattcgccggttttccactccggcaccccagcccactgcagaacccctggctcccactgtgcttgccccccgagcagccactacactggatgagcccatctggagaacagaactggcctcagcccctgttcctagcccagcccctcctccagaggctcccaggggccttggggcttctcccagctcctgcggtttccaggtagccaggccccgattttcagccaccagaacaggattgcaagctcatgtgtggaggcctggggcagggcaccagtgaacaggcacaggtcccaggaccaaggagaggtggaacatccagttcctaaagttgcttctcctaccctatcccatcccctgtcacgcatctggaagctaaattgcctcctgccagagatggtttccaagttgatgtccccttcccccaccttcctcctcactctctacctccctgccgctttccaaccaagtatgtctgctttggtatctttgcctctctttgtctctgcatttcctttcctggatctctgtctttatttccaggcttctccacccatattcctccacagatctctcttccttgacatttgtgcttttctccctgggcctcattttaatgttcagtgagaagtaaacagagcagaagtgaccactgggacttcaggcaagaagctcaccaccaggcacacagcaaagggactgaactgacccctgtttgcactaagccacccccaccccccactctgctttcccaagcttgactggcatatacctaggcctgtgtgtgtgtgtgtgtgtgtgtgtgtgtgtgtgtgtgtgctcttccgtctaaggcatgaataagaggggaggtcaaaataaagacccaatctgaggccgggcacggtggctcacgccggtaatcccagcactttgggaggccgaggcgggcggatcacgaggtcaggagatcgagaccatcctggctaacacggtgaaaccccatttccactaaaaatacaaaaaattagctgggcgtggtggcgagcgcctgtagtcccagctactcgggaggctgaggcaggagaatggcatgaacctggaaggcggagcttgcagtgagctgagattgcgccactgcactccagcctgggcgacggagcgagactctgtctcaaaacaaacaaacaaacaaaagacccaatctgagtcttatcgttgtactgatagaagggtcagatatccccacatggagttgagtgggagaaagagattcactagagaataactccttagagaccaatgtctgtagcaggtgtacagcatcttgtgaaagttatggagcatgaaaagactgaagggccaggacagtttgcatgggctgagttataccagctagaccaggaatagaacaaagaattctatacctcaggatttcaaaaagttagcaacttgagaggccagtgctgagcaacccagtacccaggaaatgaaaaaaagaaagaaaattccctccgagaatgaacaaatcattggcttcattgcctcatgagcttgagagaaaggagaagagagccagagtgtggcaagtgaggccaaaatcagaagcatggcagaaatgagtgtaagtgattgagccacagacagaagtgtggcgagggacaatgccatattgggagaaggtaaagttgagtaacaagaaaccaaccgtgtgtgagagggggattggaaaaaaatttgagggagaagaatgttagaatggaagggaatgatggtggaagggaggtgtgagggtgtgtgctgagtgttgaaagaacggttggtgtctgtgtgattttccttgagtctgttcttcagtgtgtcttctgcagcttgccatgactgcctgggaaagagtagggaaatacccagagccaaaacctcctttcagtcccaccccatccctcaaaaccccagctattgcttcttttcagcttcaggtcctgatctccaatcttagtatggactcccttctcaccaagaccaccaccagctacgtttgctgtgtaatctggaaagtgataatttcctttgcttgttgggtgtgagtcacaatactttggtttgtgcacaagaataaatttatgccccataccttc

SEQ ID NO: 1818 - DNA, 1616 bp, Homo sapiens
  source 1..1616: mol_type = genomic DNA
gagagaggaagcttgaagccaatatggagtccgtcagttgctccgctgctgctgtcaggaccggagacatggagtcccagcgggacctgagcctggtgcctgagcggcttcagagacgcgaacaagaacggcagctggaagttgaaaggcggaaacaaaagcggcagaaccaggaggtagagaaggagaacagccactttttcgtcgccacctttgttcgggagcgagcggccgtggaagagcttctggagcgcgcggagtcggtcgagcggctggaggaggcggcctctcggctccaggggctgcagaaactaatcaacgactcagtttttttcctagccgcttacgacctgcggcagggacaagaggcgctggcgcggctgcaggcggccttggccgagcggcgccgggggctgcagcccaagaagcgtttcgctttcaagacccggggaaaggatgctgcttcgtctaccaaagtagacgcggctcctggcatccccccggcagttgaaagcatacaggactccccgctgcccaagaaggcggaaggagacctcggccccagctgggtctgcggtttctccaacctggagtcccaagtcttggagaagagagccagcgagttgcaccagcgcgacgttcttttgaccgaactgagcaactgcacggtcagactgtatggaaatcccaacaccctgcggctaaccaaggcccacagctgcaagctgctctgcggtccggtgtctacctctgttttcctggaggactgcagtgactgcgtgctggcagtggcctgccaacagctccgcatacacagtacgaaagacacccgcatcttcctgcaggtgaccagcagggccatcgtggaggactgcagtgggatccagttcgccccttacacctggagctacccggagatcgacaaggacttcgagagctctggtttagataggagcaaaaataactggaacgatgttgacgattttaactggctggcccgggatatggcctccccaaactggagtattcttcctgaagaggagcgaaatatccagtgggactaagcagttgtcactctgttcttcactcctaccaaatactttccacgttggactttcccccttattgggtctcgaagtttacttattgtcacactgtgtatgttttcagcattttaaggctagagattgtaatgggctcctacttgtaatttccattaaattcgtaacaggtataacactaaagcatttttgctattttcgtcatgcctttgagactgagtcttactccgtcccccagcgtggtggcgcgctgggattacaggcgcgcgccaccacgcgaacttgtatttttagtagagacggggtttcgccatgttgtccgggctgctctcgaactcctgacctcaggtgatccacccgcttcagcttcccaaagtgctggcattacaggcgtgagccaccacgccagggctttatttatttatttttaccacaatagtttgaagcagtaagggggaaggagggtgattatattgctttgtaatggtttgtgatacttgaaacatcacggtgcataataaagtaggtctgcagtaaatacatgggtttgtttgg

SEQ ID NO: 1819 - DNA, 2375 bp, Homo sapiens
  source 1..2375: mol_type = genomic DNA
acagggtctcactgtgtcacccaggctggagtgcagtagtgcaatctctgctcactgcagccttcacctcctgggttcaagtgattctcctgcctcagcctcccgagtagctgggattacaggtgtgtgccaccatgcccaactagtttttgtattttttagcagagacggggtttcctcatattggccaggctggtctcaaactcctgtacgcctgacctcaagtcaggcccacctcggcctcccagagtgctgggattacagaacatatgcagtaatgtcacctcaaaagagagttaagaacgtccaggcacaaaacaggacttcacaaggtagtagtagttttcagaccacgctttcagcctggaaagtaaaacaggatccaagcaactcgaagaacatctcaaaacatggacaaaacaatccagtgggagattatgaacatgctgatgatcaagctgaagaagatgctttgcaaatggcagtgggatattttgagaaaggtcccattaaagcttcacagaataaagataaaaccttggaaaaacacttgaaaactgtggaaaatgtggcttggaagaatgggttagcttcagaagaaattgatattctattaaatattgcactcagtggcaaatttggaaatgctgtaaacacacggatattgaagtgcatgatcccagcaacagtaatatcagaagattctgtggttaaggcagtctcctggctttgtgttggcaagtgttctggtagcaccaaggtacttttttatcgttggctggttgcaatgtttgacttcattgatcgtaaggagcaaattaacttgctctatggcttcttttttgcttcattgcaagatgatgcactgtgcccttatgtttgccatttgttatatttacttaccaaaaaagagaatgtcaaaccatttcgtgtgagaaaactgcttgatcttcaggccaaaatgggaatgcagcctcatctccaggctttgttgtcactgtataagttctttgctcctgctctgatttcagtatctttgcctgtaaggaagaagatatattttaagaattcagagaatctatggaagacggctctgcttgccgtgaagcaaagaaaccggggaccttctccagaacctctgaagttgatgttaggtccagctaatgttcgtcctctaaaaagaaagtggaattctctctcagttataccagtgctcaattccagtagctacactaaagaatgtggaaaaaaagagatgagtctttctgattgtctgaatagaagtggatcatttccactagaacaacttcaaagcttcccccaacttttacagaacatccattgcttagagctgccttctcagatgggctcagtgctaaacaactctctgctgcttcactacattaactgtgtcagagatgagccagtcttgctgaggttttattactggttgagtcaaacattacaagaagaatgtatttggtacaaggtgaataattatgaacatggaaaagaatttaccaacttcctggataccatcatcagggcagagtgcttcttacaagaggggttttattcctgtgaagcattcctgtataagagccttcctctctgggatggcctttgttgtcggtcacagttccttcagcttgtgagctggattccttttagtagcttctctgaggtgaaaccacttctttttgaccatctagcgcagctcttctttacatcaaccatttatttcaagtgtagtgtgcttcagagtctgaaagagctattgcagaattggctgttgtggctttctatggacattcacatgaaacctgttacaaacagtcctctgtgagttatctaacggtcttccacaagagacgatctgtatacaaatgtttgcatatgtttaatagtgtggcgtgaaacaatttttttcatgtaaatgcttagtagtacttttttggaagacttttttgtgacttttcactcttcttcccccacaatcctgaaaggaaggctaattctctaagttcctattgtgtaaatcagaaagcaacccttatctgctaaatgacttctttcaagagttaatataacaaaacactagagagatgagactagaatttgcaactttgacttccattcagtttaactcattttataaattatattcttatatttaaagccaattttcatgatggctagaaaaatctctaacgtaattttgcgtacaactttgtttttatgtttctgtgctgtattttggttatatgtgttaatttatcttaactttggagtttaaaataagagccctaaattgttaaatgtgtgctttaccttcaaagtaaaagtaaaagactaaatttcaaggaactgcataa

SEQ ID NO: 1820 - DNA, 3262 bp, Homo sapiens
  source 1..3262: mol_type = genomic DNA
acagggtctcactgtgtcacccaggctggagtgcagtagtgcaatctctgctcactgcagccttcacctcctgggttcaagtgattctcctgcctcagcctcccgagtagctgggattacaggtgtgtgccaccatgcccaactagtttttgtattttttagcagagacggggtttcctcatattggccaggctggtctcaaactcctgtacgcctgacctcaagtcaggcccacctcggcctcccagagtgctgggattacagaacatatgcagtaatgtcacctcaaaagagagttaagaacgtccaggcacaaaacaggacttcacaaggtagtagtagttttcagaccacgctttcagcctggaaagtaaaacaggatccaagcaactcgaagaacatctcaaaacatggacaaaacaatccagtgggagattatgaacatgctgatgatcaagctgaagaagatgctttgcaaatggcagtgggatattttgagaaaggtcccattaaagcttcacagaataaagataaaaccttggaaaaacacttgaaaactgtggaaaatgtggcttggaagaatgggttagcttcagaagaaattgatattctattaaatattgcactcagtggcaaatttggaaatgctgtaaacacacggatattgaagtgcatgatcccagcaacagtaatatcagaagattctgtggttaaggcagtctcctggctttgtgttggcaagtgttctggtagcaccaaggtacttttttatcgttggctggttgcaatgtttgacttcattgatcgtaaggagcaaattaacttgctctatggcttcttttttgcttcattgcaagatgatgcactgtgcccttatgtttgccatttgttatatttacttaccaaaaaagagaatgtcaaaccatttcgtgtgagaaaactgcttgatcttcaggccaaaatgggaatgcagcctcatctccaggctttgttgtcactgtataagttctttgctcctgctctgatttcagtatctttgcctgtaaggaagaagatatattttaagaattcagagaatctatggaagacggctctgcttgccgtgaagcaaagaaaccggggaccttctccagaacctctgaagttgatgttaggtccagctaatgttcgtcctctaaaaagaaagtggaattctctctcagttataccagtgctcaattccagtagctacactaaagaatgtggaaaaaaagagatgagtctttctgattgtctgaatagaagtggatcatttccactagaacaacttcaaagcttcccccaacttttacagaacatccattgcttagagctgccttctcagatgggctcagtgctaaacaactctctgctgcttcactacattaactgtgtcagagatgagccagtcttgctgaggttttattactggttgagtcaaacattacaagaagaatgtatttggtacaaggtgaataattatgaacatggaaaagaatttaccaacttcctggataccatcatcagggcagagtgcttcttacaagaggggttttattcctgtgaagcattcctgtataagagccttcctctctgggatggcctttgttgtcggtcacagttccttcagcttgtgagctggattccttttagtagcttctctgaggtgaaaccacttctttttgaccatctagcgcagctcttctttacatcaaccatttatttcaagtgtagtgtgcttcagagtctgaaagagctattgcagaattggctgttgtggctttctatggacattcacatgaaacctgttacaaacagtcctctagagacaactttgggtggatccatgaactctgtgtctaaactgatccactatgtagggtggctatccactactgcaatgcgcttggagagcaacaatactttcttgctgcactttattttggatttctatgagaaggtgtgtgacatatatataaattataaccttccattagtggtattgtttcctcctgggatcttctattctgcactcctcagcctggataccagcatcctgaaccagctgtgttttattatgcacagatatcgtaaaaatttgactgccgcaaagaaaaatgagttggtacaaaagacaaaatcagagttcaatttcagcagcaagacttatcaagaatttaatcactatttgacatcaatggttggttgcctgtggacgtccaaaccctttgggaaaggaatatatattgaccctgaaatcctagaaaaaactggagtggctgaatataaaaacagtttaaatgtagtccatcatccttctttcttgagttacgctgtttcctttttgctacaggaaagcccagaagaaaggacagtaaatgtgagctctattcggggaaagaaatggagctggtatttggactatttattttcacaggggttacaaggcttgaaactttttataagaagtagtgttcatcattcttccattcccagagcagagggcataaactgcaacaatcaatattaaatgaatgttgacataaactgaacacactggactaaactcactcctcattgctagagcaaagtggctcatcttgagttcccattttcatttcactgacagactgccatcctcaaggagtactcagactggccttctgttcatggcttaggagagccttggtgtgcctaactgatttttcaaaatttagatttttttagcctaccagtgaaaaatgaccccttcatcatcaggctctgcgttctaccaaattgtatgtaaaaagacacatctgttttgtggtaggattttttcacatttttgggtactatgagctgcattgatggaagacagcaggcaatatgtggtgacagttaactcacagacataaacatgcaaaatactttgctgtctctggggatattgccatttttcttactgtgagcaacagcaccaacaccaagttaacaggatgcaacatgtgtatgactctaaaagccctaagtagttggtaacttcctgggccttcaatcatagcaatttgatgagggaaggaaggggagaggatttgttgggtaatcaagacattcccgtatatgtctgatttcatggaactgctctattttgtttgtgtgtattgtatatgtatatgtgtatgtgtgcgtgtatgtgtgtgtctgtagcttcagtttttaagtgtaaggactaaataaactaactgaaattttactttcagaa

SEQ ID NO: 1821 - DNA, 6680 bp, Homo sapiens
  source 1..6680: mol_type = genomic DNA
acactacgccagaacaagatggccgacgcggcggccacagctggggccggtggctccggaacgagatcgggaagtaaacagtccactaaccctgccgataactatcatctggcccggaggagaaccctgcaggtggttgtgagctccttgctgacagaggcagggtttgagagtgccgagaaagcatccgtggaaacgctgacagagatgctgcagagctacatttcagaaattgggagaagtgccaagtcttactgtgagcacacagccaggacccagcccacactgtccgatatcgtggtcacacttgttgagatgggtttcaatgtggacactctccctgcttatgcaaaacggtctcagaggatggtcatcactgctcctccggtgaccaatcagccagtgacccccaaggccctcactgcagggcagaaccgaccccacccgccgcacatccccagccattttcctgagttccctgatccccacacctacatcaaaactccgacgtaccgtgagcccgtgtcagactaccaggtcctgcgggagaaggctgcatcccagaggcgcgatgtggagcgggcacttacccgtttcatggccaagacaggcgagactcagagtcttttcaaagatgacgtcagcacatttccattgattgctgccagacctttcaccatcccctacctgacagctcttcttccgtctgaactggagatgcaacaaatggaagagacagattcctcggagcaggatgaacagacagacacagagaaccttgctcttcatatcagcatggaggattctggagccgagaaggagaacacctctgtcctgcagcagaacccctccttgtcgggtagccggaatggggaggagaacatcatcgataacccttatctgcggccggtgaagaagcccaagatccgcaggaagaagtccctctcctgagctgagaaggaaacctggcttgtacaggggcgcagattccaccctcccggggagttaaagccactcaagggaagaagagggtgacctcctcatggccaagccgaggctgcagggtgtgatcggacatgattttcatggcaaaccgtcttattaagatgacctattttcactggatgtttgggttgaggaagatatgaacagaataatgagaatttttttttttattttgagatggagtcttactctatcacccaggctggaatgcagtggtgtgatctcagctcactgcagtctcagcaaccctgggtccaagtgattctcctgccttggcctcccgagtagctgggactagaggcaagcgccaccatgctggctaatttttgtattttgagtagagatagggtttcgccatgttggccaggctggtcttgaactcctgacctcaagtgatccacccgcattggcctcccaaagagttgcgattacaggtgtgagccaccacgcccagctaatttttgtatttttaatagagataaggtttcgccatgttggccaggctggtcttgaactcctgacctcaagtgataacccgcctcggcctcccaaagtgctgagattacaggcgtgagccaccgcaccccaccagagactttcttaatcaatcaggctatgtggtggggcatagcagcagccagtgacttcgttcattatcacaggatttgattcctttgaaactcaagagaccagggaaagtgacaggaaggaaagggctctttgctgctgtgcttattacaaggaagactgtttgtccagcgtgtatttcaggatatctggatcccttttattgactcacaatttgtggcaccactttctcatcccagaacttcattcttatttctctcctcatctggcctcccaagtgctccgttgagctgatgaaaagttctttgtactccctcaacgtgtcggaaacaggaggccacacagcacagctttgtttggggtgggcaggagtcaggagtcttgagcagatgcatcactgtgaagaagaacgacatgtcggggctgcacctgtcctcccgtcggcatttgacgaaagctccctgaagcggggcagcactctcctcctgagagatttaccatttattgcccctgtgaggaatgtgtgcttgggaactgccaagtcttaccccttctggaagaagaggttttctctgacaagagcctagagcgtcggctctattatgctgggacttgacagaggagccatggggtttaaacagtaggaaagaggggctacgcgcagtggctcacgcctgtaatcccagcacttcgggaggcgaaggcaggtggatcacttgaggtcaggagttcgagaccagcctggccaacatagtgaaaccccgtctctactaaaaatacaaaaattagccgggtgtggttactcatgcctgtaatcccagctactcgggaggctgaggcaggagaatcacttgaacctgggaggcggaggttgcagtgagccgagatcgtgccactgcactccagcctgggtgacagagcgagactccatttcaaaaaaataaaaaaaggataaagtaaacaataggaaaggatttggtggggtgagggtggggtgttgagggctgggcctcatcttgtattctgaaagctgagaaacggctggtcagctggaaggctggtggatgggcaggagtgagccaagctgaggcgttctgcaagaagcaggtctgagtctgtccaaccaatttgtatcctgtggggagaacaacttcattcttaacataccctacaaaccagaaaacaagtttttaaggaagatgctgggcatgctgatagcttttctggtctcctaaggaagagtttttaaaactaaatccaaggaagaaaaatgtaacaacacgtggaagtgaacactggatgaataagcttgtttcccaaattagaatcctaacgtccatatttagcttcatgtattcccctttggcttccacagttcaactccttttattttgagacagggtctcgctgtgtcgccccagctggagtatagtggcactacctcggctcactgcaacctccactccccgggttcaagcaattctcagagtagctgggattacagatgcccgccaccacatctggctaattttttttttttttttttagtagacacgggattttgctatgttgcccaggctggtcttgaactcctggcctcaagtgatccacccgccttggccttccaaagtgttgagattacaggcgtgagccacggtgcccagcccatctcttagtcttccattcccttggtgaatttggaaacttgaaaaacttggggacttgacagcaggctccatgttcttctggcctcactgtactgtgtaaggaaagagctgcttgtcaggaacggaagaggggacgctagtaaaaaaaaaaaaattggattccccaactggactaaataggagtttttcaggtttgtagtaacgtgaaactctcctagatcgaagcagttagactggcctatgtggccttctcagggtttgtgattcagttcttagcgattcttggcctgataagtttatgaacacagccccacattcaagccgtggccaatcccagctgttctcactgctcttgggaggtgttgtcccagtcagtgtttctgcagcttccatttgttgttgttatccagtgtaagcacctgttgaatgcagatgtgctgagttagaggtgggatttggaaaagggctgctatttctgctgttgagatttcagaggctatactctttttttttcttttcttttttttttttttttgagacggcatctcactcttatcgcccaggctggagtgcaatggcgtgatctcggctcactgcaacctccacctcctgggttcaagggattctcctgcctcagcctcctgagtagctgggattacaggcacctaccacaattctcggctaattttttttgtatttttggtagagacggggtttcaccaggttggccagggtggtctcgaacacctgacctcagatgatccacccacctcggcctcccagtgtgggtgggattacaggcatgagccaccgcgcctggcctcagaggctatactcttataattttgttctgaggggagacagggaaagggttagacaacttgaaacattgaccctgtataaaaatgcaaaattctcaatgtgtatttataaatttctattttttataactttatgggacttcttagaggccaaaagtagtaaacatgcagattaaaaatgtttatgaaaatctcaataaaaattcataataaaaactttgtaaataaatagaactgtaagctttgaacttaatttgtgttcaaaagttaacagcaatgtggacaaataagtcaggcttagcccttgtgttggcctaagcacacctgggaacttagtaaaacttttattttggaaattttcaaatacaaaattagagagcaaaatatatgaacccctgtatatgcctcatcaagcttccacacttgtcagtagcttgttgattctgtttcatctgtttctcccactttttgtcctttattttctttcctcctggagtgtgtgtgtgtgtgtgtgtgcgtgtgtgtgcgtgtgagacagagtttcgcgctggagtgcaatggtgcaatcttggcccactgcaacttctgcctcccgggttcaaatgattctactgcctcagcttcctgagtagctgggattataggtatctaccaccaccaccacgcctggctaattttttcttttttttttggagacggagtctcgctctgtcgcccaggctggattgcagtggattgtcaagattgcagtggtgcaatctcagctcaccgcaagctccgccacccaggttcacgccattctcctgcctcagcctcccaagtagctgggactacaggtgcctgctaccacgcccagctaattttttgtatttttcagtagagatggagtttcactgcattagccaggatggtctcgatctcctgacctcatgatccgcccgcctcggcctcccaaagtgctgggattacaggcatgagccaccgcacctggcctaatttttttgtaggtttagtagagatggggtttcaccatgttggccagactggtctccaactcctgacctcaggtgatcacctgcctcagcctcctaaagtgctgaggttacaggcgtgagcccccgcgcctggctcttctggagtatttttaaatgcaaactccagacctgtgtcatttaatctaaatgtgtctatacgtatctctgattgatctttctttaaattttaattttggaataattatagattcacaagatgttgcaaaaaatgttgagagagatcctatgtacccatcacccactttctcccagtggtagcatcttgcataactgtggtgcaatatcaaaacccttgcattcagtttcagtgtacaatgtagatggtatattagtacaatgcatagagcttatttagttttcaccatgtgcacgtgtgtgttatgtgtgtgttgttccgtgcagtttcatcgtgtagatttgtgtaaccaccagcacacaaatggtgaagacacagaaccattgcatcagtacagttctccctcatgctgtctctttgcaatcacatccacctctctgctcttccacttctctcctggcagccactactctgttctctatctctaatgttattgaaagaatgttataaattgaatcataaagtatgtgacttttttctttttgagacagagtcttgctctatcgcctaggctggatggagtgcagtggagcgatcccagctcactgcaactcctccacctcccgggttcaagagattctcctgcctcagcctcccaagtagctgggattacaggcatgtgccaccacacccagctaacttttgtatttttagtagagatggggtttcaccatgttggccaggttggtctccaactcctgacctcaagtgatccgcccacctcagcctcccaaagtgctaggattataggtatgacccaccgcacctggccgagtatgggactttttgacgttggctttttcagttctgcataattctcttgaggtccatctaggtggttgtgtgtatcagtagttcctttctttttattgctgagtagcatggaggcaccatagtttaacacagtttctttaaccattcacgcattgagacaaaaaaagttcttaattctgcgaacatcaacttcctgtgcccaggtgcaagtgcgggggcagctggcccagggtagagctttaccatggaccctggcgctcctggaaaaaaattcaaggtatttttcctcctcttggagcgtgtggcctacctcatctccatttgattactagcttttctttttctcctttgttaaacagttatttaattttgaagagataatatatgtatacagtataaaatttaaaagacagaaaaagatataagtgataacaaaatatcttcctcctcccctgtttcccagaggctcagacctcatccctggcagctgctattatgttactgtcaatatgaccttatgtattcttccagaagtattctgtgcatcaaatgcaaatacttatattttctacttctcagtgtattttttggtgatgttccatgtcagtaataaagagcttctctgtttcgtggc

SEQ ID NO: 1822 - DNA, 3069 bp, Homo sapiens
  source 1..3069: mol_type = genomic DNA
caaggtttcggggactgagtgggtttcagactttctctcaggatttccgctggcttcaggttccggtcaggcgtcgggacagagcctgatccaggcttcggcggccggtggcagctctcgatcagctctcgcagtcggagaggcggctaaggaaaggtgccacagcagagacgcgaaggagaggccctagaaccttttcaaagaagaatggaagaaaccatgaagcttgctacgatggaagacacagtggagtactgcctgttcctgataccagatgagtcaagggactcagataaacataaagagattcttcagaagtacattgagagaataatcactcggtttgcacctatgctggtcccctacatctggcagaatcagcctttcaatcttaaatataaacctgggaaaggaggtgttcctgctcatatgtttggcgtgacaaagtttggggataacattgaggatgaatggtttattgtttatgtaataaagcagatcacaaaggaatttccagagttagtagcaaggattgaagacaatgatggtgaattcttgttaatagaagctgctgactttctccctaaatggctggatcctgaaaatagcaccaatagggtatttttctgccatggggaattgtgtattatccctgcaccaagaaaatctggagcagaatcttggttacccaccacacccccaacaattccacaagcattgaatataatcacagcacattcagaaaaaatacttgcttcagaatctatacgagctgctgtgaataggcgcatcagagggtacccagaaaaaattcaggcctcacttcatcgagcacactgcttccttccagctggcattgtggcagtgctaaagcagcgccccagattggtggctgcagcagtccaggcattttacctacgagaccctattgacctgcgagcttgtcgtgttttcaagacattcttgcctgaaacacgaataatgacatcggtcacattcactaaatgtctatatgcacaattggtgcaacaaaggtttgtgccagaccggcggagtggatacaggctgcctcctccatctgatccccagtaccgagcccatgaattgggcatgaaattggctcatggatttgagatcttatgctccaaatgtagcccacatttttctgactgcaagaaatcccttgtgactgcctcaccactctgggccagtttccttgaaagtctgaaaaagaatgattactttaagggactgatagaaggttctgctcagtaccgggaaaggctagaaatggcagagaattacttccagctctcagtagactggccagaaagttctcttgctatgagccctggtgaagaaatcttaaccttattacagacaataccatttgatatagaagaccttaagaaagaagcagctaatcttcccccagaggatgatgaccagtggttagatctctcaccagatcagctggaccagctgctgcaggaagctgttggcaaaaaagaatccgagtctgtttccaaggaggagaaggagcagaactatgacttaactgaagtctcagagagcatgaaagctttcatatccaaagtctcaacccacaagggagcagagctgcctcgagaaccttctgaggctccaatcacttttgatgcagattcttttcttaattattttgataagattttagggccaaggcctaatgagtcagattctgatgatctggatgatgaagactttgaatgtttagatagtgatgatgacttggactttgaaacacacgaacctggcgaagaggcttccctgaaaggaacacttgataatctcaagtcatacatggcccagatggaccaggaactagcacacacctgcatcagcaaaagtttcaccactaggaaccaagtggaacctgtatcccagactaccgataacaattcagatgaggaagattctggtacgggagaatctgttatggcaccagtagatgtagacctgaacctggtttcaaatatattggaatcctatagctcccaagctggactggcaggacctgcttccaatcttttacaaagcatgggagtgcagctgcctgacaacaccgatcacagaccaacaagtaagccaacaaaaaattaaccagcacatttagcttctcttttttctttttaaataaatattgaatatgattctgttcatttctagtttagattactcatttagtaaaaatgtttcttcattacaagttttacagattgacttctccatgagccccaaatgtggccctcttggcacaagtctttgtgatctcagctgtgggttatacacaggttttgaactcggcagggtagaatctagcccctagacaaccttgagatgaaattcacacacttcatgctaaagacataccctaccacaatatacccttggagtaattctaaatatttaaatttctcccttactgctattcatcctcagatcaaaatttcaagttgacaaatttggatttgaaaactcattcactttttcaatttttttaatgaggcataacatgcatatggttaagtgcacaaatcttaagtgtacagtcagtgaatttttgcatgtatgtatgtacctgaagcaagatatagaacttatttacttgtaaataacagctatattgatatgtcacataccaaaaaatttaccctttaaattatacaattcagtggtttttagtatatttacaaaattgtgcaaccatccctaccatctaattctagaatattagaaaccccatactcactaatagtctctcattcccttctactcccagcccctagaaaccactagtctactttctgtctctatggatttgcctattttggatatttcatacctgatactgtacttaattgttttaattaattaattggtttgatatttaatataactgatatatcttttgctaagatgaaatgtttatttcttaaaatgatgctcatattcctcctaaaataaatcaagtattatctatatatcataaaattcaccattaaaagcaaaaaaaaagtcttctttaca

SEQ ID NO: 1823 - DNA, 2445 bp, Homo sapiens
  source 1..2445: mol_type = genomic DNA
gaagaggcagaaaaacaagagataacaaaggctccgtttcctttctgtgagagaaggcttttgtctttcctcctgctacgatgtcagtgtctggcaagaaagagtttgatgtgaaacagatcctaaggctacgctggaggtggtttagtcatccttttcaaggttccaccaacactggaagctgtcttcagcaggaaggatatgagcatagagggaccccggttcagggcaggttgaagagccactctcgggacagaaacggactgaagaaaagcaacagtcctgtccaccacaatatactggcaccagtgccaggaccggcccctgcccatcagagagccgttcagaatttgcagcaacataatctgatagtacattttcaagcaaatgaagatactcctaaatcagttccagagaagaatttattcaaagaagcttgtgagaaacgcgcacaagatttggagatgatggctgatgacaatatagaagattctacagcaagattagatacacaacactctgaagacatgaatgccaccagatctgaagagcagttccatgttataaaccacgcagagcaaactcttcgtaaaatggagaactacttgaaagagaaacaactatgtgatgtgctactgattgcaggacacctccgcatcccagcccataggttggttctcagcgcagtgtctgattattttgctgcaatgtttactaatgatgtgcttgaagccaaacaagaagaggtcaggatggaaggagtagatccaaatgcactaaattccttggtgcagtatgcttacacaggagtcctgcaattgaaagaagataccattgaaagtttgctggctgcagcttgtcttctgcagctgactcaggtcattgatgtttgctccaattttctcataaagcagctccatccttcaaactgcttagggattcgatcatttggagatgcccaaggctgtacagaacttctgaacgtggcacacaaatacactatggaacacttcattgaggtaataaaaaaccaagaattcctcctgcttccagctaatgaaatttcaaaacttctgtgcagtgatgacattaatgtgcctgatgaagagaccatttttcatgctctaatgcagtgggtggggcatgatgtgcagaataggcaaggagaactggggatgctgctttcttacatcagactgccattactcccaccacagttactggcagatcttgaaaccagttccatgtttactggtgatcttgagtgtcagaagctcctgatggaagctatgaagtatcatcttttgcctgagagaagatccatgatgcaaagccctcggacaaagcctagaaaatcaactgtgggggcactttatgctgtaggaggcatggatgctatgaaaggtactactactattgaaaaatatgacctcaggaccaacagttggctacatattggcaccatgaatggccgtaggcttcaatttggagtcgcagttattgataataagctctatgtcgtgggaggaagagacggtttaaaaactttgaatacagtggaatgttttaatccagttggcaaaatctggactgtgatgcctcccatgtcaacacatcggcacggcttaggtgtagccactcttgaaggaccaatgtatgctgtaggtggtcatgatggatggagctatctaaatactgtagaaagatgggaccctgagggacgacagtggaattacgtagccagtatgtcaactcctagaagcacagttggtgttgttgcattaaacaacaaattatatgctattggtggacgtgatggaagttcctgcctcaaatcaatggaatactttgacccacacactaacaagtggagtttgtgtgctccaatgtccaaaagacgtggaggtgtgggagttgccacatacaatggattcttatatgttgtaggggggcatgatgcccctgcttccaaccattgctccaggctttctgactgtgtggaacggtatgatccaaaaggtgattcatggtcaactgtggcacctctgagtgttcctcgagatgctgttgctgtgtgccctcttggagacaaactctacgtggttggaggatatgacggacatacttatttgaacacagttgagtcatatgatgcacagagaaatgaatggaaagagagcatgcaagaacttctacaaaacttctataccacacagaagctgaaagagactctggggcactaaattcagatcctttctccacacagcaatgacatttatcaatctgactcaggtgtggctgttgcccctttttgatatggagggaacactgaaagacagtttccttctggagttccaaatgcaatatagaaaaaaaaaccctgtgactctggattttattttaagttctctaacaagactcctaccttgagatcttagtctaggt

SEQ ID NO: 1824 - DNA, 5818 bp, Homo sapiens
  source 1..5818: mol_type = genomic DNA
agtgggggaggggagagaaagcaagaaagactgctctcggcacttgtgcttttgttagttctacagaagaggcagaaaaacaagagataacaaaggctccgtttcctttctgtgagagaaggcttttgtctttcctcctgctacgatgtcagtgtctggcaagaaagagtttgatgtgaaacagatcctaaggctacgctggaggtggtttagtcatccttttcaaggttccaccaacactggaagctgtcttcagcaggaaggatatgagcatagagggaccccggttcagggcaggttgaagagccactctcgggacagaaacggactgaagaaaagcaacagtcctgtccaccacaatatactggcaccagtgccaggaccggcccctgcccatcagagagccgttcagaatttgcagcaacataatctgatagtacattttcaagcaaatgaagatactcctaaatcagttccagagaagaatttattcaaagaagcttgtgagaaacgcgcacaagatttggagatgatggctgatgacaatatagaagattctacagcaagattagatacacaacactctgaagacatgaatgccaccagatctgaagagcagttccatgttataaaccacgcagagcaaactcttcgtaaaatggagaactacttgaaagagaaacaactatgtgatgtgctactgattgcaggacacctccgcatcccagcccataggttggttctcagcgcagtgtctgattattttgctgcaatgtttactaatgatgtgcttgaagccaaacaagaagaggtcaggatggaaggagtagatccaaatgcactaaattccttggtgcagtatgcttacacaggagtcctgcaattgaaagaagataccattgaaagtttgctggctgcagcttgtcttctgcagctgactcaggtcattgatgtttgctccaattttctcataaagcagctccatccttcaaactgcttagggattcgatcatttggagatgcccaaggctgtacagaacttctgaacgtggcacacaaatacactatggaacacttcattgaggtaataaaaaaccaagaattcctcctgcttccagctaatgaaatttcaaaacttctgtgcagtgatgacattaatgtgcctgatgaagagaccatttttcatgctctaatgcagtgggtggggcatgatgtgcagaataggcaaggagaactggggatgctgctttcttacatcagactgccattactcccaccacagttactggcagatcttgaaaccagttccatgtttactggtgatcttgagtgtcagaagctcctgatggaagctatgaagtatcatcttttgcctgagagaagatccatgatgcaaagccctcggacaaagcctagaaaatcaactgtgggggcactttatgctgtaggaggcatggatgctatgaaaggtactactactattgaaaaatatgacctcaggaccaacagttggctacatattggcaccatgaatggccgtaggcttcaatttggagtcgcagttattgataataagctctatgtcgtgggaggaagagacggtttaaaaactttgaatacagtggaatgttttaatccagttggcaaaatctggactgtgatgcctcccatgtcaacacatcggcacggcttaggtgtagccactcttgaaggaccaatgtatgctgtaggtggtcatgatggatggagctatctaaatactgtagaaagatgggaccctgagggacgacagtggaattacgtagccagtatgtcaactcctagaagcacagttggtgttgttgcattaaacaacaaattatatgctattggtggacgtgatggaagttcctgcctcaaatcaatggaatactttgacccacacactaacaagtggagtttgtgtgctccaatgtccaaaagacgtggaggtgtgggagttgccacatacaatggattcttatatgttgtaggggggcatgatgcccctgcttccaaccattgctccaggctttctgactgtgtggaacggtatgatccaaaaggtgattcatggtcaactgtggcacctctgagtgttcctcgagatgctgttgctgtgtgccctcttggagacaaactctacgtggttggaggatatgacggacatacttatttgaacacagttgagtcatatgatgcacagagaaatgaatggaaagaggaagttcctgttaacattggaagagctggtgcatgtgttgtagtggtgaagctaccctaaagctatctatctttatcaaatggaatgaaactagataatttcaagaaactgagtaggacaaagggagaaagaaatacatgttctttttcctgcaattaataatcagactggaaaattgttgtatcattttaatttgtagttacaattgctttcattcgtgaagccgaaacgtttttaaacatgaattacatatgaattattaagcatatgtgctttcgcagctgataatataaaaggaaatcccacagtctagatatagccccattactacaaaatgctaaaatatttaatgaaaattgatggtggccacagtgtgcaggttataaaagcattaatacatttcaaggtaagagccttaaaagttaaaaacattttcagtttttttttaaaaaacgtactcttattatctggaacatagaaatataaaaggtaacatctaaagcttagaatagtgtgatttttagtaagccattattctcctattcaaataatatcccaaagagctaaacaattccttacatttaccaagaggaaagcttttactgtgttgaagctaaaaaaataatggctctttgacaaaacttgttatgttgatcgcggtatgtcaaaatttttacaggtttgctcatctgccagagcacacatataaatttggtatttcttaacatattatcttgttagatttgttaccagtaaaatattactgtaatttcatatacacagtctatacaatgaaataatgaatatttatcatattgatacaaactgtgacctcagcttcagagtgtcagggcctcacttgtatagaatgtaatgttctcctcaaacatttatgttaactctataaacaaatatcgttaagttaaacaagttttcaaaaacaaaacaatttttaaagtaccttaaaattgaggatgttactcagtgttaacacatgggaacaccaaaatattcaataagcctggtcaattctatagttatcttttttgtaccaacacatgcttttctgttactgttatattatccagtagaaaatgttaggatatgtgtgctatataaaaaaaaaaaaagacttgttaagttttaaaataacaaaaatggctagttgaatagtattttatgtgtaattcttccatttattctgtttaattatacaactaagatgaaatattgaaaaaccctttgtgaaagtaacttttcaagtaaatgcacaactttagaatttctacaaataagttcttttaaacagtctttttattgtggattgtgaaatcaaaatctggagaaatgcttataaaatatactactagcttttaagttttaagaaagaagaacgtaagttgtacaaagatatttgtactttgacaaactgaatttaaataaactttatttcctctcactatagtgtggctttagaatatatcaagtacaacctgaatggactttttgattttacatttcctatatcactaaaatacttaaacacaaaaataaaattccactcctttatttcttcttacacctgccattgtctctaattctaaagagagagctatagatttctgcagttctagaggtgaagatagagacatagagaggctgtgaaacacacatacagccctgttaggtcttttgaattcacaccttattgaaatcagtgtagaagtagagttacctaaacctttatcgccaatgcacagcttggcctgttaagttaaatgtgggtgtcaaccagtggaaaagatcaaaggaccttttgcagcctagcttgccaatcttccagtaacaacgaggtgctaccaataggcagactgtgtctagagtcatgcatggacaagaggaaagtgaaagttgaatactctcttctcaatggcatagctggacttgattaagtattgactcatagaagagacatgtatgtttcccggggctaccccttcatagctgcatttaaaaatggtgttcaggccactatggctgctgtggtttgaatatttttttccctcgaaaactcatgttgaaacttaactcctaatgtagcagtactgagaggcagggcccttaagaggtgattgggccatgaggtctgtgccctcctgaatggattaatccattcatggattaatggattattatgagtgggggactggtgactttatatgaaaaggaaggaagagtgacctaagctagcatgctcagggtgcaccgtatgtcccctggtcatgtgatgctatgtgttaccttgggacttacctgacagctcttaccaacaagaaggccatcccagatatggcctctcaacctcagacttctcagcctgcctaactgtaagaaattaattctttttctttataaattacccaggttctgttttaagcctcagaaaatgaactaagacaatgccctagatgagctgccaaaatctgagcagatatgagccatcagaatagagacctgcagaggcccagggcactcaaacataactgtgcttgtctcagtcaaacttaattgggaaaaggaggagtaagagcaggccctttctgacatgctttagcagagataacttatcagggctagtttaaacaaatgtgtataggaaaggatgttatttatatattcttacaagagtgtaagggctcacacatttactgtactcagatctgaaagacaatgttgcttcttgatttttttctataatcactatgaccgtgttcacgattccctactctgcaactctcagcatgcatcatgatgattctctaacactgtctgtcaccttcctgtatttccacagagcatgcaagaacttctacaaaacttctataccacacagaagctgaaagagactctggggcactaaattcagatcctttctccacacagcaatgacatttatcaatctgactcaggtgtggctgttgcccctttttgatatggagggaacactgaaagacagtttccttctggagttccaaatgcaatatagaaaaaaaaaccctgtgactctggattttattttaagttctctaacaagactcctaccttgagatcttagtctaggtaaagaaaaaaaaaaaaaggtcatgaaacacaaatgtcctcaactgtcatcattctatgtttactttctcccaatcacatcacctgaggtagaagagatttttcagttgctatttctcttcgtaatgaattttctttacatcctgtccacactgctggagatactaagtcccaacctaaatgatggaaggagcatctcccctcttgtctgtggaagatatcacatgaactacctaattttcaagcatggatctccatatttcaaaggaaagttttaaaaatgtttttaaaacttcaaatatctcaccacagtgaattatgggtaaggtgataatatgtttaattagcttgatttaatcatcccacactgtatacatatgccaaaatatcattttgtatgccataatatatatgatttatgaattatagtaatattaataaaagtgttaaagcttt

SEQ ID NO: 1825 - DNA, 1797 bp, Homo sapiens
  source 1..1797: mol_type = genomic DNA
atgtatgatgatgccactgcactccagcctgggggtcagccagattctgtcttaaaaacaacaacaacaacaacaacaaaacctgctgaatgaatggacctgtcagccccaaatccaaggccaggccatcctctccctccacatcctggcacaggcctgcctccccctgccccagcccagggccaggccacactctgcctccaaagccaccgtccccccgaggcaccactgcatcccccaaggggcgggttcggaggaaggaggaggcaaaggagagccccagcgccgcagggcccgaggacaagagccagagcaagcgcagggccagtaacgagaaggagtcagcagccccagcctcaccggcaccttcgccggcgccctcgcccaccccagccccgccccagaaggagcagccccccgcggagacccctacagcccctgctcccccggtgacccctagcaaaccaatggccggcaccacagaccgagaagaagccactcggctcttggctgagaagcggcgccaggcccgggagcagcgggagcgcgaggagcaggagcggaggctgcaggcagaaagggacaagcgaatgcgagaggagcagctggcacgggaggccgaggcccgggcggagcgggaggcggaggcccggaggcgggaggagcaggaggcacgagagaaggcgcaggccgagcaggaggagcaggagcggctgcagaagcagaaagaggaggccgaagctcggtcgcgggaagaggcggagcggcagcgtctggagcgggaaaagcacttccagcagcaggagcaagagcggcaagagcgcagaaagcgtctggaggagatcatgaagaggactcggaagtcagaagtttctgaaaccaagaagcaggacagcaaggaggccaacgccaacggttccagcccagagcctgtgaaagctgtggaggctcggtccccagggctgcagaaggaggctgtgcagaaagaggagcccatcccacaggagcctcagtggagtctcccaagcaaggagttgccagcgtccctggtgaatggcctgcagcctctcccagcacaccaggagaatggcttctccaccaacggaccctctggggacaagagtctgagccgaacaccagagacactcctgccctttgcagaggcagaagccttcctcaagaaagctgtggtgcagtccccgcaggtcacagaagtcctttaagagggtttgccttggatccgggcacagttgtgagggctcctctgcatcacctaccaggatgtctggaggagaaaaagacagaacaaagatggaagtggcctgggcccctgggggtgggtcctctctgttgtttttaatctgcaccttatagactgatgtctctttggccggagccagatctgcccctcagtgcattcgtgtgctcgcacgcgcagacatcccttctcccccatacacacatatacactcacagcctctctggcctcttcccttggggaggggccacctgtagtatttgccttgatttggtggggtacagtggatgtgaatactgtaaatagcttgtgctcagactcctctgcgtggagagggtgggtgcaggaggcagaccctccccccaaagccccctggggagatcttcctctctctatttaactgtaactgagggggatcccaggtctggggatgggggacaccttgggccacaggatactggttgcttcaggggtacccatgccccctgccctcgcctggaatcagtgttactgcatctgattaaatgtctccagaaata

SEQ ID NO: 1826 - DNA, 3238 bp, Homo sapiens
  source 1..3238: mol_type = genomic DNA
gaacgggttcgcgaccgcagccgagagaccccgggcgaccggcacctccgagactcgcgggccacctgcctcgaccttccccggagcgcccccgcctccgagtcgctacttgccgggccgggccgggccgggcgtgatgcgccgcgggacccctgtcctggccactggccgccgccgccgccgccgctgagaccccgagacccccagtgacgccgcagccatggagagcggcccgcgtgcggagctgggggcgggcgcacccccagctgtggtcgccaggacccccccagagccaagaccttctccagaaggtgacccttcccccccaccaccaccaatgtcagccctggtccccgacactcccccggacacccctcctgccatgaagaatgccactagctctaagcagctcccactggaaccagagagcccctcagggcaggtcgggcctaggccagcccccccgcaggaagagtccccttcctctgaagcaaagagcagaggacccaccccaccagccatgggcccacgggatgccagacctcctcgaaggagcagccagccatctccaacagcagtgccagcctccgacagccctcccaccaagcaagaggtgaagaaggcaggagagagacacaagctggcaaaggagcggcgagaagagcgggccaagtacctggcggccaagaaggcagtgtggctggagaaggaggagaaggccaaggcgctgcgggagaagcagctccaggagcgccggcgccggctggaggagcaacgtcttaaagccgagcaacgccgtgcagccctggaggaacggcagcggcagaagctcgagaaaaacaaggagcgctatgaagcagccatccaacggtcagtgaagaagacgtgggccgaaatccggcagcagcgctggtcctgggcaggggccctgcaccacagctctccaggacataagaccagtgggagcaggtgctccgtgtcggcagttaacctgcccaaacacgtggactctataatcaacaagcggctctcaaagtcctctgccacgctctggaactcccccagtagaaatcgcagcctgcagctgagcgcatgggagagcagcatcgtggatcgtctgatgacgcccactctctccttccttgctcggagtcgcagcgcggtcacactgccccgcaacggccgggaccaggccgtgccggtgtgcccgcgctcggcctccgccagccccctgacgccgtgcagcgtcacccgaagcgtgcaccgctgcgcccccgccggtgagcgcggggagcgccgcaagcccaacgccgggggcagccccgctccggtgcgccgccggccggaggcctcgccggtgcagaaaaaggagaagaaggacaaggagcgggaaaacgagaaggagaagagtgccctagcccgggagcgcagcctcaagaagcgccagtcgctgcccgcctccccacgtgcccgcctctctgccagcaccgcctctgagctcagccccaaatccaaggccaggccatcctctccctccacatcctggcacaggcctgcctccccctgccccagcccagggccaggccacactctgcctccaaagccaccgtccccccgaggcaccactgcatcccccaaggggcgggttcggaggaaggaggaggcaaaggagagccccagcgccgcagggcccgaggacaagagccagagcaagcgcagggccagtaacgagaaggagtcagcagccccagcctcaccggcaccttcgccggcgccctcgcccaccccagccccgccccagaaggagcagccccccgcggagacccctacagacgctgctgtcttgacctcacccccagcccctgctcccccggtgacccctagcaaaccaatggccggcaccacagaccgagaagaagccactcggctcttggctgagaagcggcgccaggcccgggagcagcgggagcgcgaggagcaggagcggaggctgcaggcagaaagggacaagcgaatgcgagaggagcagctggcacgggaggccgaggcccgggcggagcgggaggcggaggcccggaggcgggaggagcaggaggcacgagagaaggcgcaggccgagcaggaggagcaggagcggctgcagaagcagaaagaggaggccgaagctcggtcgcgggaagaggcggagcggcagcgtctggagcgggaaaagcacttccagcagcaggagcaagagcggcaagagcgcagaaagcgtctggaggagatcatgaagaggactcggaagtcagaagtttctgaaaccaagaagcaggacagcaaggaggccaacgccaacggttccagcccagagcctgtgaaagctgtggaggctcggtccccagggctgcagaaggaggctgtgcagaaagaggagcccatcccacaggagcctcagtggagtctcccaagcaaggagttgccagcgtccctggtgaatggcctgcagcctctcccagcacaccaggagaatggcttctccaccaacggaccctctggggacaagagtctgagccgaacaccagagacactcctgccctttgcagaggcagaagccttcctcaagaaagctgtggtgcagtccccgcaggtcacagaagtcctttaagagggtttgccttggatccgggcacagttgtgagggctcctctgcatcacctaccaggatgtctggaggagaaaaagacagaacaaagatggaagtggcctgggcccctgggggtgggtcctctctgttgtttttaatctgcaccttatagactgatgtctctttggccggagccagatctgcccctcagtgcattcgtgtgctcgcacgcgcagacatcccttctcccccatacacacatatacactcacagcctctctggcctcttcccttggggaggggccacctgtagtatttgccttgatttggtggggtacagtggatgtgaatactgtaaatagcttgtgctcagactcctctgcgtggagagggtgggtgcaggaggcagaccctccccccaaagccccctggggagatcttcctctctctatttaactgtaactgagggggatcccaggtctggggatgggggacaccttgggccacaggatactggttgcttcaggggtacccatgccccctgccctcgcctggaatcagtgttactgcatctgattaaatgtctccagaaataaagaataattctgccaa

SEQ ID NO: 1827 - DNA, 3324 bp, Homo sapiens
  source 1..3324: mol_type = genomic DNA
gggttcgcgaccgcagccgagagaccccgggcgaccggcacctccgagactcgcgggccacctgcctcgaccttccccggagcgcccccgcctccgagtcgctacttgccgggccgggccgggccgggcgtgatgcgccgcgggacccctgtcctggccactggccgccgccgccgccgccgctgagaccccgagacccccagtgacgccgcagccatggagagcggcccgcgtgcggagctgggggcgggcgcacccccagctgtggtcgccaggacccccccagagccaagaccttctccagaaggtgacccttcccccccaccaccaccaatgtcagccctggtccccgacactcccccggacacccctcctgccatgaagaatgccactagctctaagcagctcccactggaaccagagagcccctcagggcaggtcgggcctaggccagcccccccgcaggaagagtccccttcctctgaagcaaagagcagaggacccaccccaccagccatgggcccacgggatgccagacctcctcgaaggagcagccagccatctccaacagcagtgccagcctccgacagccctcccaccaagcaagaggtgaagaaggcaggagagagacacaagctggcaaaggagcggcgagaagagcgggccaagtacctggcggccaagaaggcagtgtggctggagaaggaggagaaggccaaggcgctgcgggagaagcagctccaggagcgccggcgccggctggaggagcaacgtcttaaagccgagcaacgccgtgcagccctggaggaacggcagcggcagaagctcgagaaaaacaaggagcgctatgaagcagccatccaacggtcagtgaagaagacgtgggccgaaatccggcagcagcgctggtcctgggcaggggccctgcaccacagctctccaggacataagaccagtgggagcaggtgctccgtgtcggcagttaacctgcccaaacacgtggactctataatcaacaagcggctctcaaagtcctctgccacgctctggaactcccccagtagaaatcgcagcctgcagctgagcgcatgggagagcagcatcgtggatcgtctgatgacgcccactctctccttccttgctcggagtcgcagcgcggtcacactgccccgcaacggccgggaccagggtaggggctgcgaccctgggagaggccccacgtggggccgggcaggggccagcctggcgcgcgggccgcaacccgaccgcactcatccctctgcagccgtgccggtgtgcccgcgctcggcctccgccagccccctgacgccgtgcagcgtcacccgaagcgtgcaccgctgcgcccccgccggtgagcgcggggagcgccgcaagcccaacgccgggggcagccccgctccggtgcgccgccggccggaggcctcgccggtgcagaaaaaggagaagaaggacaaggagcgggaaaacgagaaggagaagagtgccctagcccgggagcgcagcctcaagaagcgccagtcgctgcccgcctccccacgtgcccgcctctctgccagcaccgcctctgagctcagccccaaatccaaggccaggccatcctctccctccacatcctggcacaggcctgcctccccctgccccagcccagggccaggccacactctgcctccaaagccaccgtccccccgaggcaccactgcatcccccaaggggcgggttcggaggaaggaggaggcaaaggagagccccagcgccgcagggcccgaggacaagagccagagcaagcgcagggccagtaacgagaaggagtcagcagccccagcctcaccggcaccttcgccggcgccctcgcccaccccagccccgccccagaaggagcagccccccgcggagacccctacagacgctgctgtcttgacctcacccccagcccctgctcccccggtgacccctagcaaaccaatggccggcaccacagaccgagaagaagccactcggctcttggctgagaagcggcgccaggcccgggagcagcgggagcgcgaggagcaggagcggaggctgcaggcagaaagggacaagcgaatgcgagaggagcagctggcacgggaggccgaggcccgggcggagcgggaggcggaggcccggaggcgggaggagcaggaggcacgagagaaggcgcaggccgagcaggaggagcaggagcggctgcagaagcagaaagaggaggccgaagctcggtcgcgggaagaggcggagcggcagcgtctggagcgggaaaagcacttccagcagcaggagcaagagcggcaagagcgcagaaagcgtctggaggagatcatgaagaggactcggaagtcagaagtttctgaaaccaagcagaagcaggacagcaaggaggccaacgccaacggttccagcccagagcctgtgaaagctgtggaggctcggtccccagggctgcagaaggaggctgtgcagaaagaggagcccatcccacaggagcctcagtggagtctcccaagcaaggagttgccagcgtccctggtgaatggcctgcagcctctcccagcacaccaggagaatggcttctccaccaacggaccctctggggacaagagtctgagccgaacaccagagacactcctgccctttgcagaggcagaagccttcctcaagaaagctgtggtgcagtccccgcaggtcacagaagtcctttaagagggtttgccttggatccgggcacagttgtgagggctcctctgcatcacctaccaggatgtctggaggagaaaaagacagaacaaagatggaagtggcctgggcccctgggggtgggtcctctctgttgtttttaatctgcaccttatagactgatgtctctttggccggagccagatctgcccctcagtgcattcgtgtgctcgcacgcgcagacatcccttctcccccatacacacatatacactcacagcctctctggcctcttcccttggggaggggccacctgtagtatttgccttgatttggtggggtacagtggatgtgaatactgtaaatagcttgtgctcagactcctctgcgtggagagggtgggtgcaggaggcagaccctccccccaaagccccctggggagatcttcctctctctatttaactgtaactgagggggatcccaggtctggggatgggggacaccttgggccacaggatactggttgcttcaggggtacccatgccccctgccctcgcctggaatcagtgttactgcatctgattaaatgtctccagaaataaagaataa

SEQ ID NO: 1828 - DNA, 1084 bp, Homo sapiens
  source 1..1084: mol_type = genomic DNA
aacctgcccaaacacgtggactctataatcaacaagcggcagcgtctggagcgggaaaagcacttccagcagcaggagcaagagcggcaagagcgcagaaagcgtctggaggagatcatgaagaggactcggaagtcagaagtttctgaaaccaagaagcaggacagcaaggaggccaacgccaacggttccagcccagagcctgtgaaagctgtggaggctcggtccccagggctgcagaaggaggctgtgcagaaagaggagcccatcccacaggagcctcagtggagtctcccaagcaaggagttgccagcgtccctggtgaatggcctgcagcctctcccagcacaccaggagaatggcttctccaccaacggaccctctggggacaagagtctgagccgaacaccagagacactcctgccctttgcagaggcagaagccttcctcaagaaagctgtggtgcagtccccgcaggtcacagaagtcctttaagagggtttgccttggatccgggcacagttgtgagggctcctctgcatcacctaccaggatgtctggaggagaaaaagacagaacaaagatggaagtggcctgggcccctgggggtgggtcctctctgttgtttttaatctgcaccttatagactgatgtctctttggccggagccagatctgcccctcagtgcattcgtgtgctcgcacgcgcagacatcccttctcccccatacacacatatacactcacagcctctctggcctcttcccttggggaggggccacctgtagtatttgccttgatttggtggggtacagtggatgtgaatactgtaaatagcttgtgctcagactcctctgcgtggagagggtgggtgcaggaggcagaccctccccccaaagccccctggggagatcttcctctctctatttaactgtaactgagggggatcccaggtctggggatgggggacaccttgggccacaggatactggttgcttcaggggtacccatgccccctgccctcgcctggaatcagtgttactgcatctgattaaatgtctccagaaataaagaataattctgcc

SEQ ID NO: 1829 - DNA, 1923 bp, Homo sapiens
  source 1..1923: mol_type = genomic DNA
cgagattccctattaaaaaaaaatagaattgatgcaaacagcctgttccttccggggttttgggctggaactgcagcgcttagagagctcggtggaagctgctaaaggcggaggcggggctctggcgagttctccttccaccttcccccacccttctctgccaaccgctgtttcagcccctagctggattccagccattgctgcagctgctccacagcccttttcaggacccaaacaaccgcagccgctgttcccaggatggtgatccgtgtatatattgcatcttcctctggctctacagcgattaagaagaaacaacaagatgtgcttggtttcctagaagccaacaaaataggatttgaagaaaaagatattgcagccaatgaagagaatcggaagtggatgagagaaaatgtacctgaaaatagtcgaccagccacaggttaccccctgccacctcagattttcaatgaaagccagtatcgcggggactatgatgccttctttgaagccagagaaaataatgcagtgtatgccttcttaggcttgacagccccacctggttcaaaggaagcagaagtgcaagcaaagcagcaagcatgaaccttaagcactgtgctttaagcatcctgaaaaatgagtctccattgcttttataaaatagcagaattagctttgcttcaaaagaaataggcttaatgttgaaataatagattagttgggttttcacatgcaaacattcaaaatgaatacaaaattaaaatttgaacattatggtgattatggtgaggagaatgggatattaacataaaattatattaataagtagatatcgtagaaatagtgttgttacctgccaagccatcctgtatacaccaatgattttacaaagaaaacacccttccctccttctgccattactatggcaacttaagtgtatctgcagctctacattaaaaaggagaaagagaaataacctgtctctcattcctaagttgcctcattaattttcatgaacaagaatatgtacctttttgatgctatattactgcgattaaaaagttcttgcaggtaatgtttatgatatgttaaacgttgtaatttcctatcgtaattataacattcccattcttttgtagatgaaacttctacatattgaaccacagattttctgagcttctaaatgtagcctttcattgcacatttcagtgatcagaatagatatccttttacacgcacaaaagcaatagattcattcagtggacaagttccttgtttaactacacagctatgatggaatgatatatccaagttccttgcctcagtgaaatatgcatatgtatatcatgaaagtgggatgccaagtaagcttaaaatggcattctctagcaaagagattagacttttaaataactcttataaaacaggttggcgatcatttcccaagattggtttcccttgagtttttgctaaaacaaatcttagtagttttgcccgtttaaaacaactcacaatcgtaaatgctactattcctaagatatcttacctttttatttcagtttagccatgtattgtatgagtgtattagtctaagcagtgagaatcttttctatgcctctattccagcaaaaagtagaagtatcaaataaaaagggcaacttttaaaatattaagcctgaagacttctaaaaagacaagaaacatggcctaaataaccaacatagatttacatagtaagtttcacactaccttattaccaaaagcaaacacctcttactttaaactacattatcatgtatatctattgtatgctggtctttactttttgccaaaatcaacatataatgaagagatgcctttgtttcatgagattcaaacttgatgctatgctttaaaataaactcagtacttttagaaacataa

SEQ ID NO: 1830 - DNA, 746 bp, Homo sapiens
  source 1..746: mol_type = genomic DNA
ctccggcactatgagcggcttcagcaccgaggagcgcgccgcgcccttctccctggagtaccgagtcttcctcaaaaatgagaaaggacaatatatatctccatttcatgatattccaatttatgcagataaggatgtgtttcacatggtagttgaagtaccacgctggtctaatgcaaaaatggagattgctacaaaggaccctttaaaccctattaaacaagatgtgaaaaaaggaaaacttcgctatgttgcgaatttgttcccgtataaaggatatatctggaactatggtgccatccctcagacttgggaagacccagggcacaatgataaacatactggctgttgtggtgacaatgacccaattgatgtgtgtgaaattggaagcaaggtatgtgcaagaggtgaaataattggcgtgaaagttctaggcatattggctatgattgacgaaggggaaaccgactggaaagtcattgccattaatgtggatgatcctgatgcagccaattataatgtatgtaatagtgttgtgatcctctgacatagcctctgcctctggaccagggatagtacctcaagcctgtaatcccagtgctttgggaagccaaggcaggaggattgcttgagcccaggagtttgagaccagcctgggcaacatgacgagaccccatttctacaaaaaatttaaaaattagctgggcgtgtgcatgcttatagtcccagctactcaggaggctgag

SEQ ID NO: 1831 - DNA, 1294 bp, Homo sapiens
  source 1..1294: mol_type = genomic DNA
agtgctcgcagtgcgcaggcgtggggctctctccttgtcagtcggcgccgcgtgcgggctggtggctctgtggcagcggcggcggcaggactccggcactatgagcggcttcagcaccgaggagcgcgccgcgcccttctccctggagtaccgagtcttcctcaaaaatgagaaaggacaatatatatctccatttcatgatattccaatttatgcagataaggatgtgtttcacatggtagttgaagtaccacgctggtctaatgcaaaaatggagattgctacaaaggaccctttaaaccctattaaacaagatgtgaaaaaaggaaaacttcgctatgttgcgaatttgttcccgtataaaggatatatctggaactatggtgccatccctcagacttgggaagacccagggcacaatgataaacatactggctgttgtggtgacaatgacccaattgatgtgtgtgaaattggaagcaaggtatgtgcaagaggtgaaataattggcgtgaaagttctaggcatattggctatgattgacgaaggggaaaccgactggaaagtcattgccattaatgtggatgatcctgatgcagccaattataatgatatcaatgatgtcaaacggctgaaacctggctacttagaagctactgtggactggtttagaaggtataaggttcctgatggaaaaccagaaaatgagtttgcgtttaatgcagaatttaaagataaggactttgccattgatattattaaaagcactcatgaccattggaaagcattagtgactaagaaaacgaatggaaaaggaatcagttgcatgaatacaactttgtctgagagccccttcaagtgtgatcctgatgctgccagagccattgtggatgctttaccaccaccctgtgaatctgcctgcacagtaccaacagacgtggataagtggttccatcaccagaaaaactaatgagatttctctggaatacaagctgatattgctacatcgtgttcatctggatgtattagaagtaaaagtagtagcttttcaaagctttaaatttgtagaactcatctaactaaagtaaattctgctgtgactaatccaatatactcagaatgttatccatctaaagcatttttcatatctcaactaagataacttttagcacatgcttaaatatcaaagcagttgtcatttggaagtcacttgtgaatagatgtgcaaggggagcacatattggatgtatatgttaccatatgttaggaaataaaattattttgctgaaacttg

SEQ ID NO: 1832 - DNA, 2654 bp, Homo sapiens
  source 1..2654: mol_type = genomic DNA
gatgaggtaatcgcgccgctgagaggcacgcgcagccggtgcctagccggttggtccctgcgcccctgccccgccggccaccgcccccccacaccgtcccggccccggcagcctggccccaccatgaccgagcggtgcagcctgtggagtgccctgtcggccgccgcctgctgcttctaccgcggctccttcgtgcagttctccaaggagaagtacatcctggactcatcgccagagaaactccacaaggaattggaggaggagctcaaactcagcagcacggatctccgcagccatgcctggtaccatggccgcatcccccgagaggtctcggagaccttggtacaacgcaacggcgacttcctcatccgggactcactcaccagcctgggcgactatgtgctcacgtgccgctggcgcaaccaggccttgcacttcaagatcaacaaggtggtggtgaaggcaggcgagagctacacacacatccagtacctgtttgagcaggagagctttgaccacgtgcccgccctcgtgcgctatcatgtgggcagccgcaaggctgtgtcagagcagagtggtgccatcatctactgcccggtgaaccgcaccttcccactgcgctacctcgaggccagctatggcctgggacaggggagtagcaagcctgctagccccgtcagcccctcaggccccaagggcagccacatgaagcggcgcagcgtcaccatgaccgatgggctcactgctgacaaggtcacccgcagcgatggctgccccaccagtacgtcgctgccccgccctcgggactccatccgcagctgtgccctcagcatggaccagatcccagacctgcactcacccatgtcgcccatctccgagagccctagctcccctgcctacagcactgtaacccgtgtccatgccgcccctgcagccccttctgccacagcattgcctgcctcccctgtcgcccgccgttccagtgagccccagctgtgtcccggaagtgccccaaagacccatggggagtcagacaagggcccccacaccagcccctcccacacccttggcaaggcctccccgtcaccatcactcagcagctacagtgacccggactctggccactactgccagctccagcctcccgtgcgtggcagccgagagtgggcagcgactgagacctccagccagcaggccaggagctatggggagaggctaaaggaactgtcagaaaatggggcccctgaaggggactggggcaagaccttcacagtccccatcgtggaagtcacttcttccttcaacccggccaccttccagtcactactgatccccagggataaccggccactggaggtgggccttctgcgcaaggtcaaggagctgctggcagaagtggatgcccggacgctggcccggcatgtcaccaaggtggactgcctggttgctaggatactgggcgttaccaaggagatgcagaccctaatgggagtccgctggggcatggaactgctcaccctcccccatggccggcagctacgcctagacctgctggaaaggttccacaccatgtccatcatgctggccgtggacatcctgggctgcaccggctctgcggaggagcgggcagcgctgctgcacaagaccattcagctggcggccgagctgcgggggactatgggcaacatgttcagcttcgcggcggtcatgggtgccctggacatggcccagatttctcggctggagcagacatgggtgaccctgcggcagcgacacacagagggtgccatcctgtacgagaagaagctcaagccttttctcaagagcctcaacgagggcaaagaaggcccgccgctgagcaacaccacgtttcctcatgtgctgcccctcatcaccctgctggagtgtgactcggccccaccagagggccctgagccctggggcagcacggagcacggcgtggaggtggtgctggctcacctggaggccgcccgcacagtggcacaccacggaggcctgtaccacaccaatgctgaagtcaagctgcaggggttccaggcccggccggagctcctggaggtgttcagcacggagttccagatgcgccttctctggggcagtcagggtgccagcagcagccaggcccggcgctatgagaagttcgacaaggtcctcactgccctgtcccacaagctggaacctgctgtccgctccagcgagctgtgaccccagggacatttcccctctgcagctgcggacagcgtcaggggcagaggggcacacaactttccccagagcaccccaaggacactgtgatcaacccgagaatgttctgggttcaactcaagcatctcccttgcacctccagggtcctgcgtggactctgggttccatcccacctgctacatgctcaccaggtctccattgaggaagaacaggaacgccggttcccccaccagcttttgctgctccccttcctgctggggttccctgttttcgagccatgggaggcaggctgctcacgcctcctcactctctgtctgtccctcaccaacaccaaggcctccatctcactgtaaataagtctctgttctgtaaatagatgtacagaagccatgttatttctttcatataataaacttttatgactcttt

SEQ ID NO: 1833 - DNA, 2807 bp, Homo sapiens
  source 1..2807: mol_type = genomic DNA
atggcccctgctctgccttctcctcacaaggctgtcgcccgtcctgagctcctgctggacactgcagcccactcaggaaaactgagggctccagacggtggagagggagcagaatgtgctgggcacaatggtggcccatcttggggagtggggcagggccaaagccaagagccttcccggcagggaatcccacaggccccatggctggtgtcctggcagagacggggctttccacccagctctttttgcccagggcctttaaggactgagaagctcagagcaggcaggtgcccgttgcttctctgcggtggggctgctggagagccagaggctggcagcgactatgtgaagttctccaaggagaagtacatcctggactcatcgccagagaaactccacaaggaattggaggaggagctcaaactcagcagcacggatctccgcagccatgcctggtaccatggccgcatcccccgagaggtctcggagaccttggtacaacgcaacggcgacttcctcatccgggactcactcaccagcctgggcgactatgtgctcacgtgccgctggcgcaaccaggccttgcacttcaagatcaacaaggtggtggtgaaggcaggcgagagctacacacacatccagtacctgtttgagcaggagagctttgaccacgtgcccgccctcgtgcgctatcatgtgggcagccgcaaggctgtgtcagagcagagtggtgccatcatctactgcccggtgaaccgcaccttcccactgcgctacctcgaggccagctatggcctgggacaggggagtagcaagcctgctagccccgtcagcccctcaggccccaagggcagccacatgaagcggcgcagcgtcaccatgaccgatgggctcactgctgacaaggtcacccgcagcgatggctgccccaccagtacgtcgctgccccgccctcgggactccatccgcagctgtgccctcagcatggaccagatcccagacctgcactcacccatgtcgcccatctccgagagccctagctcccctgcctacagcactgtaacccgtgtccatgccgcccctgcagccccttctgccacagcattgcctgcctcccctgtcgcccgccgttccagtgagccccagctgtgtcccggaagtgccccaaagacccatggggagtcagacaagggcccccacaccagcccctcccacacccttggcaaggcctccccgtcaccatcactcagcagctacagtgacccggactctggccactactgccagctccagcctcccgtgcgtggcagccgagagtgggcagcgactgagacctccagccagcaggccaggagctatggggagaggctaaaggaactgtcagaaaatggggcccctgaaggggactggggcaagaccttcacagtccccatcgtggaagtcacttcttccttcaacccggccaccttccagtcactactgatccccagggataaccggccactggaggtgggccttctgcgcaaggtcaaggagctgctggcagaagtggatgcccggacgctggcccggcatgtcaccaaggtggactgcctggttgctaggatactgggcgttaccaaggagatgcagaccctaatgggagtccgctggggcatggaactgctcaccctcccccatggccggcagctacgcctagacctgctggaaaggttccacaccatgtccatcatgctggccgtggacatcctgggctgcaccggctctgcggaggagcgggcagcgctgctgcacaagaccattcagctggcggccgagctgcgggggactatgggcaacatgttcagcttcgcggcggtcatgggtgccctggacatggcccagatttctcggctggagcagacatgggtgaccctgcggcagcgacacacagagggtgccatcctgtacgagaagaagctcaagccttttctcaagagcctcaacgagggcaaagaaggcccgccgctgagcaacaccacgtttcctcatgtgctgcccctcatcaccctgctggagtgtgactcggccccaccagagggccctgagccctggggcagcacggagcacggcgtggaggtggtgctggctcacctggaggccgcccgcacagtggcacaccacggaggcctgtaccacaccaatgctgaagtcaagctgcaggggttccaggcccggccggagctcctggaggtgttcagcacggagttccagatgcgccttctctggggcagtcagggtgccagcagcagccaggcccggcgctatgagaagttcgacaaggtcctcactgccctgtcccacaagctggaacctgctgtccgctccagcgagctgtgaccccagggacatttcccctctgcagctgcggacagcgtcaggggcagaggggcacacaactttccccagagcaccccaaggacactgtgatcaacccgagaatgttctgggttcaactcaagcatctcccttgcacctccagggtcctgcgtggactctgggttccatcccacctgctacatgctcaccaggtctccattgaggaagaacaggaacgccggttcccccaccagcttttgctgctccccttcctgctggggttccctgttttcgagccatgggaggcaggctgctcacgcctcctcactctctgtctgtccctcaccaacaccaaggcctccatctcactgtaaataagtctctgttctgtaaatagatgtacagaagccatgttatttctttcatataataaacttttatgactcttt

SEQ ID NO: 1834 - DNA, 2750 bp, Homo sapiens
  source 1..2750: mol_type = genomic DNA
gaggcggagagcgtccttccctgccggtggagtaggcggtggagtggggccgggcaaggagcgcaggggcgtgtctgggggcgtggtctacaggtcagtctccgcccccggagtccggcactgagctctgcagctcagtggcccgagaaaggcaggagccgctgggtttaggaggtccccgggttgccggcggcgacagcgggggaagcatgactgctgtgggccgaaggtgccccgcgctggggtcccgaggggctgctggagagccagaggctggcagcgactatgtgaagttctccaaggagaagtacatcctggactcatcgccagagaaactccacaaggaattggaggaggagctcaaactcagcagcacggatctccgcagccatgcctggtaccatggccgcatcccccgagaggtctcggagaccttggtacaacgcaacggcgacttcctcatccgggactcactcaccagcctgggcgactatgtgctcacgtgccgctggcgcaaccaggccttgcacttcaagatcaacaaggtggtggtgaaggcaggcgagagctacacacacatccagtacctgtttgagcaggagagctttgaccacgtgcccgccctcgtgcgctatcatgtgggcagccgcaaggctgtgtcagagcagagtggtgccatcatctactgcccggtgaaccgcaccttcccactgcgctacctcgaggccagctatggcctgggacaggggagtagcaagcctgctagccccgtcagcccctcaggccccaagggcagccacatgaagcggcgcagcgtcaccatgaccgatgggctcactgctgacaaggtcacccgcagcgatggctgccccaccagtacgtcgctgccccgccctcgggactccatccgcagctgtgccctcagcatggaccagatcccagacctgcactcacccatgtcgcccatctccgagagccctagctcccctgcctacagcactgtaacccgtgtccatgccgcccctgcagccccttctgccacagcattgcctgcctcccctgtcgcccgccgttccagtgagccccagctgtgtcccggaagtgccccaaagacccatggggagtcagacaagggcccccacaccagcccctcccacacccttggcaaggcctccccgtcaccatcactcagcagctacagtgacccggactctggccactactgccagctccagcctcccgtgcgtggcagccgagagtgggcagcgactgagacctccagccagcaggccaggagctatggggagaggctaaaggaactgtcagaaaatggggcccctgaaggggactggggcaagaccttcacagtccccatcgtggaagtcacttcttccttcaacccggccaccttccagtcactactgatccccagggataaccggccactggaggtgggccttctgcgcaaggtcaaggagctgctggcagaagtggatgcccggacgctggcccggcatgtcaccaaggtggactgcctggttgctaggatactgggcgttaccaaggagatgcagaccctaatgggagtccgctggggcatggaactgctcaccctcccccatggccggcagctacgcctagacctgctggaaaggttccacaccatgtccatcatgctggccgtggacatcctgggctgcaccggctctgcggaggagcgggcagcgctgctgcacaagaccattcagctggcggccgagctgcgggggactatgggcaacatgttcagcttcgcggcggtcatgggtgccctggacatggcccagatttctcggctggagcagacatgggtgaccctgcggcagcgacacacagagggtgccatcctgtacgagaagaagctcaagccttttctcaagagcctcaacgagggcaaagaaggcccgccgctgagcaacaccacgtttcctcatgtgctgcccctcatcaccctgctggagtgtgactcggccccaccagagggccctgagccctggggcagcacggagcacggcgtggaggtggtgctggctcacctggaggccgcccgcacagtggcacaccacggaggcctgtaccacaccaatgctgaagtcaagctgcaggggttccaggcccggccggagctcctggaggtgttcagcacggagttccagatgcgccttctctggggcagtcagggtgccagcagcagccaggcccggcgctatgagaagttcgacaaggtcctcactgccctgtcccacaagctggaacctgctgtccgctccagcgagctgtgaccccagggacatttcccctctgcagctgcggacagcgtcaggggcagaggggcacacaactttccccagagcaccccaaggacactgtgatcaacccgagaatgttctgggttcaactcaagcatctcccttgcacctccagggtcctgcgtggactctgggttccatcccacctgctacatgctcaccaggtctccattgaggaagaacaggaacgccggttcccccaccagcttttgctgctccccttcctgctggggttccctgttttcgagccatgggaggcaggctgctcacgcctcctcactctctgtctgtccctcaccaacaccaaggcctccatctcactgtaaataagtctctgttctgtaaatagatgtacagaagccatgttatttctttcatataataaacttttatgactcttta

SEQ ID NO: 1835 - DNA, 2841 bp, Homo sapiens
  source 1..2841: mol_type = genomic DNA
tgccagcccatggccgagcctgccctcctccccgccgcccagatggagaggctggccccagggcccctagcctcaccgtgtcctcggatcccgcgggcccgcattgccaggcgctgcgcccagcgctgggccgacctgggctgcagctctggcccctcctcaggccgaatggatcagcttccccagaagaatctcctgcgactacaccctgctggctctgctggctgttccactggagtggagagctccagcatggatggcttttggatggaggtggaacagatccaacagagagatgagctgagggaagaggacagtggcgggaatgaaggccagcttccagaggaaggggaagctgaatcccagtggctgcaggacacaggcctgtcgggcctccttggtggcctgggcttggatggtgatcaccaggagctcctgtccaccctgacacagacccaggtggccgctgtgtgccgccggctggacatctatgctcgctcagtgcgaagacaacacaagacacctgtcagagatgtcagggatgtctttggggtcttcaattcagggaaaatgtcgtcagagaatggcgactccggtatgaagggggcccagctcagttccggggcctctaagtttcctccagcagcagagcctggggggctgcaggagcaggctgggagggaagaagccttcaacatggactctgcctactcagaacaagctgcggtgctcctgcagaggagcaggccatcccggggaggcacctctgcctggggcaagtgttccctgccgaagtttaccgtccccaaaggcagacttggcgtgacgaggataggagacttgtccctgcaggatatgaggaaggtaccttctctggccctcatagagctgaccgcgctctgtgacatcctcggcttggacctgaagaggagcaaggcggggaagtggaaagcggcagaaactcgcctctttggtgtgccccttgacagcctgctagaagctgaccacaaagtcctccccagcacacaggtcccgctggtccttcaagccctgctgtcctgtttggaaaagagaggactggacatggaaggcattctcagggtgcccggatcccaggccagggtcaaggggctggaacagaaactggagagagacttctatgctggcctttttagctgggacgaggttcatcacaatgacgcctctgatttgctcaaaaggttcatccggaagctgccgacacctttgctcacggctgagtacctcccggccttcgccgtggtgcctaacatccccaacctgaagcagcgcctgcaggttcttcacctgctcatcctcatcctcccagaacccaacagaaatgccttaaaggcactgctggaattcctcaggaaggtggtggcccgggaacagcacaacaagatgactctgaggaatgtttccaccgtgatggcccctaacctctttctgcaccaagggcggccccccaagctccccaaaggcaaggagaagcagctggcagaaggggcagccgaggtggtgcagataatggtgcactaccaggatctgctgtggacggtcgcctctttcctggtcgcccaggtgcgaaaactgaacgacagtagcagcaggcgcccccagctctgcgacgcaggcctcaagacttggctgcggaggatgcacgcagacagggacaaggcgggggacggcctcgaggcgactcccaaggtggcaaagatccaggtggtctggcctatcaaggaccccttgaaggtgcctctcacccccagcaccaaagtggcccacgtcctgaggcagttcacagagcacctcagccctggttccaagggtcaagaagacagtgaggacatggacagcctccttctacaccataggtccatggagtcagccaacatcctcctctatgaagttggagggaatatcaatgagcatcgcctggacccagatgcctacctcttagatctgtaccgtgccaacccgcatggtgagtgggtccttaaacagaaccccacctaaaccctgcgagtctcaggagcagcctggatgcctcctcctctcccctgctggctctgtgtccatgtacccagcatgagaacaaagctattccaggggagggtctgagttttattccaaggcttccttttctgaaatgcctctcagacccctcagaaatagactcaggggtggtgctctctccactcagaggggatgaggggctagggcctcagggaggggaggccaacactgtagccatgatcagccctggaagaactggacagaggaagaacttcccttcacagctctcatgttttaaccgtgcacacaatgccctcactcccctccaccctccagccctccagagagttgcttcctacaccaagcttgctgtatgacgccaccacttggggcgcttggatctccatgggcttctgtctgtggcttccagactggaggaaaattaaaaatgcagtacctttatcaagaggtagttggggtcttttccccccaggcaaaattgtttcgaaagtggccctacaatgtgtagtagcagcagcaccagagacaaaaccaggagagctctgtgaccttggacaagccccttgccctctcagaatcctttcaggatgaggggctagggcctcagggagaggaagccaagattgtagccatgaccagccccgggagaaatggacagaggaagactttgcttcacagctctcatgctttacatgttgatttgtacaatcttgtcattttgtaatatgatataatatgtaaacgtaattgtttaaacagtaaaggcacaacaagttcaatgtc

SEQ ID NO: 1836 - DNA, 2234 bp, Homo sapiens
  source 1..2234: mol_type = genomic DNA
gtgctaaaggaaaccaacagcggcctaggggtgaaaggacagccagggttagatgttctgaggaggcgggagcaaccgagagagcacgtgagcatctgtcctttctacccgttcctctttatctttagtgttcagtagcagcggggatagcccggggcccggtgtatggccacggagttacagtgtccggactccatgccctgtcacaaccagcaagtaaactctgcctcaaccccaagtcccgagcagctgcgacctggcgatctgatcctggaccacgcagggggaaacagagcctccagggccaaggtgattctcctcacggggtacgcccattctagcctgccggccgagctggactctggggcctgcggcggctccagcctcaactcagagggcaacagtggtagtggtgacagtagcagctatgacgcaccagctggcaactccttcctagaggactgcgaactctcccggcagatcggggcgcagcttaagctgctgcctatgaatgatcagatacgggagctacagaccatcatccgtgacaagacagccagtagaggtgacttcatgttttctgcggatcgtttgatcagacttgttgtggaagagggattgaatcagctgccatataaagaatgcatggtgaccactccaacagggtacaagtatgaaggagtgaaatttgagaagggaaattgtggggtcagcataatgagaagcggtgaggcaatggaacaaggtttacgagactgctgtcgatccatacgaattggaaagatcctgattcagagtgatgaggagacacaaagagccaaagtatattatgccaaattccccccagacatttaccggagaaaagtccttctgatgtatccaattctcagcactggaaatactgtaattgaagctgtaaaggttcttatagaacatggagttcaacccagtgttatcatcctactcagtctgttctccactcctcatggtgagttcagcatgaggcagtaactagggctccatatagtcctgaggtgggtgccaaatcaatcattcaggagtttccagagatcacaattttaactactgaagttcatcctgttgcacctacacattttggacagaaatactttggaacagactaagttatttaagtaaaataattatcttatgtaatattacaatcatgttttgattttctatttgttttactgattcacttgagggtggcagagaaaaatgtgttaaaatgctttttagttttggaagtgggtatatttgaggttatatctcatttagttatttgtttactgttggcaccgaattcaacaatgaagtatatgcaactcttacaaaacataaattttaataatattctaatgcaaattactgaaccctcagtgcattaaaattatttcctaatttatgagcctcttagtttggaggttgcttgaagccacaaataaaactcaaatgagagtcagttctttgtcccactgtagtttgcattttgtttagtttggttttagctctactaaggtttcacatatgtggctattgccacattcctctactgttttctttctgatactggacatgctagtaacttggagaggagaataaaagaatgtctcctggaattttacattcccattaatgtcctcattcagttggcagacctaggatgtatggttaactctcaggccattatgtttttcatggctcatttcccaaactgcattgttggtaggtgccttgctaagctgtaatgcagtgaagaagatggtggggcatttttagtaattggaactgtaacattaatttacaagattgaaccggggatgtctggatgctgacaagggagagccaagtactgttaatgccatcaatcctctaggaaggaattggtggtttttctgaagtgtgggggaaagggtggtttcttgctggatttcatggccagtaagtaaatttaaatgcttcatttttaatttggatgtttctgctagagacctttgatttggaaattagttattttgcatgtttgtcaactgtatatgtatgaaaatagaaaaaaaccatgctttttgtaaaaacccctaagatttgtatatgttcatctttaggcttctgaaagggagagaaatcatattggaaatcagtgttggtgttctgaaatctgcttgtaaaactctcatctcattttacattgatattaaaacattttaacagtg

SEQ ID NO: 1837 - DNA, 2186 bp, Homo sapiens
  source 1..2186: mol_type = genomic DNA
gtgtgctaaaggaaaccaacagcggcctaggggtgaaaggacagccagggttagatgttctgaggaggcgggagcaaccgagagagcacgtgagcatctgtcctttctacccgttcctctttatctttagtgttcagtagcagcggggatagcccggggcccggtgtatggccacggagttacagtgtccggactccatgccctgtcacaaccagcaagtaaactctgcctcaaccccaagtcccgagcagctgcgacctggcgatctgatcctggaccacgcagggggaaacagagcctccagggccaaggtgattctcctcacggggtacgcccattctagcctgccggccgagctggactctggggcctgcggcggctccagcctcaactcagagggcaacagtggtagtggtgacagtagcagctatgacgcaccagctggcaactccttcctagaggactgcgaactctcccggcagatcggggcgcagcttaagctgctgcctatgaatgatcagatacgggagctacagaccatcatccgtgacaagacagccagtagaggtgacttcatgttttctgcggatcgtttgatcagacttgttgtggaagagggattgaatcagctgccatataaagaatgcatggtgaccactccaacagggtacaagtatgaaggagtgaaatttgagaagggaaattgtggggtcagcataatgagaagcggtgaggcaatggaacaaggtttacgagactgctgtcgatccatacgaattggaaagatcctgattcagagtgatgaggagacacaaagagccaaagtatattatgccaaattccccccagacatttaccggagaaaagtccttctgatgtatccaattctcagcactggaaatactgtaattgaagctgtaaaggttcttatagaacatggagttcaacccagtgttatcatcctactcagtctgttctccactcctcatggtgccaaatcaatcattcaggagtttccagagatcacaattttaactactgaagttcatcctgttgcacctacacattttggacagaaatactttggaacagactaagttatttaagtaaaataattatcttatgtaatattacaatcatgttttgattttctatttgttttactgattcacttgagggtggcagagaaaaatgtgttaaaatgctttttagttttggaagtgggtatatttgaggttatatctcatttagttatttgtttactgttggcaccgaattcaacaatgaagtatatgcaactcttacaaaacataaattttaataatattctaatgcaaattactgaaccctcagtgcattaaaattatttcctaatttatgagcctcttagtttggaggttgcttgaagccacaaataaaactcaaatgagagtcagttctttgtcccactgtagtttgcattttgtttagtttggttttagctctactaaggtttcacatatgtggctattgccacattcctctactgttttctttctgatactggacatgctagtaacttggagaggagaataaaagaatgtctcctggaattttacattcccattaatgtcctcattcagttggcagacctaggatgtatggttaactctcaggccattatgtttttcatggctcatttcccaaactgcattgttggtaggtgccttgctaagctgtaatgcagtgaagaagatggtggggcatttttagtaattggaactgtaacattaatttacaagattgaaccggggatgtctggatgctgacaagggagagccaagtactgttaatgccatcaatcctctaggaaggaattggtggtttttctgaagtgtgggggaaagggtggtttcttgctggatttcatggccagtaagtaaatttaaatgcttcatttttaatttggatgtttctgctagagacctttgatttggaaattagttattttgcatgtttgtcaactgtatatgtatgaaaatagaaaaaaaccatgctttttgtaaaaacccctaagatttgtatatgttcatctttaggcttctgaaagggagagaaatcatattggaaatcagtgttggtgttctgaaatctgcttgtaaaactctcatctcattttacattgatattaaaacattttaacagtg

SEQ ID NO: 1838 - DNA, 792 bp, Homo sapiens
  source 1..792: mol_type = genomic DNA
atcccagaccaggctcgtgtggctccttcttcctccgaccctaaatcgaagttctttgagctaatccagggcactgagattgacatcttcagctacaagcccacactgctcacctctaaaaccctggagaagatccgccctgtgtttgactaccgctgcatggtatctggcagtgagcagaagttcctcatcggcctggggaaatcccagatctacacatgggatggccgccagtcagaccgctggatcaagctagacctgaagacagagctgccccgggacactctgctatctgtggaaattgtgcatgagctgaaaggggaggggaaggcccagaggaagatcagtgccatccacatcctcgatgtccttgtgctgaatggcaccgacgttcgggagcagcactttaaccagcgaattcagcttgccgagaaatttgtgaaagccgtttccaagcctagtcggcccgacatgaatcccatcagggtgaaggaggtgtacagactggaagagatggagaagatttttgtcaggttggagatgaagatcatcaagggctccagtggcaccccaaagctcagctacacagggcgtgatgaccggcactttgtacccatgggcctctacatcgtcaggacagtgaatgagccctggactatgggattcagcaaaagcttcaagaagaagttcttctacaacaagaaaaccaaggactctacttttgacctccctgcagactccattgccccatttcacctccccagccttgcctgcctgtcgaagatggattaa

SEQ ID NO: 1839 - DNA, 1116 bp, Homo sapiens
  source 1..1116: mol_type = genomic DNA
atgaagaggagaactgacccagaatgcactgcccccatcaagaaacagaaaaaaagagttgcagagcttgccctgagcctcagctccacgtccgatgatgaacctccctcctctgtcagtcatggagcaaaagcatctactacaagccttagtgggtctgatagtgagaccgaggggaaacaacacagctctgactcttttgacgatgcattcaaagcagactctcttgtggaaggaacttcttctcgctattccatgtataatagcgtctcccagaagcttatggccaagatgggcttcagggaaggtgaaggattgggtaaatacagccagggtcggaaggacatcgttgaggcttccagtcagaaaggtcgaagaggcttgggtctgacactccggggctttgaccaggagctgaacgtggactggcgagatgagccagagcccagtgcttgtgagcaggtgtcatggtttccagaatgtaccactgaaattcctgacactcaggaaatgagcgattggatggtggtgggaaagagaaagatgattattgaagatgaaacagagttttgtggggaagagctgcttcacagtgtgttgcagtgtaagaagccactggtgaaggaccgggaagctgagcttctgtactttgctgatgtctgcgcaggcccaggtggcttctcagagtatgtgctgtggaggaagaagtggcatgcaaagggctttggaatgactttgaagggccctaatgacttcaagctggaggacttctactctgcttccagtgaactcttcgaaccctactatggtgagggtgggattgatggagatggagatatcacccgcccagagaacatctctgcttttcggaattttgtcctggataacacagatcgcaagggtgtccattttctgatggctgatgggggtttctcggtggaggggcaggagaacctgcaggagatcctcagcaagcagctgcttctgtgtcagttcctcatggcgctgtccattgtccggacaggaggccacttcatctgtaaaacctttgacctgttcacaccgtttagtgtggggcttgtctacctgctgtactgctgctttgaacgagtttgt

SEQ ID NO: 1840 - DNA, 616 bp, Homo sapiens
  source 1..616: mol_type = genomic DNA
atggctggctacctgagtgaatcggactttgtgatggtggaggagggcttcagtacccgagacctgctgaaggaactcactctgggggcctcacaggccaccacggacgaggtagctgccttcttcgtggctgacctgggtgccatagtgaggaagcacttttgctttctgaagtgcctgccacgagtccggcccttttatgctgtcaagtgcaacagcagcccaggtgtgctgaaggttctggcccagctggggctgggctttagctgtgccaacaagattgcttccgtgatcaactcagccttggacctgtacttcccagagggctgtggcgtggacatctttgctgagctggggcgctactacgtgacctcggccttcactgtggcagtcagcatcattgccaagaaggaggttctgctagaccagcctggcagggaggaggaaaatggttccacctccaagaccatcgtgtaccaccttgatgagggcgtgtatgggatcttcaactcagtcctgtttgacaacatctgccctacccccatcctgcagaagtctaagaaccactcaccctgctacatgtctctagagtccattcatttcattgccgtgtagc

SEQ ID NO: 1841 - DNA, 1443 bp, Homo sapiens
  source 1..1443: mol_type = genomic DNA
atggctggctacctgagtgaatcggactttgtgatggtggaggagggcttcagtacccgagacctgctgaaggaactcactctgggggcctcacaggccaccacggacgaggtagctgccttcttcgtggctgacctgggtgccatagtgaggaagcacttttgctttctgaagtgcctgccacgagtccggcccttttatgctgtcaagtgcaacagcagcccaggtgtgctgaaggttctggcccagctggggctgggctttagctgtgccaacaaggcagagatggagttggtccagcatattggaatccctgccagtaagatcatctgcgccaacccctgtaagcaaattgcacagatcaaatatgctgccaagcatgggatccagctgctgagctttgacaatgagatggagctggcaaaggtggtaaagagccaccccagtgccaagatggttctgtgcattgctaccgatgactcccactccctgagctgcctgagcctaaagtttggagtgtcactgaaatcctgcagacacctgcttgaaaatgcgaagaagcaccatgtggaggtggtgggtgtgagttttcacattggcagtggctgtcctgaccctcaggcctatgctcagtccatcgcagacgcccggctcgtgtttgaaatgggcaccgagctgggtcacaagatgcacgttctggaccttggtggtggcttccctggcacagaaggggccaaagtgagatttgaagagattgcttccgtgatcaactcagccttggacctgtacttcccagagggctgtggcgtggacatctttgctgagctggggcgctactacgtgacctcggccttcactgtggcagtcagcatcattgccaagaaggaggttctgctagaccagcctggcagggaggccccactaccaccccctcacattgctacttgtgctgcctctgaaccctcccctcctgcagaggaaaatggttccacctccaagaccatcgtgtaccaccttgatgagggcgtgtatgggatcttcaactcagtcctgtttgacaacatctgccctacccccatcctgcagaagaaaccatccacggagcagcccctgtacagcagcagcctgtggggcccggcggttgatggctgtgattgcgtggctgagggcctgtggctgccgcaactacacgtaggggactggctggtctttgacaacatgggcgcctacactgtgggcatgggttcccccttttgggggacccaggcctgccacatcacctatgccatgtcccgggtggcctgggaagcgctgcgaaggcagctgatggctgcagaacaggaggatgacgtggagggtgtgtgcaagcctctgtcctgcggctgggagatcacagacaccctgtgcgtgggccctgtcttcaccccagcgagcatcatgtga

SEQ ID NO: 1842 - DNA, 2048 bp, Homo sapiens
  source 1..2048: mol_type = genomic DNA
ggctgctgggctggcggggcgcaggccgcgggacccgagcccggggaagcgagagagcggaggcgccgaggatccgattcactccctggggagacctatgggccgaagccgtgtaaatgcgttttaagaggcctcggctccgcaactgccactcctcctcggggtgttgcacaagtttcgaggtcaccggcgaccccccctagcagcgcgcctggctctggcccccgcgaaggaggacggagtttgtgtgttgcatactttctaaggcggcggctgcagcagcggctccatccagcccgtcagctcctcctgcaaggcatggctggctacctgagtgaatcggactttgtgatggtggaggagggcttcagtacccgagacctgctgaaggaactcactctgggggcctcacaggccaccacggacgaggtagctgccttcttcgtggctgacctgggtgccatagtgaggaagcacttttgctttctgaagtgcctgccacgagtccggcccttttatgctgtcaagtgcaacagcagcccaggtgtgctgaaggttctggcccagctggggctgggctttagctgtgccaacaaggcagagatggagttggtccagcatattggaatccctgccagtaagatcatctgcgccaacccctgtaagcaaattgcacagatcaaatatgctgccaagcatgggatccagctgctgagctttgacaatgagatggagctggcaaaggtggtaaagagccaccccagtgccaagatggttctgtgcattgctaccgatgactcccactccctgagctgcctgagcctaaagtttggagtgtcactgaaatcctgcagacacctgcttgaaaatgcgaagaagcaccatgtggaggtggtgggtgtgagttttcacattggcagtggctgtcctgaccctcaggcctatgctcagtccatcgcagacgcccggctcgtgtttgaaatgggcaccgagctgggtcacaagatgcacgttctggaccttggtggtggcttccctggcacagaaggggccaaagtgagatttgaagagattgcttccgtgatcaactcagccttggacctgtacttcccagagggctgtggcgtggacatctttgctgagctggggcgctactacgtgacctcggccttcactgtggcagtcagcatcattgccaagaaggaggttctgctagaccagcctggcagggaggaggaaaatggttccacctccaagaccatcgtgtaccaccttgatgagggcgtgtatgggatcttcaactcagtcctgtttgacaacatctgccctacccccatcctgcagaagaaaccatccacggagcagcccctgtacagcagcagcctgtggggcccggcggttgatggctgtgattgcgtggctgagggcctgtggctgccgcaactacacgtaggggactggctggtctttgacaacatgggcgcctacactgtgggcatgggttcccccttttgggggacccaggcctgccacatcacctatgccatgtcccgggtggcctgggaagcgctgcgaaggcagctgatggctgcagaacaggaggatgacgtggagggtgtgtgcaagcctctgtcctgcggctgggagatcacagacaccctgtgcgtgggccctgtcttcaccccagcgagcatcatgtgagtgggcctcgttccccccggagaatcccagcggggcctcagagatgcatctgggagaggtggggaagatggcaggcaagggtacccttggccaggactctggtgcccaccctgccacccccgcgctccacctgcagtgtttctgccctgtaaataggaccagtcttacactcgctgtagttcaagtatgcaacataaatcctgttccttccagctgtgtctgcctcctctgcagtgcaaggggcctggtcagccaggtgtgggggtgttcttggggtctcctttggtctccttcccacctttgtaaatataatgcaaataaataaatatttaggtttttaaaaactg

SEQ ID NO: 1843 - DNA, 4033 bp, Homo sapiens
  source 1..4033: mol_type = genomic DNA
cgcagtactggacccgagcgcgacggtgcggctggcggacccgggctggcttgtggggaaacgaaactgagggaggaggcggcggctctggcagcggcggcgacagtgtcggcctgaccccccctccgctccccggcagctcgctctctcccctcagcttaacgatgaagaggagaactgacccagaatgcactgcccccatcaagaaacagaaaaaaagagttgcagagcttgccctgagcctcagctccacgtccgatgatgaacctccctcctctgtcagtcatggagcaaaagcatctactacaagccttagtgggtctgatagtgagaccgaggggaaacaacacagctctgactcttttgacgatgcattcaaagcagactctcttgtggaaggaacttcttctcgctattccatgtataatagcgtctcccagaagcttatggccaagatgggcttcagggaaggtgaaggattgggtaaatacagccagggtcggaaggacatcgttgaggcttccagtcagaaaggtcgaagaggcttgggtctgacactccggggctttgaccaggagctgaacgtggactggcgagatgagccagagcccagtgcttgtgagcaggtgtcatggtttccagaatgtaccactgaaattcctgacactcaggaaatgagcgattggatggtggtgggaaagagaaagatgattattgaagatgaaacagagttttgtggggaagagctgcttcacagtgtgttgcagtgtaagagcgtgtttgatgtcttggatggggaagagatgcggcgagctcggactcgggccaatccctatgagatgatccgaggagtcttctttctaaacagggcagcaatgaagatggctaacatggattttgtatttgatcgcatgttcacaaatccgcgggactcttatgggaagccactggtgaaggaccgggaagctgagcttctgtactttgctgatgtctgcgcaggcccaggtggcttctcagagtatgtgctgtggaggaagaagtggcatgcaaagggctttggaatgactttgaagggccctaatgacttcaagctggaggacttctactctgcttccagtgaactcttcgaaccctactatggtgagggtgggattgatggagatggagatatcacccgcccagagaacatctctgcttttcggaattttgtcctggataacacagatcgcaagggtgtccattttctgatggctgatgggggtttctcggtggaggggcaggagaacctgcaggagatcctcagcaagcagctgcttctgtgtcagttcctcatggcgctgtccattgtccggacaggaggccacttcatctgtaaaacctttgacctgttcacaccgtttagtgtggggcttgtctacctgctgtactgctgctttgaacgagtttgtctcttcaagcctattaccagccgtcctgccaactcagagaggtatgtggtgtgcaagggcctgaaggtgggcatagatgatgttcgggattacctcttcgcagtgaatattaaactcaatcagctgcggaacacggattccgacgtcaacttggtggtccccctggaggtgatcaagggagaccatgaatttactgactacatgatacggtccaatgagagccactgtagtctgcagatcaaagctctggcgaaaatccatgcctttgttcaagacacgacactgagtgagcctcgacaggcagagatacggaaggagtgcctccgactctgggggatcccagaccaggctcgtgtggctccttcttcctccgaccctaaatcgaagttctttgagctaatccagggcactgagattgacatcttcagctacaagcccacactgctcacctctaaaaccctggagaagatccgccctgtgtttgactaccgctgcatggtatctggcagtgagcagaagttcctcatcggcctggggaaatcccagatctacacatgggatggccgccagtcagaccgctggatcaagctagacctgaagacagagctgccccgggacactctgctatctgtggaaattgtgcatgagctgaaaggggaggggaaggcccagaggaagatcagtgccatccacatcctcgatgtccttgtgctgaatggcaccgacgttcgggagcagcactttaaccagcgaattcagcttgccgagaaatttgtgaaagccgtttccaagcctagtcggcccgacatgaatcccatcagggtgaaggaggtgtacagactggaagagatggagaagatttttgtcaggttggagatgaagatcatcaagggctccagtggcaccccaaagctcagctacacagggcgtgatgaccggcactttgtacccatgggcctctacatcgtcaggacagtgaatgagccctggactatgggattcagcaaaagcttcaagaagaagttcttctacaacaagaaaaccaaggactctacttttgacctccctgcagactccattgccccatttcacatttgctactatggccggctcttctgggagtggggggatggcattcgtgtgcatgactcccagaagccccaggaccaggacaagctgtccaaggaggacgtcctctccttcatccagatgcacagggcctaagagcctcagaatgtgccacccctgcagaatgccctgtcattcctgagatggggccacctggggcccacagtgctggcttcttccccctcttgaaaagggactggggagcattgcacctggcatgaggagtgggtggcctcctctccatcccctgaagagctcaggcagggccctgcagagaacactcatgttccttctgggacacctgcctgggaactttcccctgccaggactcagcctgaaggaagctgctcctgaggcaggtatgaggtcagtgcctagggcacgtgggactgatggaggacatatcagagtggcagagctgtgggctctgctgttctctcctgcatcctgtagactcacttttctgagttccatgcactgccctgagggtagccatgcccttgctttgcccaactttttattgggccatccctgagtgggtggagacctgctgtcatgagctggccaggagaacctgctataaaaaaatcaaggttttgtttctttgaacttactctgttttgatgccaaattggagaccattttcttgtctccttcccccactcatcctggccttccctggagttcttcctagcccagagctctgacagtccagcagggtgggaaggagggagtttgggcaaactctcatccctgataccacattgagatcctgggagccctcttttcgtactgagtatggagttgtagagccatcctaggtgccatccccttttggtccaaacattgggcagcgctagatggcaggaagcagccttgaagacccgtctttcccccacagcagcaggggccccagcagtaacaaagggtacctccaggggtttgggtagcgctgccctctggcagtcatgcaccgctgtctgccatagccgctctagggtcttggcagaattctgagcttgaagtgcagctcccttactaccctttcccttcctttttcttccctaataggaggtacaatctgcttttgtttgtcgttaagtggtcactcccatttcctttatcttggccgacaacacagagaggagggggagctgggcagtagcttggggtgggggtgggcacctgtggttgtttttaatgggaaatacctctcagagatgttcatgcaggctccctagggccccatcccagtgccaggctggtttccatggagatagggcactgaggctcccgtgaggttggaatcgacttcaccatgggggtccttcagccagcatccagctccccacccccaggctggcagtagcactgctgagatgctgtatttccacccaattctgggtatatcagtgtgtcttgcagaatcttggatcattaaagataaacatattttt

SEQ ID NO: 1844 - DNA, 522 bp, Homo sapiens
  source 1..522: mol_type = genomic DNA
gcaagaactcctgaaagagaaaacacttgctgagcagaatttggaggataccagacaacagctcttggcagccagaagcagccaggctaaggccattaacaccctggagactcgggtgagagaactggagcagaccttgcaggcctctgaggagcagctccaacagagcaagggcattgtggctgcccaggaaactcagatacaggagctcgtaagtgcttattggagctgctgcattccaggcccttaatgctttctctccaggcctttgcagatgctccaaactcattccgaacttcggcaacggtacctggacctgcccatagatacagttcttgtgctggatgtgagcaggccagcagcagggggtggagggagtcaggacctaatggtgggcctgagttacctgggaggtgcaccagcagctcctttccaccttacatcccaccttctggtccagcctggtcctggggctgtcagaggtggcagctccgctaggagtcaagcctcaacttgcaatca

SEQ ID NO: 1845 - DNA, 4801 bp, Homo sapiens
  source 1..4801: mol_type = genomic DNA
gcgctgggagacgtgcggttccgggtcgctgctcggctcgccggctgggcggtgggggttggtgacgcgggccggggctcacgagaggcccgggaggcggggctttgctggcttcccagagagaggcaggacagaatgctttgacctccaagctgttttaaatctagtagataagccagatcctgtgttgccataagcccttggcccacatttaagtgggaatgcagctagcttggatgtctgaaactttgtaggcgcctctgtctgaatcctgaacacaggcaccaggactactgagagctcgtcatctgtgcaggatagccacacagcaaacatgtttgcaaaactgaagaagaaaattgcagaagagactgctgttgctcagaggccaggaggtgctactaggatcccacggtctgtgagcaaggaatcagttgcctcaatgggagctgactcaggagatgactttgcttccgatggaagcagctccagagaagatctttcatcccagcttctgagaaggaatgaacagatacggaagttagaggccagactttctgactatgctgaacaggtccgaaacttgcagaagataaaagagaagcttgaaattgcattagaaaaacaccaggattcttccatgcggaaatttcaagagcagaatgagacattccaagccaacagagccaaaatggcagaaggactggctttggcattagccagaaaggaccaggaatggtcagaaaagatggatcagcttgaaaaggagaaaaatattctgacagcccagttacaggaaatgaagaaccagagtatgaatcttttccaaaggagagatgaaatggatgaattagaggggttccagcagcaggaactaagtaaaataaagcacatgcttttaaaaaaagaagaaagtctagggaaaatggaacaagaattggaggcacgaaccagagaacttagtcgtacccaggaggagttgatgaactccaatcagatgtcatcagacttaagccagaagctagaagaattgcagagacactactcaacgctggaagagcagagagatcatgtgatagcttcaaaaacaggtgcagaaagtaagatcacagccctggaacaaaaggaacaagagctccaagcactcattcagcagctttccattgatttgcaaaaggtcactgctgaaactcaagagaaagaagacgttatcacacatttgcaagagaaggttgcatccttggagaagagactagaacagaacttatcaggagaagaacacttgcaagaactcctgaaagagaaaacacttgctgagcagaatttggaggataccagacaacagctcttggcagccagaagcagccaggctaaggccattaacaccctggagactcgggtgagagaactggagcagaccttgcaggcctctgaggagcagctccaacagagcaagggcattgtggctgcccaggaaactcagatacaggagctcgctgccgccaaccaggagagcagccatgtgcagcagcaggcccttgctctggagcagcagttcttggagcgcacccaggcgctagaagcccagatagtggccctggagagaacgcgggcagctgaccagaccaccgcagagcaagggatgagacaactggagcaagaaaatgcagcccttaaagaatgcaggaatgaatatgaacgttctttacaaaatcaccaatttgaactaaagaagctgaaggaagaatggagccaaagagaaattgtgagcgtggccatggctcaagccctggaggaggtgcggaagcaaagggaagagttccagcaacaggcagctaacctgacagccataatagacgagaaggaacagaatctgcgggaaaaaaccgaagtgcttctccagaaagagcaggagattctccagctggagcgaggtcacaactctgccctgctgcagatacaccagctgcaggccgagctggaggccctgaggaccctcaaggcggaggaggctgcagtggtcgcggagcaggaggacctgctgaggctgcggggcccattgcaggccgaagcactctcagtcaatgagtcgcacgtgacctcgagggccatgcaggaccctgtgttccagcttccaactgcaggaagaacaccaaatggtgaggttggggccatggatctcacacagctacagaaggagaaacaggacttggagcagcaacttctggagaaaaataagaccataaagcagatgcagcagcggatgctggagctccggaagactctgcagaaggagctgaaaatcagacccgataatgagctcttcgaagtccgggagaaacctggacctgagatggcaaacatggcgccttccgtcacgaataacactgacctgacagatgcccgcgagatcaactttgagtaccttaaacatgtggttttaaaattcatgtcttgtcgcgaatccgaggcttttcatcttataaaagctgtgtcagtgttgctgaacttttcccaagaggaggagaacatgctcaaggaaactctggaatataagatgtcatggtttgggtccaaaccagctcccaagggcagcatccggccgtctatctcaaaccctcggataccatggtcctagaggggactacccaaggatggagctccgtgggttgacactttttctgtgaaaagaacactgacacaccagtctgggtgggtttttaatcactgtaactgcagtattttgtacaagtgtctaaacattgtttacaagactaaggcccacttccctgcaggctgacctgaacctcagggggtagctgatcctgtcattctggtcaccaaacaggagggtcctggcactacccagatttccacagtgctgctaatatcccagctccagccagcaccccatctgcacctgaatcctctaacttcacggtagcacttacagctgaagccatcagcatctggcaggcacacctgagtcaccatgtagcgctgctactggaggtagagacggccctttgagatggtgcccagcaggccaaacccacctgcctctgccaggaacagccaactccatgggaactctatgggagtggcttttaaaaattcagatgagttagaagctttttatcccttcctctcaagaaaatattctttcaccctgtctctcaaaccacctagaactttagaggatccatctttaagggtcggtgtggatgaatgagaaaatgcacctttctgacagtatctccactttacttaagaaaactagcaaatatatgaaaagacccttagtaccaaatacactcaattgcctttttaatgaatgtacttgtcttggataggttgctggtaaaccattttaaactattttttatagctgaagttcttcactactataaacatgtcttctgtactataaaatccatttaactggtgttcttaaaatcagagcgtccagaggaaattcttcctaaaactaggattcctgttcctttgtcttctcactcgcactctggcactgctccctctgaagtgcagtgggatctcgtgtgctttgtcttgattctgtgctgcgctgccgctgggcgatgcagaccacctgtcttctactgaaggacagtccgctgtctccagtgggggcagcagctgtcccccagcctcgatggagacactggggcagtctgccttgtctgtggagctgctctctctccctcatcccaccccaaatacttaaaatgacactacacccagacggcgcccagctggctgcagcacttgtagcatgcacatgactctggtagtaaccaacaaaaacttgttttatggattcctcgtttactgaggaaagggaacatgctggttctggaaaagccacaatattgaatctaaaaggaaaccgtttattgtttgatgaaagtttcactggttaaataaaaaactaaattaataactggagcctctaaatttattatccattatccagtgatggaaagttgtatttctcaatcatgcttagggccaaaataggtatataaaatgtgtcacagaaaaacacgcatttgcaacgttaacctaacgaaatttccatgaagaaccaagtcagggcagcatctccttagtcccagctcaggctctctgccttccagaggccgcttctccagtgactaacctcctcctctggctcctccttgcagacagttatcccttgtttagaacacgaatttccatttacctggtgggaacacgaaacaggagtctcttctgttctgcaagtttgatgggtaagaggtagccttttttcaaagtaggatttcctttttcaactgttccaggaaagaatctctaagactgggtagctcacagccagccaaaggcagctacatttccacagaagcccatccgctgcctccgtggcttctccagccattgaactggtcccacacgcaccccaggccccactcctcggcagtttcaggtgtagctgtggggcccgttcctaggtctgtactcactttagggaggcttcactgactaggctttcctcctgcatgttgaatttccttcagctttaagaggaagagtggaataaatattctaagtgatttaatgcactttgacttgtataaaactttctgtgttagcgacggtatctatagccctttatacgagcgatggatcttgagctctccttccatgttgtaaatagggattgtattcttgaaaactgctgtagcaaattcatctgtggtgcaatacactttttgattaaagctcttcaatccagatgcaa

SEQ ID NO: 1846 - DNA, 488 bp, Homo sapiens
  source 1..488: mol_type = genomic DNA
ggccaagatcaaggctcgagatcttcgcgggaagaagaaggaggagctgctgaaacagctggacgacctgaaggtggagctgtcccagctgcgcgtcgccaaagtgacaggcggtgcggcctccaagctctctaagatccgagtcgtccggaaatccattgcccgtgttctcacagttattaaccagactcagaaagaaaacctcaggaaattctacaaggcagcagctggtgggccctgcatacagatggacagagtactgcctcagcccccagcatgctcttgctaaccagagccgagggcaagaagtacaagcccctggacctgcggcctaagaagacacgtgccatgcgccgccggctcaacaagcacgaggagaacctgaagaccaagaagcagcagcggaaggagcggctgtacccgctgcggaagtacgcggtcaaggcctgaggggcgcattgtcaataaagcacagctggctgagactg

SEQ ID NO: 1847 - DNA, 3821 bp, Homo sapiens
  source 1..3821: mol_type = genomic DNA
gaaagctgccgctgaagctgccgccgttgcctccgccgccaagagtgagcgagcggacccgcgatggagaccatggcgagcccagggaaagacaattatcgaatgaagagctataagaacaatgctctaaaccctgaagaaatgagacgaagaagagaggaagagggcattcagctccggaagcagaagcgagagcaacaactttttaaacggagaaatgtggagctgattaatgaagaagctgccatgttcgatagtcttctcatggactcttatgtgagctctaccactggggagagtgtgatcacaagagagatggtggagatgctcttttctgatgattctgacctgcagttagcaaccacacagaaattccggaaactgctctccaaagagcctagtcctccaatagatgaagttatcaacactccaagagtggtggatcggttcgtggagtttctgaagaggaatgagaattgtacattacaggcagtctgggcactgggaaacatagctggagatagctctgtttgccgagattacgtcttgaactgttccatccttaatcctttgttaacactccttaccaagtccacacgactgacgatgacacggaatgcagtctgggccctgtcaaatctctgccgagggaaaaacccacccccagagtttgcaaaggtctctccttgtttgcctgtactgtctcgcctactcttcagcagcgactcggacttgctggcagatgcttgctgggccctttcttatctgtctgatggccccaatgagaagatccaggcagtcatagactccggagtctgccggagattggtagagctgctgatgcacaatgattacaaagtggcttctcctgccctgagagccgtgggtaacatcgtcactggggatgacatccagacccaggtcattcttaactgttcagccctaccttgccttctccacttgttgagcagtcccaaggagtcaatccggaaggaagcttgctggactatttcaaatattactgctggcaacagggctcaaatacaggctgttatagatgcaaatatcttccctgtgttgatcgaaatccttcagaaagcagagtttcgtacaaggaaagaggcagcctgggccatcaccaatgccacatcaggaggaacccctgagcagatcaggtacctggtctcactgggctgcatcaaacccctatgtgacttgctgactgtaatggattcgaagattgtgcaagtggccctcaatggactggagaacatcctgcggcttggagagcaagagggcaagcgcagtggctcaggggtcaatccttattgtggcctcatagaggaagcctatggcttggataaaattgagtttctccagagccacgagaaccaggagatctaccagaaggccttcgacctcattgagcactactttggtgtagaagacgatgatagcagcctggctccccaagtcgatgaaacgcaacagcagttcatcttccagcagcctgaggcccccatggagggcttccagctataatatctgcctccagggaggggaggggatgggaagcaccaccagccagcggaagagcagccctctggtgggcgggaaaccagtgtccccaccatcagccaccacacacctctgctgccctggagactgtgctcttgacctgctccgcccccttccctggagggagcaccctctggacagacagaaccatctgaggctcacctttgggttttgtgacaagaaggggacgtgttgggtttttcttccttacactatattttggctgcacacatgtctttaacccaggagcccaggggtagacaaaggaggactaaggtaatcaatttgcacctttttttatttttattttttttctttttttcttcagtggtgacttccttccctttatcttttttcattcttcccggtcctctgccctgatctgtgtaactcttatcttgggtacttgagcagacggtatattccagaggtgggaggtgggaggggaagggagaaatccaaaacaaagtgttcttgctctgacagaatattaatcttgtacgcttggattgagttatttaatttttttttcttttgcacatttttcttgtattaagattgctcttcccaagagccacaagttcctggttttagtaaacccagctgcctgcattgcctgggactagaggctggggaggctaccatgaaacaaaggtccctccctccctctgactctttgcccagacctctttagtttgggggatcctcctcactctcctgaagtgtctcaagtataccagtgggagtgcaggggaggagcacaggccttcagatggggcttcccacgtgtagctactgatcccatatttcctactcaccttccaaatggtgcgacccaacttcatttgtttacttgaaaattccccctcgaggttgagagaacctctgaggtggctgtattttctcctaagcttgagatagggggctgtggtccttcctttctcctgaggagaaagtccttgctctggtgacctgtaagttgcagaggagggtggagtgagagtgtcatgtattgggatagtcagggatccctgcctttggcctttcttcttcttcttcttcctcttccatagttggatcatgtatattttacttctaaaggagagaatgtcaaaaagttctgtatttttttatattctatatattaggtaggtcaatcttaattggtctcaagaggaagaactgtctgtcatttcggtaagtaggatactgtgaggaagaccaaaaagagatatggatgcttcctcgctcaggaggcctgagcttggtccttttcctctctgcttggattctggaccaccacctgggaccaaccttcagctctggaaccttcataaagcaggtcagcgtggcctgattgtcccaggacctgaagggagcaaggatggcctcagggcctggtgaagtctgctactctgtccttactgctgaacatcctgcttgtatcaggaaactcagaagcagtttgccttgtcaaattcaatctcaatggccattgtccacataactgatcacccatggctgcctctcctattatctattatcactgaaacttagtagcctgctttttttttttttttttttagagctattgcgtatcttccctgtttgggatccttgtacctggtttgggttttcccttccttgtgacaattataatccagatgcctcttctttctgtttgaattacggtagtgcattgccttagtggcttgcctgtgcctctgggtggattacatatgatagtaaagcccacctgtttggatgggagtagaggaagttggtgtagaccagctgtggagctgaaggcacagtctgccccacccccacctccccactgtggttagtcagaggcatcctgctccaagctctgcttttccttcctctgaaacaatgccattcttgcttctattgctacacatctccttctggctcaggtgaaatccatgcccttctgcttatagacctaaagttcaggtacttattattggccattgatcttgaatttgccctctcctagtgctgcagtcccacttcaaagccattttctgaggaggatggtttaggtctggcaattgtccttgaaaaatcccacccatgttgtaccaccttggtgagtcatatgccactcatcagcttgggaatgatggctgccaactcccaatctcccaggaaggcagggggcagaatctttttttcacttggcctgctacctccattaaaaaaccattctcttacagttt

SEQ ID NO: 1848 - DNA, 886 bp, Homo sapiens
  source 1..886: mol_type = genomic DNA
ctataaaaatgtgcccggcggcaaagctgcagaaggggcaccgctgagctgccgagaggaagctcgctctgcccggctgccctcttgtagtccgccggcgaggggcagttctcggtgaggaggaagagagcagcggacggcacagcacccgcgcgggccctcccacaacagctccagctggcagcatcacttcccgccaatttatccaacttctgccaaggctctgaaatgccaacaacgtcgaggcctgcacttgatgtcaagggtggcacctcacctgcgaaggaggatgccaaccaagagatgagctccgtggcctactccaaccttgcggtgaaagatcgcaaagcagtggccattctgcactaccctggggtagcctcaaatggaaccaaggccagtggggctcccactagttcctcgggatctccaataggctctcctacaaccacccctcccactaaacccccatccttcaacctgcaccccgcccctcacttgctggctagtatgcacctgcagaaacttaatagccagtatcaggggatggctgctgccactccaggccaacccggggaggcaggacccctgcaaaactgggactttggggcccaggcgggaggggcagaatcactctctccttctgctggtgcccagagccctgctatcatcgattcggacccagtggatgaggaagtgctgatgtcgctggtggtggaactggggttggaccgagccaatgagcttccggagctgtggctggggcagaatgagtttgacttcactgcggactttccatctagctgctaatgccaagtgtccctaaagatggaggaataaagccaccaattctgttgtaaataaaaataaagttacttacaaagag

SEQ ID NO: 1849 - DNA, 7378 bp, Homo sapiens
  source 1..7378: mol_type = genomic DNA
ccgtcctacagatccgccatattgtctactgaaagctgccgctgaagctgccgccgttgcctccgccgccaagagtgagcgagcggacccgcgatggagaccatggcgagcccagggaaagacaattatcgaatgaagagctataagaacaatgctctaaaccctgaagaaatgagacgaagaagagaggaagagggcattcagctccggaagcagaagcgagagcaacaactttttaaacggagaaatgtggagctgattaatgaagaagctgccatgttcgatagtcttctcatggactcttatgtgagctctaccactggggagagtgtgatcacaagagagatggtggagatgctcttttctgatgattctgacctgcagttagcaaccacacagaaattccggaaactgctctccaaagagcctagtcctccaatagatgaagttatcaacactccaagagtggtggatcggttcgtggagtttctgaagaggaatgagaattgtacattacagtttgaagctgcctgggctctaacgaatattgcctctggaacctctcagcagaccaaaattgtcattgaagcaggggctgtccccatttttatagagctgcttaattcagactttgaggatgttcaggaacaggcagtctgggcactgggaaacatagctggagatagctctgtttgccgagattacgtcttgaactgttccatccttaatcctttgttaacactccttaccaagtccacacgactgacgatgacacggaatgcagtctgggccctgtcaaatctctgccgagggaaaaacccacccccagagtttgcaaaggtctctccttgtttgcctgtactgtctcgcctactcttcagcagcgactcggacttgctggcagatgcttgctgggccctttcttatctgtctgatggccccaatgagaagatccaggcagtcatagactccggagtctgccggagattggtagagctgctgatgcacaatgattacaaagtggcttctcctgccctgagagccgtgggtaacatcgtcactggggatgacatccagacccaggtcattcttaactgttcagccctaccttgccttctccacttgttgagcagtcccaaggagtcaatccggaaggaagcttgctggactatttcaaatattactgctggcaacagggctcaaatacaggctgttatagatgcaaatatcttccctgtgttgatcgaaatccttcagaaagcagagtttcgtacaaggaaagaggcagcctgggccatcaccaatgccacatcaggaggaacccctgagcagatcaggtacctggtctcactgggctgcatcaaacccctatgtgacttgctgactgtaatggattcgaagattgtgcaagtggccctcaatggactggagaacatcctgcggcttggagagcaagagggcaagcgcagtggctcaggggtcaatccttattgtggcctcatagaggaagcctatggcttggataaaattgagtttctccagagccacgagaaccaggagatctaccagaaggccttcgacctcattgagcactactttggtgtagaagacgatgatagcagcctggctccccaagtcgatgaaacgcaacagcagttcatcttccagcagcctgaggcccccatggagggcttccagctataatatctgcctccagggaggggaggggatgggaagcaccaccagccagcggaagagcagccctctggtgggcgggaaaccagtgtccccaccatcagccaccacacacctctgctgccctggagactgtgctcttgacctgctccgcccccttccctggagggagcaccctctggacagacagaaccatctgaggctcacctttgggttttgtgacaagaaggggacgtgttgggtttttcttccttacactatattttggctgcacacatgtctttaacccaggagcccaggggtagacaaaggaggactaaggtaatcaatttgcacctttttttatttttattttttttctttttttcttcagtggtgacttccttccctttatcttttttcattcttcccggtcctctgccctgatctgtgtaactcttatcttgggtacttgagcagacggtatattccagaggtgggaggtgggaggggaagggagaaatccaaaacaaagtgttcttgctctgacagaatattaatcttgtacgcttggattgagttatttaatttttttttcttttgcacatttttcttgtattaagattgctcttcccaagagccacaagttcctggttttagtaaacccagctgcctgcattgcctgggactagaggctggggaggctaccatgaaacaaaggtccctccctccctctgactctttgcccagacctctttagtttgggggatcctcctcactctcctgaagtgtctcaagtataccagtgggagtgcaggggaggagcacaggccttcagatggggcttcccacgtgtagctactgatcccatatttcctactcaccttccaaatggtgcgacccaacttcatttgtttacttgaaaattccccctcgaggttgagagaacctctgaggtggctgtattttctcctaagcttgagatagggggctgtggtccttcctttctcctgaggagaaagtccttgctctggtgacctgtaagttgcagaggagggtggagtgagagtgtcatgtattgggatagtcagggatccctgcctttggcctttcttcttcttcttcttcctcttccatagttggatcatgtatattttacttctaaaggagagaatgtcaaaaagttctgtatttttttatattctatatattaggtaggtcaatcttaattggtctcaagaggaagaactgtctgtcatttcggtaagtaggatactgtgaggaagaccaaaaagagatatggatgcttcctcgctcaggaggcctgagcttggtccttttcctctctgcttggattctggaccaccacctgggaccaaccttcagctctggaaccttcataaagcaggtcagcgtggcctgattgtcccaggacctgaagggagcaaggatggcctcagggcctggtgaagtctgctactctgtccttactgctgaacatcctgcttgtatcaggaaactcagaagcagtttgccttgtcaaattcaatctcaatggccattgtccacataactgatcacccatggctgcctctcctattatctattatcactgaaacttagtagcctgctttttttttttttttttttagagctattgcgtatcttccctgtttgggatccttgtacctggtttgggttttcccttccttgtgacaattataatccagatgcctcttctttctgtttgaattacggtagtgcattgccttagtggcttgcctgtgcctctgggtggattacatatgatagtaaagcccacctgtttggatgggagtagaggaagttggtgtagaccagctgtggagctgaaggcacagtctgccccacccccacctccccactgtggttagtcagaggcatcctgctccaagctctgcttttccttcctctgaaacaatgccattcttgcttctattgctacacatctccttctggctcaggtgaaatccatgcccttctgcttatagacctaaagttcaggtacttattattggccattgatcttgaatttgccctctcctagtgctgcagtcccacttcaaagccattttctgaggaggatggtttaggtctggcaattgtccttgaaaaatcccacccatgttgtaccaccttggtgagtcatatgccactcatcagcttgggaatgatggctgccaactcccaatctcccaggaaggcagggggcagaatctttttttcacttggcctgctacctccattaaaaaaccattctcttacagtttaaaaaaaaaaaaaaaaaaaaagccttcccctacccaacctccgcccattgttctcttccaaagggcaatttagtaggatctactttgtacatctcaagtaagagttaagtccctgatacagggaccagtttcttagtgtaagacatacacatcctgcttgtccagctgttcctccaaaatctactttggcttcagctccgggtcctgtaccagatggaaaatgtttttggtgatctggctgctgcttaaagccagttttccctaagaactccaaaggctaaagtctactaggggcagagtgtgaggatagatttctaatcagagaaaagtggcctccaggagctttcatttatgtcttctccagaccaggttttcctgttatcttcctttaatcccctttcaaccaacaggtgaagttcttccagcccacagaggtagtaatatcatcttttctatctcctcctctcctttggccatgtaatgaagcaaaatattatttatttagcccaggcttgagagccactgtttgtggacagtcttcatctagattccataccctggcctaggcgaggtaaggctctctggttattgccaggatggagcccctctaccccagtctgctgtagggaataccctaattagttgaggcatgcttttggaatcctggcatgttggcatatggctggtctatcctttttaagatctctggttgggggtatctggatatggattaggagggacaaggagcctttttcttggctaatgttttccaatacttttttgaatggtgccagcccctccaggcatcccacccccaaatcatcatctttagtactaacagggtgtctggtcttagaagcctcccttcagatcccagctgaccctggtgactgcctggccttgatgttggctgcagccttctgatagaaccacatggattccacccacagctggccaggcttgttacatgggtcagggaatacaaatggcccccccccagggagcaggtgttggcctcagttttcagggacccttggtgttgctccttacctagagcccattaatctaccccatcaactctctgccatgaaagccatcttccaggagccctgttttttggagctgaactgcacagattatagctgctattgtacttaaataagggagaggaaaagaaggttctcaggcacagactttctatttttctcaagccaaaccagtttaaaatgtctagcagaatgaactgtatttccatttcttcatgtctacctgccttccccccacaccctaaagttgtacttgtttctagcaaactagaaggaaaagataggaaagcctggcactactaacctcacctctcatacacctctttgaaggccccagctcttttgttcaggcctctcttctcccctagactcactcagcttggtatccatcatcttgagcattcttcagtagattcatctagggttcagattccagactctcagctgaagacagggagccaatttcccccaggtccctgcaggtaatccagggaccccatagggagaacaggctgactggggcattaggaatgtttgtacctctctgcttccctggcagcctggggaagggtgcagggctcagtgcgctaaaccatggtaaacatcttcaatagaactaccctagaatttagtgagtgtgagactgagatattgctcagaataaatttattccatagccatttaggattgcatgttctggaccaaccttgtccagtatgttttctgtttgagctttttcattcttttgttaagccaacaagttgagaatttggccctgctgggatccatgtagtgggcactagctgctctttggccaaggccttcataaatgattcagtctctcattatctgtcctctagccccacaccctgatttagaccgtggcaaaggaagaacttgaggtcaagaccaaccaaatctgtgaattaaagctgttatttttttctctgcaagggcgctttgcttcaggtctgggctatgtgcagaacctaagcaggctgtgagagttagaagaggcagtattacatgttaggcccagaacaccatgggaaaaggtttatgtagtgtatcttagtggcctgcctagctgcctctgggccaggctgacttctgatgtccacattagctcgtacctgaaccctgttgctgaatgccagccctgttctcctgtaactattatatacgccatggcctggggggcattgaaggaagtaagctctcagagatcctaacactggctgggaacctctgactcagagcatgtctttaaagagtccacatctggccaggcgcggtggcacatgcctgtaatcccagcactttgggaggccgaggcgggtggatcacgaggtcaggagtttgagaccagcctggcaacatagtgaaaccccatctctaataaaaatacaaaaaattagctgggcgtggtggcaggcgcctgtaatcccagctacttgggaggctgagacaggagaatcacttgaacccaggaggcggaggttgcagtgagccaagatcatgccactgcactccagcttgggtgacagtgcgagactccatctcaaaaaaaaaaaaaaaaaaaaaatccacatcttcagctgggcgcggtggctcatgcctgtaatcctagcactttgggaggctgaggcgggcagatcacttgaggttaggggttcaaaaccagcctgaccaacatagtaaaaccccgtccctacaaaaataaaaaaataaaaaaaataagccaggtgtggtggtgggcacctgtgatctcagctacgtgggaggctgaggcaggagaatctcttgaacctaggaggcagaggttgcagtgagccaagattgtgccagcctgggcgacagggtgaggctcttgtctcaaaaaaaaaagtccacatcttcatgaaccctcagactctggagttgggtgtcggcttttttagccagcttttgtgggaattgcctttgacctattaaagaaggaaagtgggtaatggagtcccagccactcaagagactggatatcccccgagaatggcttgggttaccagctatggacccttggaagatgaatctaatccttctcactggtttttctttgcaaattcatttgcttttatttttctaataacaataaactctattttccatgttctcagggcccctgggtagacagacacagcttgatttcagagcagacataggcgaagaaaacatggcattgagtgtgctgagtccagacaaatgttatttatatacacatccaaatttgaagagaaaatgtatttctttaggtttcaaacactgtaatagatataaagcaaaaataaaaacctgttgcaaagttctaaa

SEQ ID NO: 1850 - DNA, 3230 bp, Homo sapiens
  source 1..3230: mol_type = genomic DNA
ggggtcctggcgagaagcgagccggcggcctgaggaggcgactgactgagcagcgcacccggggagcaaggaggcgcggtgaactgagcggcccctgagctgacagatacactgcgcagctggaacggcgagcgagccgacgggcgagtgaggggcgcagccatgatcacctcggccgctggaattatttctcttctggatgaagatgaaccacagcttaaggaatttgcactacacaaattgaatgcagttgttaatgacttctgggcagaaatttccgagtccgtagacaaaatagaggttttatacgaagatgaaggtttccggagtcggcagtttgcagccttagtggcatctaaagtattttatcacctgggggcttttgaggagtctctgaattatgctcttggagcaggggacctcttcaatgtcaatgataactctgaatatgtggaaactattatagcaaaatgcattgatcactacaccaaacaatgtgtggaaaatgcagatttgcctgaaggagaaaaaaaaccaattgaccagagattggaaggcatcgtaaataaaatgttccagcgatgtctagatgatcacaagtataaacaggctattggcattgctctggagacacgaagactggacgtctttgaaaagaccatactggagtcgaatgatgtcccaggaatgttagcttatagccttaagctctgcatgtctttaatgcagaataaacagtttcggaataaagtactaagagttctagttaaaatctacatgaacttggagaaacctgatttcatcaatgtttgtcagtgcttaattttcttagatgatcctcaggctgtgagtgatatcttagagaaactggtaaaggaagacaacctcctgatggcatatcagatttgttttgatttgtatgaaagtgctagccagcagtttttgtcatctgtaatccagaatcttcgaactgttggcacccctattgcttctgtgcctggatccactaatacgggtactgttccgggatcagagaaagacagtgactcgatggaaacagaagaaaagacaagcagtgcatttgtaggaaagacaccagaagccagtccagagcctaaggaccagactttgaaaatgattaaaattttaagtggtgaaatggctattgagttacatctgcagttcttaatacgaaacaataatacagacctcatgattctaaaaaacacaaaggatgcagtacggaattctgtatgtcatactgcaaccgttatagcaaactcttttatgcactgtgggacaaccagtgaccagtttcttagagataatttggaatggttagccagagccactaactgggcaaaatttactgctacagccagtttgggtgtaattcataagggtcatgaaaaagaagcattacagttaatggcaacataccttcccaaggatacttctccaggatcagcctatcaggaaggtggaggtctctatgcactaggtcttattcatgccaatcatggtggtgatataattgactatctgcttaatcagcttaagaacgccagcaatgatatcgttagacacggtggcagtctgggccttggtttggcagccatgggaactgcacgtcaagatgtttatgatttgctaaaaacaaacctttatcaggatgatgcagtaacaggggaagcagctggcctggccctaggtttggttatgttgggctctaaaaatgctcaggctattgaggacatggttggttatgcacaagaaactcaacatgagaagattctgcgtggtcttgcagttggcatagctttagtaatgtatgggaggatggaagaggctgatgctctcattgaatctctctgtcgtgacaaggacccaattcttcgaaggtctggaatgtatactgtagccatggcttattgtggctctggtaacaacaaagcaattcgacgcctgctacatgttgctgtaagtgatgttaatgatgatgtcaggagggcagcagtagaatcacttgggttcattctattcagaacccctgaacagtgcccaagtgttgtctctttgttgtcagagagttacaaccctcatgtgcgctacggagctgcaatggccttggggatatgctgtgctggtacaggaaacaaggaagccattaatttgctagaaccaatgacaaacgaccccgtgaactacgtgaggcaaggggcactcatagcttcagctctcatcatgatccagcagactgaaatcacttgtccaaaggtgaatcagttcagacagctgtattccaaagtcatcaatgataagcatgatgatgtcatggccaagtttggcgctattctggcccagggcatactggatgcaggtggtcataatgtcacaatctccttgcagtccaggactgggcatactcatatgccttctgtggttggcgtccttgtatttacccagttttggttctggtttcctctttcacacttcctgtcattggcttatacccctacctgtgtcattggccttaacaaggacttaaaggtttctactgctgtattatctataactgccaaggctaaaaagaaggaaaaagaaaaggaaaaaaaggaggaggagaaaatggaagtggatgaggcagagaaaaaggaggaaaaagagaagaaaaaagaacctgagccaaacttccagttattggataacccagcccgagttatgcctgcccagcttaaggtcctaaccatgccggagacctgtagataccagcctttcaaaccactctctattggaggcatcatcattctgaaggataccagtgaagacattgaggagctggtggaacctgtggcagcacatggcccaaaaatcgaggaggaggaacaagagccagaacccccagaaccatttgagtatattgatgattaagggccagaggatctcacttgcttatctgaagaagattgtccaggctcatattgggaatgcttatgaggaaattcatgccgagacctgctattcaatgcatgtatcgttgcctctgcactgacctgaagaaccctgtctccaagtctttggttgaagagaagatatatgactgttgagtgtgctctttcacagaacttggttttcaaataaatataagatctccagatggacaagacatttgtttttcagcctgggtttttaataaatgtatctaatcctccccacaccatgaaatgcct

SEQ ID NO: 1851 - DNA, 2003 bp, Homo sapiens
  source 1..2003: mol_type = genomic DNA
aattagttgctaaagatgccagagtgtgtgcacgtacaggctttttctttcccctccccctttcttccttttcccaagccccctcttctccctgtttcccctcctactcctttatctcctccctccgtgtcttagttctgcagtacgcgggttgaagcacattcctgctttgcaaggctttctgctaaggatgtattgtggcttttgtttggattgcagcatgcagaattacaggagtctccccaggacagtgctatcacccgggatattaaccgaacattcccagcccatgactactttaaggacacaggaggagatggacaagattccttatataaaatatgcaaggcttattctgtgtatgatgaagagattggttattgccagggccagtcatttcttgctgctgtgctccttctccatatgcctgaagaacaggcattcagtgttctggtcaagatcatgtttgactatgggctcagggaacttttcaagcaaaacttcgaagatttgcattgcaaattttaccagttggagcgcctcatgcaggaatacattcctgacctgtacaaccacttcctggatataagccttgaagcacacatgtatgcctcccagtggtttcttactcttttcactgcaaaattccctctctacatggtcttccatatcatcgacctgcttttatgtgagggaataagtgttatttttaatgtcgcccttggattattaaagacttcgaaagatgacctgctgttgacagactttgaaggtgccttgaagttctttagggttcagcttcctaagagataccgctcagaagaaaatgcaaaaaaactaatggaattagcctgcaacatgaagattagtcagaagaagttgaaaaaatacgagaaagaatatcacaccatgagggaacagcaggcccagcaagaagaccccatcgagcgatttgagcgggagaataggcgtctacaagaagctaacatgaggttggaacaggaaaacgatgacttagcccatgagctggtgaccagcaagattgcactacggaaggacctggataacgctgaggaaaaggcagatgctctgaataaggagctgctgatgaccaaacagaagttgattgatgcagaagaagagaaaagacggctggaagaagagtctgctcagttaaaagaaatgtgccgtcgggaactcgacaaggcagaatctgagattaaaaaaaacagttctatcattggtgactataagcagatttgttctcagttgagtgaaagattggagaagcagcagacagccaataaggtggaaattgagaaaattcggcaaaaagtggatgactgtgagcggtgccgggaatttttcaacaaagaagggcgtgtaaaaggcataagctcaaccaaggaggttttagatgaggacacggatgaagagaaagagacgctcaagaaccagctgagagaaatggagctagaactggcacagaccaaactccagctggtggaggccgagtgtaagatacaggacttggaacaccatttagggcttgccctcaatgaggtgcaggcagccaagaagacgtggtttaaccgaacactgagctccataaagacagcaaccggggttcaagggaaagagacttgctgagagcagctgccgcctcccgacaccttcagaaaacacgacaccttttgttgccttctttggccagatgtgtgattctgtgacttgtcccaggaccagaatgtacctaagtcagatccatagacgcatgttggtaggtcactggaccagagcttgtgaagcaggcaacctctggggtaagactactgatactaacaggcctgctagctcagccgacgctctggacactctagaaatcactcctcagtgtgacctcccaggcctcttccccgtgtacgtcaacacctcacccagcctaaaggctgagtttacatgatcagagttaggggatccttcagtctgttgattttttttct

SEQ ID NO: 1852 - DNA, 4997 bp, Homo sapiens
  source 1..4997: mol_type = genomic DNA
ggggacagggcggtttgggaggcccaggcggcggagcctccgggacggcgagcggcgggcggcggaggaggagacggcaggtcgggcattaaaaaatatttaatcattcatgtgttgagactcattcttgagttatggatgacaaggcttctgttggaaaaatcagtgtctcttcagactcagtatctactcttaatagtgaagattttgtcttggtttccaggcaaggagatgagacaccatctacaaataatggaagtgatgatgagaaaacaggactcaagattgtagggaatggaagtgaacagcagctgcaaaaagagctagcagatgtactgatggatcctccaatggacgaccagccaggggaaaaggagcttgtgaaaaggtcacaactggatggtgaaggagatgggcctctttctaatcagctctccgcttcatccaccattaaccctgtgccattagtagggctccaaaaaccagagatgagcctaccagtgaaacctggacaaggagattctgaagcttcaagtcctttcacaccagtggccgatgaggacagcgtagttttcagtaaactgacttacttaggctgtgcctcggtaaatgctcccaggagtgaagtggaagccttaaggatgatgtccatcttaagaagccagtgtcagatttcactagatgttaccctttcagtgccgaatgtgtctgaaggaattgtgagactcttagatcctcagacaaacactgaaatagcaaactaccctatctacaaaatcctcttctgtgtcagagggcatgatggaactcctgagagtgactgttttgctttcactgaaagtcattacaatgcagagctcttcagaatacacgtcttccggtgtgaaatacaagaagctgtaagccggatactttacagttttgccactgccttccgccgttctgccaagcagaccccactttcagccactgctgcaccccagactcctgacagtgacatctttaccttctctgtgtctttagaaataaaagaagatgatggtaaaggttattttagtgcagttcccaaagataaggacagacagtgctttaaactacgccaaggaattgataagaagattgtcatctatgtgcagcaaacaactaataaagaacttgccattgaaaggtgttttggtcttctccttagtccaggaaaagatgtacgaaatagtgacatgcacttattagatttggaatctatgggcaaaagttcagatggaaagtcgtatgttattacggggagctggaatccaaaatccccacattttcaagttgtaaatgaagaaactcctaaagataaagtcctgtttatgaccacagctgtagatttggtaataacagaagtacaggagcctgttcgatttctcctggagacaaaagtccgcgtttgctcacctaatgaaagattattctggcccttcagcaaacgtagtactactgaaaatttctttttgaaactaaaacagataaagcaaagggagagaaagaataatactgacactttatatgaagttgtatgcttggaaagtgaatcagaaagagagaggaggaaaactacagccagtccttcagttcgcctgccacagtctggatcgcaaagttcagtgataccttctcctccagaagatgatgaagaggaagataatgatgaacctctcctgagtggatctggtgatgtatccaaagaatgtgcagaaaaaattcttgaaacatggggagaactgttgtcaaaatggcatctcaacttgaatgtgagaccgaagcagttgtcatccttagtaagaaacggtgtccctgaagctcttcgaggagaagtctggcagctgctagcaggctgtcataacaatgaccacctggtagagaaataccgcattcttatcacaaaggagtctccccaggacagtgctatcacccgggatattaaccgaacattcccagcccatgactactttaaggacacaggaggagatggacaagattccttatataaaatatgcaaggcttattctgtgtatgatgaagagattggttattgccagggccagtcatttcttgctgctgtgctccttctccatatgcctgaagaacaggcattcagtgttctggtcaagatcatgtttgactatgggctcagggaacttttcaagcaaaacttcgaagatttgcattgcaaattttaccagttggagcgcctcatgcaggaatacattcctgacctgtacaaccacttcctggatataagccttgaagcacacatgtatgcctcccagtggtttcttactcttttcactgcaaaattccctctctacatggtcttccatatcatcgacctgcttttatgtgagggaataagtgttatttttaatgtcgcccttggattattaaagacttcgaaagatgacctgctgttgacagactttgaaggtgccttgaagttctttagggttcagcttcctaagagataccgctcagaagaaaatgcaaaaaaactaatggaattagcctgcaacatgaagattagtcagaagaagttgaaaaaatacgagaaagaatatcacaccatgagggaacagcaggcccagcaagaagaccccatcgagcgatttgagcgggagaataggcgtctacaagaagctaacatgaggttggaacaggaaaacgatgacttagcccatgagctggtgaccagcaagattgcactacggaaggacctggataacgctgaggaaaaggcagatgctctgaataaggagctgctgatgaccaaacagaagttgattgatgcagaagaagagaaaagacggctggaagaagagtctgctcagttaaaagaaatgtgccgtcgggaactcgacaaggcagaatctgagattaaaaaaaacagttctatcattggtgactataagcagatttgttctcagttgagtgaaagattggagaagcagcagacagccaataaggtggaaattgagaaaattcggcaaaaagtggatgactgtgagcggtgccgggaatttttcaacaaagaagggcgtgtaaaaggcataagctcaaccaaggaggttttagatgaggacacggatgaagagaaagagacgctcaagaaccagctgagagaaatggagctagaactggcacagaccaaactccagctggtggaggccgagtgtaagatacaggacttggaacaccatttagggcttgccctcaatgaggtgcaggcagccaagaagacgtggtttaaccgaacactgagctccataaagacagcaaccggggttcaagggaaagagacttgctgagagcagctgccgcctcccgacaccttcagaaaacacgacaccttttgttgccttctttggccagatgtgtgattctgtgacttgtcccaggaccagaatgtacctaagtcagatccatagacgcatgttggtaggtcactggaccagagcttgtgaagcaggcaacctctggggtaagactactgatactaacaggcctgctagctcagccgacgctctggacactctagaaatcactcctcagtgtgacctcccaggcctcttccccgtgtacgtcaacacctcacccagcctaaaggctgagtttacatgatcagagttaggggatccttcagtctgttgattttttttctaaaccttttttttttaatatacatatatatatatatatatatatatatatatatatatatatatatatatagtgggggtggggcaagggatcagaaattcaaataattcttttctgcttcaatgccagcagaaggtcccccaggtagacatggagaagcactttgttttaaataggagggtttcatagttgcatctgaagccacctggttctgttaaactgtatggtgcaggttttgggtttggcattattcatgtttctgatcaattctatgcaactctcatagttcctgttactttttagcattagctgccaaatgacttcaaaaggctggggtgggtgacttgactgtgagactggattataacatggacaaatcttattttgcttaatgtgtttgtgtgtgtgtgtgtgtgtgtgtgtgtgtgtgtatgtatatatatatataaatatctttcccaatatgccccgttgacagtgtttaaattccagactaggactgctgatctgcacaatttaattatgtggttattcgagcacttaatttcactcaaggttcattgggctctgctctcctccctgccattacgggagctgtggacagagctccctcacttcaagattcctagtgtttttgcacaacaggttgtccaagtgagaaagactgagttgcgtgtctgtaaatgtctgcgcagggtgcacatgctgcgaggtctccatcctccgggcctgtccctcccagatgggctgggcctttgggccctcctcagagtatgcctgggtacaaacctcactgttcagatgggctgtaagttctcacttcaaagctatggaatggattttagcacctttaaaaaaaaaaaaaactttgacttttaatttatatagtgatatgctgacaggctgacacgcagatggttttgtcctcttttctgcgttcagtgttgaggcggctgcttacaagaggcactggttttgtatataaagacactcgggttgttttgtagctctttttcttattggctgtactaacgcttgctgaggttatctgtaataagggaggtaacaagtggcaaccccctccccaccaaccatcccctttgctgctttctgtgtctttcttgttcagttaccaaaatagctgtaagcctatctaatgctaggtgtgtggacattgtgctaaggtagtttcagtgtgtcaactttatgaattgaaatataaaccagtaaaattgtattactgtttcttttgttggttttattttaacagcatattgattaaatattttggtacaaacaaa

SEQ ID NO: 1853 - DNA, 2980 bp, Homo sapiens
  source 1..2980: mol_type = genomic DNA
taaaggtgtagctagcttgaaccagagtgcactgagccgtccaatgcaaaggaaactggtgacacttgtaaactgtcaactggtggaggaagaaggtcgtgtaagagccatgcgagcagctcgttcccttggagaaagaactgtaacagaactgatattacagcaccagaaccctcagcagttgtctgccaatctatgggccgctgtcagggctcgaggatgccagtttttagggccagctatgcaagaagaggccttgaagctggtgttactggcattagaagatggttctgccctctcaaggaaagttctggtactttttgttgtgcagagactagaaccaagatttcctcaggcatcaaaaacaagtattggtcatgttgtgcaactactgtatcgagcttcttgttttaaggttaccaaaagagatgaagactcttccctaatgcagctgaaggaggaatttcggagttatgaagcattacgcagagaacatgatgcccaaattgttcatattgccatggaagcaggactccgtatttcacctgaacagtggtcctctcttttgtatggtgatttggctcataaatcacacatgcagtctatcattgataagctacagtctccagagtcatttgcaaagagtgtccaggaattgacaattgttttgcaacgaacaggtgacccagctaacttaaatagactgaggcctcatttagagcttcttgcaaacatagaccctaatccagacgctgtttcaccaacttgggagcagctggaaaatgcaatggtagctgttaaaacagtagttcatggccttgtggacttcatacaaaattatagtagaaaaggccatgagacccctcagcctcagccaaacagcaaatacaagactagcatgtgccgagatttgcgacagcaagggggttgtccacgaggaacaaattgtacatttgcccattctcaggaagagcttgaaaagtatcgattaaggaacaaaaagatcaatgccactgtaagaacgtttcctcttctaaataaagttggtgtaaacaacactgtcacaaccacagccggaaatgtcatttctgtcataggaagtactgaaacaacagggaaaattgttccaagtacaaacggaatttcaaatgcagaaaacagtgtttcccagctaatctcacgtagtactgacagtaccttaagagctctggagaccgtgaagaaagtgggaaaggttggcgctaatggtcagaatgctgctgggccctctgcagattctgtaactgaaaataaaattggttctccacccaagactcctgtaagtaatgtagcagctacctcagctgggccctctaatgttggaacagagctgaattctgtgcctcaaaaatccagcccatttctaactagagtaccagtatatcctccgcattctgaaaacattcagtattttcaagatccaaggactcagataccctttgaagtcccacagtacccacagacaggatactatccaccacctccaacggtaccagctggtgtggctccctgtgttcctcgctttgtgaggtccaataacgttccagagtcctccctcccacctgcttccatgccatatgccgatcattacagtacattttcccctcgagatcgaatgaattcttctccttaccagcctcctcctccgcagccgtatggaccagttcctccagtaccttctggaatgtatgctcctgtgtacgacagcaggcgcatctggcgcccacctatgtaccaacgagatgacattattagaagcaattctttacctccaatggatgtgatgcactcatctgtctatcagacatctttgcgggaaagatataactcattagatggatattattcggtggcttgtcagccaccaagtgagccaaggacaactgtgcctttaccaagggaaccttgtggtcatttgaagaccagttgcgaggagcagataagaagaaagccagatcagtgggcacagtaccacactcagaaagcacctcttgtctcttcaactcttcctgtggcaacacagtcaccaacaccaccttctcctctgttcagtgtagactttcgtgcggatttctcagagagtgtgagtggtacaaaatttgaagaagatcatctttcccattattctccctggtcttgtggcaccataggctcctgtataaatgccattgattcagagcccaaagatgtcattgctaattcaaatgctgtgttaatggacctggacagtggtgatgttaagagaagagtacatttatttgaaacccagagaaggacaaaagaagaagatccaataattccctttagtgatggacccatcatctcaaaatggggtgcgatttccagatcttcccgtacaggttaccataccacagatcctgtccaggccactgcttcccaaggaagtgcgactaagcccatcagtgtatcagattatgtcccttatgtcaatgctgttgattcaaggtggagttcatatggcaacgaggccacatcatcagcacactatgttgaaagggacagattcattgttactgatttatctggtcatagaaagcattccagtactggggaccttttgagccttgaacttcagcaggccaagagcaactcattacttcttcagagagaggccaatgctttggccatgcaacagaagtggaattccctggatgaaggccgtcaccttaccttaaaccttttaagcaaggaaattgaactaagaaatggagaggtaaagaaactgaacctttcggcttcatgcttaatgtatttgttttctgctgctgcatcttggttataccattactgagtgcattttggtgtgcctatctctgatggatgattgattgcttttaaaacttataacagaaataaaattgtaatcccagatttcttaaataattctttaactagatcatcgggatttttgtttttttga

SEQ ID NO: 1854 - DNA, 1678 bp, Homo sapiens
  source 1..1678: mol_type = genomic DNA
gtcgcggccttcgccgccgccaacggggctgtccctgtagctcccgatggagtttgaggtcgtgaaacctccgccgagctctgccccggcgagacgaggcgcctccgtcgccaagccgcgccgtcgcggggctcccgggagcggcccttagcgaccccgcccgggccccctcagcttacaaaacactacacagcaaaataatgatctgctagactgctaacccgagcatccagcttccacaatgcctgtgcaggcagctcaatggacagaatttctgtcctgtccaatctgctataatgaatttgatgagaatgtgcacaaacccatcagtttaggttgttcacacactgtttgcaagacctgcttgaataaacttcatcgaaaagcttgtccttttgaccagactgccatcaacacagatattgatgtacttcctgtcaacttcgcacttctccagttagttggagcccaggtaccagatcatcagtcaattaagttaagtaatctaggtgagaataaacactatgaggttgcaaagaaatgcgttgaggatttggcactctacttaaaaccactaagtggaggtaaaggtgtagctagcttgaaccagagtgcactgagccgtccaatgcaaaggaaactggtgacacttgtaaactgtcaactggtggaggaagaaggtcgtgtaagagccatgcgagcagctcgttcccttggagaaagaactgtaacagaactgatattacagcaccagaaccctcagcagttgtctgccaatctatgggccgctgtcagggctcgaggatgccagtttttagggccagctatgcaagaagaggccttgaagctggtgttactggcattagaagatggttctgccctctcaaggaaagttctggtactttttgttgtgcagagactagaaccaagatttcctcaggcatcaaaaacaagtattggtcatgttgtgcaactactgtatcgagcttcttgttttaaggttaccaaaagagatgaagactcttccctaatgcagctgaaggaggaatttcggagttatgaagcattacgcagagaacatgatgcccaaattgttcatattgccatggaagcaggactccgtatttcacctgaacagtggtcctctcttttgtatggtgatttggctcataaatcacacatgcagtctatcattgataagctacagtctccagagtcatttgcaaagagtgtccaggaattgacaattgttttgcaacgaacaggtgacccagctaacttaaatagactgaggcctcatttagagcttcttgcaaacatagaccctaatccagacgctgtttcaccaacttgggagcagctggaaaatgcaatggtagctgttaaaacagtagttcatggccttgtggacttcatacaaaattatagtagaaaaggccatgagacccctcagcctcagccaaacagcaaatacaagactagcatgtgccgagatttgcgacagcaagggggttgtccacgaggaacaaattgtacatttgcccattctcaggaagagcttgaaaagtatcgattaaggaacaaaaagatcaatgccactgaagtactgaaacaacagggaaaattgttccaagtacaaacggaatttcaaatgcagaaaacagtgtttcccagctaa

SEQ ID NO: 1855 - DNA, 9248 bp, Homo sapiens
  source 1..9248: mol_type = genomic DNA
agccaagtcttgtcagagatttcctctttcaggtggcaaagctgttttcttcacacttgagtctctacaatattgtttggatcagtagtttccaaagttcattaactcctggccatactttattatgttttggggtactggttatccaagggaaacacttttttaaacaacaaaacaaaaaaaccgcccagcagtccaaagtaatttgtgttcctaaaaatggaatatggaaagttaatttgcttgtttgatgtggtcgttgagaaaaatacataaaagctttgatgtttattatgtgagcaaccaatataaatacagtttagttgaaaggaacactattaaggtattgtttccaggcagaatttcagaaatgtaattaattcagcaaataggttttttaaaaaagacatccaaaggttataaaattatttagaagtattttaggtctgaagctgtaatagttgacttaagcaattaactcttcaaaggtgaatgatgaatatgtggttaattcatacttttgtccatttctagcttacaaaacactacacagcaaaataatgatctgctagactgctaacccgagcatccagcttccacaatgcctgtgcaggcagctcaatggacagaatttctgtcctgtccaatctgctataatgaatttgatgagaatgtgcacaaacccatcagtttaggttgttcacacactgtttgcaagacctgcttgaataaacttcatcgaaaagcttgtccttttgaccagactgccatcaacacagatattgatgtacttcctgtcaacttcgcacttctccagttagttggagcccaggtaccagatcatcagtcaattaagttaagtaatctaggtgagaataaacactatgaggttgcaaagaaatgcgttgaggatttggcactctacttaaaaccactaagtggaggtaaaggtgtagctagcttgaaccagagtgcactgagccgtccaatgcaaaggaaactggtgacacttgtaaactgtcaactggtggaggaagaaggtcgtgtaagagccatgcgagcagctcgttcccttggagaaagaactgtaacagaactgatattacagcaccagaaccctcagcagttgtctgccaatctatgggccgctgtcagggctcgaggatgccagtttttagggccagctatgcaagaagaggccttgaagctggtgttactggcattagaagatggttctgccctctcaaggaaagttctggtactttttgttgtgcagagactagaaccaagatttcctcaggcatcaaaaacaagtattggtcatgttgtgcaactactgtatcgagcttcttgttttaaggttaccaaaagagatgaagactcttccctaatgcagctgaaggaggaatttcggagttatgaagcattacgcagagaacatgatgcccaaattgttcatattgccatggaagcaggactccgtatttcacctgaacagtggtcctctcttttgtatggtgatttggctcataaatcacacatgcagtctatcattgataagctacagtctccagagtcatttgcaaagagtgtccaggaattgacaattgttttgcaacgaacaggtgacccagctaacttaaatagactgaggcctcatttagagcttcttgcaaacatagaccctaatccagacgctgtttcaccaacttgggagcagctggaaaatgcaatggtagctgttaaaacagtagttcatggccttgtggacttcatacaaaattatagtagaaaaggccatgagacccctcagcctcagccaaacagcaaatacaagactagcatgtgccgagatttgcgacagcaagggggttgtccacgaggaacaaattgtacatttgcccattctcaggaagagcttgaaaagtatcgattaaggaacaaaaagatcaatgccactgtaagaacgtttcctcttctaaataaagttggtgtaaacaacactgtcacaaccacagccggaaatgtcatttctgtcataggaagtactgaaacaacagggaaaattgttccaagtacaaacggaatttcaaatgcagaaaacagtgtttcccagctaatctcacgtagtactgacagtaccttaagagctctggagaccgtgaagaaagtgggaaaggttggcgctaatggtcagaatgctgctgggccctctgcagattctgtaactgaaaataaaattggttctccacccaagactcctgtaagtaatgtagcagctacctcagctgggccctctaatgttggaacagagctgaattctgtgcctcaaaaatccagcccatttctaactagagtaccagtatatcctccgcattctgaaaacattcagtattttcaagatccaaggactcagataccctttgaagtcccacagtacccacagacaggatactatccaccacctccaacggtaccagctggtgtggctccctgtgttcctcgctttgtgaggtccaataacgttccagagtcctccctcccacctgcttccatgccatatgccgatcattacagtacattttcccctcgagatcgaatgaattcttctccttaccagcctcctcctccgcagccgtatggaccagttcctccagtaccttctggaatgtatgctcctgtgtacgacagcaggcgcatctggcgcccacctatgtaccaacgagatgacattattagaagcaattctttacctccaatggatgtgatgcactcatctgtctatcagacatctttgcgggaaagatataactcattagatggatattattcggtggcttgtcagccaccaagtgagccaaggacaactgtgcctttaccaagggaaccttgtggtcatttgaagaccagttgcgaggagcagataagaagaaagccagatcagtgggcacagtaccacactcagaaagcacctcttgtctcttcaactcttcctgtggcaacacagtcaccaacaccaccttctcctctgttcagtgtagactttcgtgcggatttctcagagagtgtgagtggtacaaaatttgaagaagatcatctttcccattattctccctggtcttgtggcaccataggctcctgtataaatgccattgattcagagcccaaagatgtcattgctaattcaaatgctgtgttaatggacctggacagtggtgatgttaagagaagagtacatttatttgaaacccagagaaggacaaaagaagaagatccaataattccctttagtgatggacccatcatctcaaaatggggtgcgatttccagatcttcccgtacaggttaccataccacagatcctgtccaggccactgcttcccaaggaagtgcgactaagcccatcagtgtatcagattatgtcccttatgtcaatgctgttgattcaaggtggagttcatatggcaacgaggccacatcatcagcacactatgttgaaagggacagattcattgttactgatttatctggtcatagaaagcattccagtactggggaccttttgagccttgaacttcagcaggccaagagcaactcattacttcttcagagagaggccaatgctttggccatgcaacagaagtggaattccctggatgaaggccgtcaccttaccttaaaccttttaagcaaggaaattgaactaagaaatggagagttacagagtgattatacagaagatgcaacagatactaaacctgatagggatatcgagttagagctttcagcacttgatactgatgaacctgatggacaaagtgaaccaattgaagagatcttggacatacagcttggtatcagttctcaaaatgatcagttgctaaatggaatggcagtggaaaatgggcatccagtacagcagcaccaaaaggagccaccaaagcagaagaaacagagtttaggtgaagaccatgtgattctggaggagcaaaaaacaattctgccggtaacttcttgctttagccagccactcccagtgtctattagcaatgcaagttgcctccccatcaccacatctgtcagtgctggcaacctcattctgaaaactcatgttatgtctgaagataaaaacgactttttaaaacctgttgcaaatgggaagatggttaacagctgaaaggaggttcatctttcaaatttgtgaccacaccatggaagcatttacactagctttttatatatataatatatattatataatgtatattttttttaaaaaaaagatattactgggggcatccatttcctgtggactctttgatacttcaagccctcttgcattagcattatgaaaaaaaaaaagaaaatttactttactagggtaacatgttcactttccagaaatgattggaatttggacaacatttaacttaagcttcaagcagctttttatgagtttgtagcaatccggtgcagtaactgagccatttcctattttaaatggcttctatagaaaattaacaactcagttattaaactagcaggatcctacaatgatacatctagtgaaagtagacttagttaacttatttatttctattttatgtttcactgagagaagtttccatctcattccagctgctttatttatctttttcatggaactttgcatggatttctttttctttttttaattttgaagagtggagttagatgttcttaccatagaattttacagggttatatactagcattctttactgcattatatgtaggagtgtggtgcagtgcttttatctgtagcatataatttttttttaattttccatttttcaagagtagtttctgctttgttaatatttatacacaggctacttgttgaagtaattaattaaaaatataaccaagtgcctaagtctttcagctgatgtactagatattaaattctcctaagttatgcagaatcgtttttacaattttgataaattatgcactaatgtaatggcagttttttaaaatgcagatttaagcctgtacattattgaatctgatgacttggcaaaagaatcaggtgctttcagctttcttgagaaaaccctgtatgtagcgtttgcactgactaacaagatggtattgctgggtttttaatttaaactaattaatttggttgttcattgcattatcttggttaaatattgtttattgttacttcatgttggggtttagtttttcttgttttttgactgttaggttgataagactatgaactgtgtaatagtagaacagtggctaacatttattcatacttaagaacatgaataatttctgccttgctaaaatgtgactgaaatggttttgacttggcatctgaaagtatacaatgtgttcaacaagtcatgcatcagatttgtgggaggtattgtactgaaacctaaatttcagtcaacatttgaaaagaagagctgggcattccttcctggtgatctttacctatagtttatctatctgtttttcttctgtttctttaagattagtttgacttttattattatttttttaattaacttctgtgaagttgtttactctgaaaattgtactggaatattttaagccaagctgatctttcaccaggtgtactgtatgtaagggcttttcctgctagcaagatgcttaaacaggatcatgttattggtcgtctgagctatttagttgttttacaaaaccacagcattgtatcagataagattttgataaaaagttttgtgcacatttccaggggcgggagggttgacatttccctgaaatttcttgattagaatgagtaaatactggtgtttgatacctgtcttaatgaacatgctcataaggtgactgataagttgtaaatatacctgagaaacaaaggggtagttttgatattctggtgtcagtatggaagatcttacacatttatttaatactcaaatgtatgaagatgtttgtttgtagcataacaacagcacagtagccttgacttagtttcctttggttagtactgtaccttttttgccatggccagtgctccccatccctatgaagacattttatttatttcactctgtaacctgaaatgaataggaacaagggttttaaaccatgttacattaacttttctgacattataaattagcctagaatattacaggaacatgattgttatataatttatatcagaacctttctataaatatgtgcttattacatttgaaatgcttccaatgtactttatttgctgtttgtaattccaaaaaggatatgcaaaccagtctgtctatttcatggatatttaatagtgagatcttccatgttgaaggtaatgtatttttttttaagattttaaaattgctattttgttacaaaatagagacctattaacagtttgagagctccttatgtgccctcagggaaagaaccctctgtgcaacagaactacacaaaacatcttcagcacgttctgagggtgaatatatactacataaattgatcttgtgtatttaaccttatctttttaattttaaaattgaaattttgaaacttggttgtgctctgctggagggggttgggataaactgcttagatgtttgcctacttgtccagtgaaattacatttgcatcagtatatgtatatacctgccaaccttattggtatgtctcagaacatttatattaaaataatgcttgtcttgcagcaggtgatcccataaaacaataactccctgttcttaaaaacttactctctttttcactaacaacataggaattgtttctgtgttgagattattctgtgttgcatccattctctatgtagtggtcaccttctgtctgtcatggtgggcttaatgtgaagtaaagccattggttctctgccactttcgaagaaagggcagttcatctgatccttcttcagaatggtacctactgatatcatcgaggaaaatgttacaaatcagacctaggatatgactttttaaaattgaggcatttcccgtcatttggcctttttaccaacaagatgtgatgtacaaatttggaatcaaaggatacaaagcaacaagagaggaaatgtgtaatgtgggtaaccaaactgcatatgttacctattgtctaatcagaaaaaatagtctgaggtctggaaagcaggaaagtggtggttattttctttcattttttgtgtttttgttttttaatttctaagttccattctgaaatccatgtgccgcattcagttactgtggttgtagcatcagtttttttgtggtttcatttcattttatgaattcagaggaagttacatatatattttttctagttggtacctgaacaaagcagattcccttgcctttgctgccacgtcttattttcaatgccatgtgataaaccagtgtcatacatgaaagttgtgcattgtaattttcaaaaaaaagggagttcattaggccagtggcactgatttttccttcccatcatagctatttattctagtaagaggataataaaagaaatttcctatacaagaactgaaattttccatttgtatggatctagtcactttcagatttcaatttgaggttaagtatataaagcacatcccaattttatatgctgccttgagaaaattacaggatgcacggcaatttgtaggaatttcaaatgggatcatttaaacatttgaaaaattattttaaaaaccatctagtttgcttttggattttagacattaaagcctatgttgtcttgttaacaggggtggaatgtataaccatcagattcagcatgtgatttcacctttgaatctgagtatttcttccctatcttctttgagtcatttttggagcagactgtcaccagtattgataactaagcattaaagggaaaagttgcattgcaactatgcattggtttcctggaagaacttttcttttgttttagtgaatgaagaggcttgatgggatcacttactgtaactccttctacataaggaccccttctgcaagcagaacacaaaagaacatgctcaaggagtatcccattttctggataaattgaagaagtttgctagtaatgtctttatactagcgtcttccttgtatccctttgctggcaagggaatacaaggcgtcaagaccacagatcaaaacaccccacatttgagtggagtcttatttttactccaagagcagttattcccttctagtctaaaattggcagttttttcttttttttaataaaatttttaaaatattcccaaaccagtggaacacagacactggctgcacttagtactgccaaaagccaaggtcatttgcacatattccatcaacctgtcgagaattaggcctcactttataacccaaggcatggaagtgcatgcattctcttagctgggcaaacaattatactgtagttgtgatacaacacatgtggcttttatttgtactgcacatatccactgtacagccacttgggagtatcgtggttagcttgcagcaactgctgtctgcatttatactgtttattgcatattcttttccctggaagtgaaagagaaatgtttttcttgttgcattgattacattttataaatttgcttagctggaaagtttgggaaaagaggcctgtttgtcaattgtacaaccgattgtgaagctctagtgtgaatatttttacgtctgtattagacattttctttgcaaatctattgttcgattgaaatgtaaatgaaattaaagatggtgtacacccatcatgtaaaaagcaggcaccatctctaagatggatttaatgctcatttttaaggcatatactcagcttctatttaaaactataatttaaaataattctgtacaatgaaatggggaatatatatgggaataaattctattccatttatttcaatttgaatttccaaattgtaatgtttccctttgtgctataggaataggattaaatgggggaagactaggatttataaggcctgtatatggggggagggcagagatggaacaatgagggttgtgatgatagtgaatagcaaagagtgaattctgtgtgtttttgctgtagcactgaagtgaagagatattagctttggctgttcacaaaatagagcatcatgattttcagtgtttgagagaaaattgatggaaaaagtttgcagtacttgacatgtatttgcatgcacaaaataaaattatttgtccaccttaaaa

SEQ ID NO: 1856 - DNA, 1669 bp, Homo sapiens
  source 1..1669: mol_type = genomic DNA
gcgctgcccggctcccggccctgccggcctcctcccttggcgccgcggccatggcggccagcgcgaagcggaagcaggaggagaagcacctgaagatgctgcgggacatgaccggcctcccgcacaaccgaaagtgcttcgactgcgaccagcgcggccccacctacgttaacatgacggtcggctccttcgtgtgtacctcctgctccggcagcctgcgaggattaaatccaccacacagggtgaaatctatctccatgacaacattcacacaacaggaaattgaattcttacaaaaacatggaaatgaagtctgtaaacagatttggctaggattatttgatgatagatcttcagcaattccagacttcagggatccacaaaaagtgaaagagtttctacaagaaaagtatgaaaagaaaagatggtatgtcccgccagaacaagccaaagtcgtggcatcagttcatgcatctatttcagggtcctctgccagtagcacaagcagcacacctgaggtcaaaccactgaaatctcttttaggggattctgcaccaacactgcacttaaataagggcacacctagtcagtccccagttgtaggtcgttctcaagggcagcagcaggagaagaagcaatttgaccttttaagtgatctcggctcagacatctttgctgctccagctcctcagtcaacagctacagccaattttgctaactttgcacatttcaacagtcatgcaggtggaagtgctgcatcagtaaatgctaattttgctcattttgataacttccccaaatcctccagtgctgattttggaaccttcaatacttcccagagtcatcaaacagcatcagctgttagtaaagtttcaacgaacaaagctggtttacagactgcagacaaatatgcagcacttgctaatttagacaatatcttcagtgccgggcaaggtggtgatcagggaagtggctttgggaccacaggtaaagctcctgttggttctgtggtttcagttcccagtcagtcaagtgcatcttcagacaagtatgcagctctggcagaactagacagcgttttcagttctgcagccacctccagtaatgcgtatacttccacaagtaatgctagcagcaatgtttttggaacagtgccagtggttgcttctgcacagacacagcctgcttcatcaagtgtgcctgctccatttggagctacgccttccacaaatccatttgttgctgctgctggtccttctgtggcatcttctacaaacccatttcagaccaatgccagaggagcaacagcggcaacctttggcactgcatccatgagcatgcccacaggattcggcactcctgctccctacagtcttcccaccagctttagtggcagctttcagcagcctgcctttccagcccaagcagctttccctcaacagacagctttttctcaacagcccaatggtgcaggttttgcagcatttggacaaacaaagccagtagtaaccccttttggtcaagttgcagctgctggagtatctagtaatccttttatgactggtgcaccaacaggacaatttccaacaggaagctcatcaaccaatcctttcttatagccttatatagacaatttactggaacgaacttttatgtggtcacattacat

SEQ ID NO: 1857 - DNA, 2126 bp, Homo sapiens
  source 1..2126: mol_type = genomic DNA
aaatgctctggctccggtggtgacaggttgtccagcttcttacagccatcttcactgaaactaaggttaactcctcactctctatggacggctactctctatttccaagggcgtgaagaatttccctcttctcctgtgctttcatctaaaagttctccctggataattatcattgcagtggagtgcctggattggacatcctcatctgggtcaactaaaaaaagaaagcatgcaagacgacagcatagaagcttctacttccatatctcagcttctaagagagagctatttagctgaaaccagacatcggggaaacaatgagaggagtcgagcggagccctcctccaacccttgccatttcggcagtccttctggggccgctgaaggaggcggaggccaagatgaccttccagatctttcagcctttctgagccaagaagaattagacgaaagtgtcaatttggcaagactggccatcaattacgaccctttggagaaggcagatgaaactcaagctagaaaacgactttctcctgatcagatgaaacactcacctaatttaagttttgagcctaacttctgccaggataaccctcgaagtcccaccagctctaaagaaagcccccaggaggcaaaaaggccacagtattgttctgaaacccagtccaaaaaagtatttttaaataaggctgccgacttcattgaagagctatcctcccttttcaaatcccacagctccaaaaggattagacctcgtgcctgcaaaaaccacaagagtaaactggaatctcaaaacaaagttatgcaggaaaacagctccagtttctcagatctgtcagaaagacgagaaagatcttctgttcccatccctatccctgcggataccagggataatgaagtgaatcacgccctggaacagcaggaagccaagaggcgtgaagcggagcaggctgccagtgaggcggctggtggagacactacaccagggtcttccccttcatctctgtactatgaagaacctctggggcaacctccccggttcactcaaaagttacggagcagagaagttccagaaggaactcgagtacagttggattgcatagtggtaggaattccaccacctcaagtaaggtggtactgtgaaggcaaggagcttgaaaattccccagatattcacatcgtccaggcaggaaatctgcactcactgaccattgcggaagcctttgaagaggacacaggacgctattcctgctttgcttctaacatctatgggacagattcgacttctgctgagatttatatagaaggggtttcttcttctgactcagaaggcgaccctaacaaggaagagatgaatcgaatccagaagccaaatgaggtgtcatctcctcccactacctctgcagtcattcctccagcagtaccccaagcccagcatttggtggcccaacctcgtgtggcaaccatccagcagtgtcagagccccaccaattacttgcagggattggatggaaaacctatcattgcagctcctgtgtttacaaagatgctacaaaatttgtcagcttctgagggtcagctggttgtctttgaatgcagagtaaaaggagctccatctcctaaggttgagtggtatagagaagggactttaatagaagattctccagattttaggattttacagaaaaaacctcgatccatggcagagccaggtaaagatgatttcaactttaatttattagtatatgagtgattttatatatacaagaatacataatgaagttacactgagatgaataaaaagtgaaaaataaagttttaggaaaaaaagatccaaatgggccgggtgcagtggctcatgtctgtaattccagcactttgcgaggccgaggcgggcggattacttgagatcagaagttcaagaccagcctggcctacatgacaaaatgaaaccccatctctactaaaaatataaaaattagccaggcatagtggcgcacgtctgtaatcccagctacctgggaggctgaggcaggagaatcacttgagcctgggaggtggaggttgcagtgagccgagatcgtgacactacagtccagctgcgcgacagaacaagaatctgtctc

SEQ ID NO: 1858 - DNA, 3905 bp, Homo sapiens
  source 1..3905: mol_type = genomic DNA
acttccggccagcccctcccccgcctccctcgcgtggccacctccccctctgccttctcctacccagtctcttccccaactctccccacccctggtgctctccgccccgcttgcctcccgttcttccccgcccgctccatccgggtcgctgacggctgtctctggactggacagcagtggcgtccgcttttctctaaggaacccgataagaactccattttctgttgatgtggagacatagggtacctccaactttccggggtttcagaagagaattttttattgaaactggaagaccaaaataattacaagcatgttgtgctggggaaatgcatcctttgggcagctaggtttgggtggaattgatgaagaaattgtactagagcccagaaaaagtgacttctttataaataaaagggtccgagatgtaggatgtggactcagacatactgtgtttgttctggatgatggaacagtgtacacatgtggatgtaatgatctaggacagctaggtcatgaaaaatccagaaagaaaccagagcaggttgttgccctggatgcccaaaatattgtagctgtttcatgtggagaagctcatacgttagcgctaaatgacaaaggccaggtgtatgcttggggtctcgattctgatggacagcttggcctggtaggatcagaggaatgcatcagagtacccagaaatattaaaagtttgtcagatatccagattgtacaggttgcttgtggttactatcattcacttgcactttctaaagcaagtgaagtcttctgttggggacagaataaatatggccaattgggtttaggtactgactgtaaaaagcaaacttcaccgcagctgcttaagtctttgcttggaatccctttcatgcaagttgcagcaggaggagcccatagttttgtactcaccctttctggagctatctttggatggggacgcaacaagtttggtcagctaggtcttaatgatgaaaatgataggtatgttcctaatttactaaagtcactaagatctcagaaaatagtttatatttgttgtggagaagatcatactgctgctctaaccaaggaaggtggagtgtttacttttggagctggagggtatggtcagttgggccataattctaccagtcatgaaataaacccaaggaaagtttttgaacttatgggaagcattgtcactgagattgcttgtggacggcagcacacttctgcttttgttccttcatcaggacgaatttactcttttgggcttggtggtaatgggcagctgggaaccggttcaacaagcaacaggaaaagcccctttactgtaaaaggaaattggtacccctataatgggcagtgtctaccagatattgattctgaagaatatttctgtgtaaaaagaattttctcagggggagatcaaagcttttcacattactctagtccccagaactgtgggccaccagatgacttcagatgtcccaatccgacaaagcagatctggacagtgaatgaagctctaattcagaaatggctgagctatccttctggaaggtttcctgtggagatagccaatgagatagatggaacgttttcttcctctggttgcctaaatggaagttttttagctgttagcaatgatgatcactatagaacaggtaccagattttcaggggttgatatgaatgctgctaggcttttattccacaaacttatacaacctgatcatccgcagatatctcagcaggtggcagctagtttggaaaagaatcttattcctaaactgactagctccttacctgatgttgaagcattgaggttttatcttactctaccagaatgtcccctgatgagtgattccaacaatttcacaacaatagcaattccctttggtacagctcttgtgaacctagaaaaggcaccactgaaagtacttgaaaactggtggtcagtacttgaacctccactattcctcaagatagtagaactttttaaggaagttgtggtacatcttttgaaactctacaagatcggtattcccccttctgaaagaagaattttcaacagttttcttcatactgcattaaaggttttagaaatactacatagggtaaatgagaaaatgggacagattatacagtatgataaattttatatacatgaagtacaagaattgatagacataagaaatgattatatcaactgggtccaacagcaggcctatggaatgttggcagatatccctgttacaatctgtacatatccatttgtatttgatgcccaagcaaaaactactctgttacagaccgatgcagtcttacagatgcagatggctattgatcaggcccacaggcagaatgtctcctctctttttctcccagtgattgaatctgtgaatccctgcttaattctagtggtgcgtagagaaaatattgtaggagatgcaatggaagtccttaggaaaacaaagaacatagattacaagaagccactcaaggttatatttgttggagaagatgctgtggatgcaggaggggtgcgcaaagaatttttcttgctcatcatgagggaattattggatcctaaatacggcatgtttaggtattatgaagattccaggctcatttggttttctgataagacatttgaagacagtgatttgttccatttgattggtgttatctgtggcttagcaatttataattgtaccattgtggacctccattttcctttggctttatataagaaactactgaaaaagaagccatccttggatgatttgaaagaactaatgcctgatgttgggagaagcatgcaacagttactggattatccagaagatgacatagaggaaacattttgtcttaattttacgatcacagttgaaaactttggtgcaacagaagtgaaagagctggttctaaatggtgcagacacagctgttaacaaacaaaatcggcaagagtttgtcgatgcttatgtggattacatattcaataaatcagtggcttccttatttgatgcttttcatgcgggctttcataaggtctgtggaggaaaagtccttctgctctttcagcctaatgaactacaagcaatggtcattggaaatacaaattatgattggaaggaactggaaaagaatacagaatacaaaggggaatattgggcagaacatcctacgataaaaattttttgggaagtatttcacgaattaccattggaaaagaagaaacagtttctgttatttttgacaggtagtgatcgcattcctattcttggtatgaagagtctgaaactagtcatccagtccacaggaggtggtgaggagtatctcccagtttcccatacttgttttaatcttctggatcttccaaaatatacagaaaaagaaactctacgctctaaactgatccaagctattgatcacaatgaaggcttcagtttaatataactttggagttataactattcagtttagtgcaaaagcattaaactatttgtgtttttcttgtggtgatgaattcagcaaggtgacagaggtactattataattcttacttgcagaatgttcaatctacgagtgttcatggaagccaaaaaatattaaaggaaaatgaacaaactgttaatattattgtacagaaccatggattttttttgaccatcttctaataaacatagcaagtattatgaatacattaaagttttactaacatgaattttaagagtttgcatatttcagaaatgatctggtgtgagtgcatggaaatattgcttaatttttcttcaatcattgagtgaaaaacctttaactttggcctgcaatagtcatttgattattttttcattttgtaaataatgttaagttttgtaataaaatagttatgttctga

SEQ ID NO: 1859 - DNA, 1730 bp, Homo sapiens
  source 1..1730: mol_type = genomic DNA
acgcgctggctgactggggtcggcgtttagttcagcgcagcgactcggggacctggagctgacgcctagtacgtatgaggaagaacggggtgggtggctgcctgagtctggaggcgacgcctcggttgtgcagtctgaacctgcccttctcagctgagggtgctgacagcaaggggtgggaggcgggccccgagtccccagctgtggacacttgtattagctttaatagaagagaaatggaggagccatagaatattaaggatgaattcaggaaggcctgagaccatggaaaacttgcctgctctctacactattttccaaggagaggttgctatggtgacagactatggggcctttatcaaaatcccaggctgtcggaagcaaggtctggtccatcgaactcatatgtcatcctgtcgggtggataagccctctgagatagtagatgttggagataaagtgtgggtgaagcttattggccgagagatgaaaaatgatagaataaaagtatccctctccatgaaggttgtcaatcaagggactgggaaagaccttgatcccaacaatgttatcattgagcaagaagagaggcggaggcgatccttccaggattacactgggcagaagatcacccttgaggctgtcttgaacactacctgcaagaagtgtggctgtaaaggccactttgcaaaagattgtttcatgcaaccaggtgggactaaatactctctgatacctgatgaggaagaggaaaaggaagaggcaaagtcagcagagtttgagaagcctgaccctacaaggaatccttctagaaaaagaaagaaggagaagaagaaaaagaaacatagagataggaagtcatctgactctgacagctcagactctgagagtgatacaggcaagagggcaaggcacacatcaaaagacagcaaggcagcaaagaagaagaaaaagaagaagaagcacaagaagaagcacaaggagtgagagtataaagagtgtagggggtggttgagagtaagaaaccaggagccttgtgccttgagactcctggaaagactcaatagtgagaatatagcctcccaccccattaacttcgctcccatgggagatggcttcccctcatgcaacaggcaggtttgggagttagaggtcaaaagcagctgcctgaatgagttgttgtttccttatcactcctggtccctttgcaagtgaaccctgcagctcacccattcattcacccaacttccttcattcagcaggaggtcctattaccctctccagctgccactgccagagctggattcctgtaaaggagtccaggctagagccacagagactgttgtggaggtgagttcggctgtagttagagtgattggacccttcctattggtctgtcctgggccaactggtgggtgatctctgctgcatccaacatgggagcagagactggcagcaggaggggggaacatggtgagaagtggtgctcacttttcccattcctcctaacatagttctactatgctagaagtggcatccagcggccacagctagaaaacagtctgcagtgtgacttaacttgtgtattgcattccagcagaccactgaaccagacagcgaagccaagatcattgttctactttgtatttactactgtgtgaatcagttgattctacttcaggtccttgcttaaattcctgtcactaaatggaaatgtgtttggttttaaa

SEQ ID NO: 1860 - DNA, 1867 bp, Homo sapiens
  source 1..1867: mol_type = genomic DNA
atgatcatcaattggaatcaagtctcagtcctgtggaagtgtttgctaaaacaatctgccagttatcaagacaggaggcaatcctggcggcgagcaagtatgaaagaaacgaaccggcggaagtcgctgcatcccattcaccagggcatcacagagctcagccggtctatcagtgtcgatttagcagaaagcaaacggcttggctgtctcctgctttccagtttccagttctctattcagaaacttgaacctttcctaagggacactaagggcttcagtcttgaaagttttagagccaaagcatcttctctttctgaagaattgaaacattttgcagacggactggaaactgatggaactctacaaaaatgttttgaagattcaaatggaaaagcatcagatttttctttggaagcatctgtggctgagatgaaggaatacataacaaagttttctttagaacgtcagacttgggatcagctcttgcttcactaccagcaggaggctaaagagatattgtccagaggatcaactgaggccaaaattactgaggtcaaagtggaacctatgacatatcttgggtcttctcagaatgaagttcttaatacaaaacctgactaccagaaaatattacagaaccagagcaaagtctttgactgtatggagttggtgatggatgaactgcaaggatcagtgaaacagctgcaggcctttatggatgaaagtacccagtgcttccagaaggtgtcagtacagctcggaaagagaagcatgcaacaattagatccctcaccagctcgaaaactgttgaagcttcagctacagaacccacctgccatacatggatctggatctggatcttgtcagtgactttatgagagtttctgccacaaggtgcccaagaggagaggaatgggaagagtgccccagcacgtggtgactgcgtgatttctgctcgttgcctttgaagataactggcaggactgactgtagaacactttgacttttttcaaaaagtgatggaatttgtacatccaaatgaatattgtatagacaattttcccaggaatgtgcaaaatgcttgaaagttcaaacttcttttttgaaatgatcttcagatccagtggcccattcttttatctttatcctgtgaaggtgtttttcaggttttgaaacaatccaaaaatcatttaggaccaagtctaaggaaacattttagtggccaagttggattccgattgtaaaggaatgatactaattttctagcatggctctgaaggtgattttaggtagaagagttttgaggctgggcgcaatggctcacgcctgtaatcctagcattttgggtgactgaggcgggtggattgcttgagcccagaagttgaagaccagcctgagaaataaggtgaaaccctgtctacaaaaaatacaaaaagttagctgggtgtggtggcgtgtgcctgtagtgctagctactcagaaggctgaggtgggaggattgtttgagcccaggaggttgaggctgcagtgagttctaattgcgccactgcactccagcctgagcgacagagtgagacactgtcttaaaaaaaattaaaaattgtaaaaaaatgaaaaaaaaagttttgagcattatttgcatcattgggatacatatgtcacttcacaagatgttcaatttgaaggaaataccactcattctctatgtcctgttgtctgtagtgtgcttcagtttttcatattgagttgacctaaatcctggattcatgacaagaaaggagtaagtactactattcattgttctatttgtttataatctgtattataaaattgcacataattaaaagctttcccttgtcttcatcta

SEQ ID NO: 1861 - DNA, 1915 bp, Homo sapiens
  source 1..1915: mol_type = genomic DNA
gcatgcgcccttggttggcgggagtttcggaggcggtgaccgtgacgtagaaggtggagaccgcttcaccctgatcagggagtatcggctgcgggtgcgcaaggcgtccaggagtgacctggggctgtggagagcgacccgtggccttgtgtttcagagtttaccacctaggatgacttcagtgactagatcagagatcatagatgagctcagccggtctatcagtgtcgatttagcagaaagcaaacggcttggctgtctcctgctttccagtttccagttctctattcagaaacttgaacctttcctaagggacactaagggcttcagtcttgaaagttttagagccaaagcatcttctctttctgaagaattgaaacattttgcagacggactggaaactgatggaactctacaaaaatgttttgaagattcaaatggaaaagcatcagatttttctttggaagcatctgtggctgagatgaaggaatacataacaaagttttctttagaacgtcagacttgggatcagctcttgcttcactaccagcaggaggctaaagagatattgtccagaggatcaactgaggccaaaattactgaggtcaaagtggaacctatgacatatcttgggtcttctcagaatgaagttcttaatacaaaacctgactaccagaaaatattacagaaccagagcaaagtctttgactgtatggagttggtgatggatgaactgcaaggatcagtgaaacagctgcaggcctttatggatgaaagtacccagtgcttccagaaggtgtcagtacagctcggaaagagaagcatgcaacaattagatccctcaccagctcgaaaactgttgaagcttcagctacagaacccacctgccatacatggatctggatctggatcttgtcagtgactttatgagagtttctgccacaaggtgcccaagaggagaggaatgggaagagtgccccagcacgtggtgactgcgtgatttctgctcgttgcctttgaagataactggcaggactgactgtagaacactttgacttttttcaaaaagtgatggaatttgtacatccaaatgaatattgtatagacaattttcccaggaatgtgcaaaatgcttgaaagttcaaacttcttttttgaaatgatcttcagatccagtggcccattcttttatctttatcctgtgaaggtgtttttcaggttttgaaacaatccaaaaatcatttaggaccaagtctaaggaaacattttagtggccaagttggattccgattgtaaaggaatgatactaattttctagcatggctctgaaggtgattttaggtagaagagttttgaggctgggcgcaatggctcacgcctgtaatcctagcattttgggtgactgaggcgggtggattgcttgagcccagaagttgaagaccagcctgagaaataaggtgaaaccctgtctacaaaaaatacaaaaagttagctgggtgtggtggcgtgtgcctgtagtgctagctactcagaaggctgaggtgggaggattgtttgagcccaggaggttgaggctgcagtgagttctaattgcgccactgcactccagcctgagcgacagagtgagacactgtcttaaaaaaaattaaaaattgtaaaaaaatgaaaaaaaaagttttgagcattatttgcatcattgggatacatatgtcacttcacaagatgttcaatttgaaggaaataccactcattctctatgtcctgttgtctgtagtgtgcttcagtttttcatattgagttgacctaaatcctggattcatgacaagaaaggagtaagtactactattcattgttctatttgtttataatctgtattataaaattgcacataattaaaagctttcccttgtcttca

SEQ ID NO: 1862 - DNA, 1922 bp, Homo sapiens
  source 1..1922: mol_type = genomic DNA
gcaaggcgtccaggagtgacctggggctgtggagagcgacccgtggccttgtgtttcagagtttaccacctaggatgacttcagtgactagatcagagatcatagatgaacaatctgccagttatcaagacaggaggcaatcctggcggcgagcaagtatgaaagaaacgaaccggcggaagtcgctgcatcccattcaccagggcatcacagagctcagccggtctatcagtgtcgatttagcagaaagcaaacggcttggctgtctcctgctttccagtttccagttctctattcagaaacttgaacctttcctaagggacactaagggcttcagtcttgaaagttttagagccaaagcatcttctctttctgaagaattgaaacattttgcagacggactggaaactgatggaactctacaaaaatgttttgaagattcaaatggaaaagcatcagatttttctttggaagcatctgtggctgagatgaaggaatacataacaaagttttctttagaacgtcagacttgggatcagctcttgcttcactaccagcaggaggctaaagagatattgtccagaggatcaactgaggccaaaattactgaggtcaaagtggaacctatgacatatcttgggtcttctcagaatgaagttcttaatacaaaacctgactaccagaaaatattacagaaccagagcaaagtctttgactgtatggagttggtgatggatgaactgcaaggatcagtgaaacagctgcaggcctttatggatgaaagtacccagtgcttccagaaggtgtcagtacagctcggaaagagaagcatgcaacaattagatccctcaccagctcgaaaactgttgaagcttcagctacagaacccacctgccatacatggatctggatctggatcttgtcagtgactttatgagagtttctgccacaaggtgcccaagaggagaggaatgggaagagtgccccagcacgtggtgactgcgtgatttctgctcgttgcctttgaagataactggcaggactgactgtagaacactttgacttttttcaaaaagtgatggaatttgtacatccaaatgaatattgtatagacaattttcccaggaatgtgcaaaatgcttgaaagttcaaacttcttttttgaaatgatcttcagatccagtggcccattcttttatctttatcctgtgaaggtgtttttcaggttttgaaacaatccaaaaatcatttaggaccaagtctaaggaaacattttagtggccaagttggattccgattgtaaaggaatgatactaattttctagcatggctctgaaggtgattttaggtagaagagttttgaggctgggcgcaatggctcacgcctgtaatcctagcattttgggtgactgaggcgggtggattgcttgagcccagaagttgaagaccagcctgagaaataaggtgaaaccctgtctacaaaaaatacaaaaagttagctgggtgtggtggcgtgtgcctgtagtgctagctactcagaaggctgaggtgggaggattgtttgagcccaggaggttgaggctgcagtgagttctaattgcgccactgcactccagcctgagcgacagagtgagacactgtcttaaaaaaaattaaaaattgtaaaaaaatgaaaaaaaaagttttgagcattatttgcatcattgggatacatatgtcacttcacaagatgttcaatttgaaggaaataccactcattctctatgtcctgttgtctgtagtgtgcttcagtttttcatattgagttgacctaaatcctggattcatgacaagaaaggagtaagtactactattcattgttctatttgtttataatctgtattataaaattgcacataattaaaagctttcccttgtcttca

SEQ ID NO: 1863 - DNA, 2354 bp, Homo sapiens
  source 1..2354: mol_type = genomic DNA
accctgatcagggagtatcggctgcgggtgcgcaaggcgtccaggagtgacctggggctgtggagagcgacccgtggccttgtgtttcaggtacggaggttccggactggacgggcgtcaggaagtcacagacttgtcctctgatgtggccccgcccgccgccgcactaatctcttcggcgtcgtacccgtcggcccagctcgacccgccgcagccccggccccgaccgtggacactgggggtccccgagggcgctgcgacctcctcccggagtttaccacctaggatgacttcagtgactagatcagagatcatagatgaaaaaggaccagtgatgtctaagactcatgatcatcaattggaatcaagtctcagtcctgtggaagtgtttgctaaaacatctgcctccctggagatgaatcaaggcgtttcagaggaaagaattcaccttggctctagccctaaaaaagggggaaattgtgatctcagccaccaggaaagacttcagtcgaagtcccttcatttgtctcctcaagaacaatctgccagttatcaagacaggaggcaatcctggcggcgagcaagtatgaaagaaacgaaccggcggaagtcgctgcatcccattcaccagggcatcacagagctcagccggtctatcagtgtcgatttagcagaaagcaaacggcttggctgtctcctgctttccagtttccagttctctattcagaaacttgaacctttcctaagggacactaagggcttcagtcttgaaagttttagagccaaagcatcttctctttctgaagaattgaaacattttgcagacggactggaaactgatggaactctacaaaaatgttttgaagattcaaatggaaaagcatcagatttttctttggaagcatctgtggctgagatgaaggaatacataacaaagttttctttagaacgtcagacttgggatcagctcttgcttcactaccagcaggaggctaaagagatattgtccagaggatcaactgaggccaaaattactgaggtcaaagtggaacctatgacatatcttgggtcttctcagaatgaagttcttaatacaaaacctgactaccagaaaatattacagaaccagagcaaagtctttgactgtatggagttggtgatggatgaactgcaaggatcagtgaaacagctgcaggcctttatggatgaaagtacccagtgcttccagaaggtgtcagtacagctcggaaagagaagcatgcaacaattagatccctcaccagctcgaaaactgttgaagcttcagctacagaacccacctgccatacatggatctggatctggatcttgtcagtgactttatgagagtttctgccacaaggtgcccaagaggagaggaatgggaagagtgccccagcacgtggtgactgcgtgatttctgctcgttgcctttgaagataactggcaggactgactgtagaacactttgacttttttcaaaaagtgatggaatttgtacatccaaatgaatattgtatagacaattttcccaggaatgtgcaaaatgcttgaaagttcaaacttcttttttgaaatgatcttcagatccagtggcccattcttttatctttatcctgtgaaggtgtttttcaggttttgaaacaatccaaaaatcatttaggaccaagtctaaggaaacattttagtggccaagttggattccgattgtaaaggaatgatactaattttctagcatggctctgaaggtgattttaggtagaagagttttgaggctgggcgcaatggctcacgcctgtaatcctagcattttgggtgactgaggcgggtggattgcttgagcccagaagttgaagaccagcctgagaaataaggtgaaaccctgtctacaaaaaatacaaaaagttagctgggtgtggtggcgtgtgcctgtagtgctagctactcagaaggctgaggtgggaggattgtttgagcccaggaggttgaggctgcagtgagttctaattgcgccactgcactccagcctgagcgacagagtgagacactgtcttaaaaaaaattaaaaattgtaaaaaaatgaaaaaaaaagttttgagcattatttgcatcattgggatacatatgtcacttcacaagatgttcaatttgaaggaaataccactcattctctatgtcctgttgtctgtagtgtgcttcagtttttcatattgagttgacctaaatcctggattcatgacaagaaaggagtaagtactactattcattgttctatttgtttataatctgtattataaaattgcacataattaaaagctttcccttgtcttcatcta

SEQ ID NO: 1864 - DNA, 2233 bp, Homo sapiens
  source 1..2233: mol_type = genomic DNA
tgcgcccttggttggcgggagtttcggaggcggtgaccgtgacgtagaaggtggagaccgcttcaccctgatcagggagtatcggctgcgggtgcgcaaggcgtccaggagtgacctggggctgtggagagcgacccgtggccttgtgtttcagagtttaccacctaggatgacttcagtgactagatcagagatcatagatgaaaaaggaccagtgatgtctaagactcatgatcatcaattggaatcaagtctcagtcctgtggaagtgtttgctaaaacatctgcctccctggagatgaatcaaggcgtttcagaggaaagaattcaccttggctctagccctaaaaaagggggaaattgtgatctcagccaccaggaaagacttcagtcgaagtcccttcatttgtctcctcaagaacaatctgccagttatcaagacaggaggcaatcctggcggcgagcaagtatgaaagaaacgaaccggcggaagtcgctgcatcccattcaccagggcatcacagagctcagccggtctatcagtgtcgatttagcagaaagcaaacggcttggctgtctcctgctttccagtttccagttctctattcagaaacttgaacctttcctaagggacactaagggcttcagtcttgaaagttttagagccaaagcatcttctctttctgaagaattgaaacattttgcagacggactggaaactgatggaactctacaaaaatgttttgaagattcaaatggaaaagcatcagatttttctttggaagcatctgtggctgagatgaaggaatacataacaaagttttctttagaacgtcagacttgggatcagctcttgcttcactaccagcaggaggctaaagagatattgtccagaggatcaactgaggccaaaattactgaggtcaaagtggaacctatgacatatcttgggtcttctcagaatgaagttcttaatacaaaacctgactaccagaaaatattacagaaccagagcaaagtctttgactgtatggagttggtgatggatgaactgcaaggatcagtgaaacagctgcaggcctttatggatgaaagtacccagtgcttccagaaggtgtcagtacagctcggaaagagaagcatgcaacaattagatccctcaccagctcgaaaactgttgaagcttcagctacagaacccacctgccatacatggatctggatctggatcttgtcagtgactttatgagagtttctgccacaaggtgcccaagaggagaggaatgggaagagtgccccagcacgtggtgactgcgtgatttctgctcgttgcctttgaagataactggcaggactgactgtagaacactttgacttttttcaaaaagtgatggaatttgtacatccaaatgaatattgtatagacaattttcccaggaatgtgcaaaatgcttgaaagttcaaacttcttttttgaaatgatcttcagatccagtggcccattcttttatctttatcctgtgaaggtgtttttcaggttttgaaacaatccaaaaatcatttaggaccaagtctaaggaaacattttagtggccaagttggattccgattgtaaaggaatgatactaattttctagcatggctctgaaggtgattttaggtagaagagttttgaggctgggcgcaatggctcacgcctgtaatcctagcattttgggtgactgaggcgggtggattgcttgagcccagaagttgaagaccagcctgagaaataaggtgaaaccctgtctacaaaaaatacaaaaagttagctgggtgtggtggcgtgtgcctgtagtgctagctactcagaaggctgaggtgggaggattgtttgagcccaggaggttgaggctgcagtgagttctaattgcgccactgcactccagcctgagcgacagagtgagacactgtcttaaaaaaaattaaaaattgtaaaaaaatgaaaaaaaaagttttgagcattatttgcatcattgggatacatatgtcacttcacaagatgttcaatttgaaggaaataccactcattctctatgtcctgttgtctgtagtgtgcttcagtttttcatattgagttgacctaaatcctggattcatgacaagaaaggagtaagtactactattcattgttctatttgtttataatctgtattataaaattgcacataattaaaagctttcccttgtcttca

SEQ ID NO: 1865 - DNA, 2012 bp, Homo sapiens
  source 1..2012: mol_type = genomic DNA
cgagtgttggcggggactgagcctcctgcttgaggtagttgtttttactcccagtccccaggctcacgagccccacgcgcgctcaatctgccctcccgcttctcctcgccactccgagttctgcgccctcgagatccagcgcatccgcggggtgggcgggtcctggcggctctttgccctcttccaacatggccgccgctgcctctgtgacaggcagggtcacgtgggcagcctcgcctatgaggtcgctggggctcggccggcgattgtcccttcccggaccccgtctcgatgcggtgactgccgctgtcaacccgagcctgagcgatcatggcaacgggctcgggcggggaacgcgtggcagcggctgcagcggcggcagtttggtggcggactggggcggcggagcggcggcggcggcggcggtggcactggcactggccccggccctgagcaccatgcggcggggcagctccgagagcgagctggcggcccggtgggaggcggaggcggtggctgcggccaaagcggcggccaaagctgaggccgaggccacagcggagacggtggcggaacaggtccgcgtggacgcgggcgcggccggggaaccggagtgcaaggcaggggaggagcagcccaaggtcctggccccggccccggcgcagcccagtgcggctgaggaggggaacacccaggtccttcagcggccgccgcccacgctgcccccgtccaagccgaagccggtgcagggcctctgcccgcacgggaagccccgggacaagggccgaagctgcaagcggagctcgggccacggttccggcgagaacggctcccagcggccggtcaccgtggacagctccaaggccaggacctccctggatgccctgaagatcagcatccgccagctcaagtggaaggagttcccatttggccggcgcttgccttgtgacatctactggcatggagtttcatttcacgacaatgacatattctccggtcaagtgaacaagtttccaggcatgacggagatggtgcgtaaaattactctgagcagagcagtgagaaccatgcagaatctctttcctgaggagtacaacttctaccctcgctcatggattctgcctgacgagttccagctctttgttgctcaggttcaaatggtgaaagacgatgacccctcctggaagcccacttttatcgtgaaacctgatggtggttgtcagggtgatggaatctacctcattaaagaccccagtgacatccgcctggcagggaccctccagagcaggccagcggtggtccaggagtacatctgcaaacctctccttatcgacaagctcaagtttgatattcgtctgtatgtcttactcaagtccttagaccccttagagatttatatagccaaagacggactctctaggttttgtaccgagccatatcaggagcccacccccaaaaacctgcaccgcatctttatgcacttaaccaactattcactgaacatccacagcggcaacttcatccactcggacagtgctagcactggcagcaaaaggactttttccagcatcctttgtagactgtcttccaaaggcgttgacatcaagaaggtctggtctgacatcatctccgtggtgattaagacggtcatcgcgctgactccagagctcaaagtcttctaccagtcagacatccccacggggaggccgggccccacgtgcttccaggtaaccattgccagttcccagcctgcgtttccagccttgaccggcctcaagagggctctctggcttcgtgtaggatgagtgatcggggtgggatggccagaggaggggacagtgttggtggtgctgtgggcttgggtgttaaacctgggcccaacttccaagctttctgtttgctccctgtgtgatttggggcaagctacttcccctctgttacctgtaaaatgaaatgaagaatacctatcttaaaaggttcttgtaagaattaaatgagataacacatgtaaa

SEQ ID NO: 1866 - DNA, 2193 bp, Homo sapiens
  source 1..2193: mol_type = genomic DNA
ggagctcgggccacggttccggcgagaacggctcccagcggccggtcaccgtggacagctccaaggccaggacctccctggatgccctgaagatcagcatccgccagctcaagtggaaggagttcccatttggccggcgcttgccttgtgacatctactggcatggagtttcatttcacgacaatgacatattctccggtcaagtgaacaagtttccaggcatgacggagatggtgcgtaaaattactctgagcagagcagtgagaaccatgcagaatctctttcctgaggagtacatctgcaaacctctccttatcgacaagctcaagtttgatattcgtctgtatgtcttactcaagtccttagaccccttagagatttatatagccaaagacggactctctaggttttgtaccgagccatatcaggagcccacccccaaaaacctgcaccgcatctttatgcacttaaccaactattcactgaacatccacagcggcaacttcatccactcggacagtgctagcactggcagcaaaaggactttttccagcatcctttgtagactgtcttccaaaggcgttgacatcaagaaggtctggtctgacatcatctccgtggtgattaagacggtcatcgcgctgactccagagctcaaagtcttctaccagtcagacatccccacggggaggccgggccccacgtgcttccagattttaggctttgacattcttctaatgaaaaatctgaagcctatactacttgaagtaaatgcaaatcccagtatgagaatcgaacatgagcacgaactttctccaggggtgtttgaaaatgtccccagcctcgttgatgaagaagtgaaagtggctgtgatcagagacactctgcgcctcatggacccacttaagaagaaaagagagaatcagtctcagcagcttgaaaaaccattcgctggaaaggaagatgctttggacggcgagctgaccagtgctccagactgcaacgccaaccccgaagcccacctgccttccatttgcctcaagcaggtgttccccaagtacgcaaaacagttcaactacctgcgcctggtggacaggatggcaaatttgtttatccggttcctgggcatcaaggggacaatgaagttggggccaacaggctttcgtaccttcataaggagctgcaaactcagcagcagcagcctgtccatggctgccgtggacatcctctacattgacatcacacggaggtggaactccatgaccctggaccagcgggactcagggatgtgtctgcaggccttcgtagaagctttctttttcctggctcagaggaagttcaagatgctgccacttcatgagcaggtggcctcactgattgacctttgcgagtaccacctgtccctgctggatgaaaaacgcctggtgtgtggccggggcgtcccgtcggggggccggcccccacaccgtggccctccccaggagccctccccctcggcccagccagcaggggacaaccccccaccccgcaccagctgtgccaataagctctcccatcccagacataccctgtcctgagggccactctgtcctcctggaaaacggaagacgagagcagctttcagggctggagcgccccaggcattctgcctgcagaggaatggcaggcaggctgccgaggggcccagctgaggtccccacgaactgtctctgtgtgcggctgagctgtgcttcaccaggctggctggttctcacctgccttcctcctcacacctcctggtgatacaccctgtttctgagtcatcagtcatcggacatatgacatctaaaacgtgacagatggcaccttctattctgggctcacaggaagcaccaactggggcaaatctgttgtatttggggcacaggacacaatcgatcccaaggcccggagctgtggagaggaagccgagtgttaggatctgctgccggggcctccacgcgcccaccgggaaaagcctgagaacatcgtgtttatttcctgccgcccgttccgagagaaggaagtggaaatatcaagtaggcatctgcgaatctcccatcccagtcatgtgctacatgggtgtagtgaacagattaacctcatttagttcattagcttgcctgttgctgcaatatttggtttgttattaattaagaaaaaattaattaagaa

SEQ ID NO: 1867 - DNA, 4358 bp, Homo sapiens
  source 1..4358: mol_type = genomic DNA
tcgtggggcgggggtggggcgggactgagggcggagtgtgagcgggctcggttttgggccgcggcgggagcgggagtcgccgccactcgagtgcgcaggcgcctggcgattaccggtctcaccatggagcggaaagtgcttgcgctccaggcccgaaagaaaaggaccaaggccaagaaggacaaagcccaaaggaaatctgaaactcagcaccgaggctctgctccccactctgagagtgatctaccagagcaggaagaggagattctgggatctgatgatgatgagcaagaagatcctaatgattattgtaaaggaggttatcatcttgtgaaaattggagatctattcaatgggagataccatgtgatccgaaagttaggctggggacacttttcaacagtatggttatcatgggatattcaggggaagaaatttgtggcaatgaaagtagttaaaagtgctgaacattacactgaaacagcactagatgaaatccggttgctgaagtcagttcgcaattcagaccctaatgatccaaatagagaaatggttgttcaactactagatgactttaaaatatcaggagttaatggaacacatatctgcatggtatttgaagttttggggcatcatctgctcaagtggatcatcaaatccaattatcaggggcttccactgccttgtgtcaaaaaaattattcagcaagtgttacagggtcttgattatttacataccaagtgccgtatcatccacactgacattaaaccagagaacatcttattgtcagtgaatgagcagtacattcggaggctggctgcagaagcaacagaatggcagcgatctggagctcctccgccttccggatctgcagtcagtactgctccccagcctaaaccagctgacaaaatgtcaaagaataagaagaagaaattgaagaagaagcagaagcgccaggcagaattactagagaagcgaatgcaggaaattgaggaaatggagaaagagtcgggccctgggcaaaaaagaccaaacaagcaagaagaatcagagagtcctgttgaaagacccttgaaagagaacccacctaataaaatgacccaagaaaaacttgaagagtcaagtaccattggccaggatcaaacgcttatggaacgtgatacagagggtggtgcagcagaaattaattgcaatggagtgattgaagtcattaattatactcagaacagtaataatgaaacattgagacataaagaggatctacataatgctaatgactgtgatgtccaaaatttgaatcaggaatctagtttcctaagctcccaaaatggagacagcagcacatctcaagaaacagactcttgtacacctataacatctgaggtgtcagacaccatggtgtgccagtcttcctcaactgtaggtcagtcattcagtgaacaacacattagccaacttcaagaaagcattcgggcagagataccctgtgaagatgaacaagagcaagaacataacggaccactggacaacaaaggaaaatccacggctggaaattttcttgttaatccccttgagccaaaaaatgcagaaaagctcaaggtgaagattgctgaccttggaaatgcttgttggcacaaacatttcactgaagatattcaaacaaggcaatatcgttccttggaagttctaatcggatctggctataatacccctgctgacatttggagcacggcatgcatggcctttgaactggccacaggtgactatttgtttgaacctcattcaggggaagagtacactcgagatgaagaccacattgtgcacattatagagctgataggcagaattccaagacgcttttccctcagtgggaaatattcacaagacttcttcagtcacagaggtgacctgaaacatatcacgaagctgaaaccttggggcctttttgaggttctagtggagaagtatgagtggtcgcaggaagaggcagctggcttcacagatttcttactgcccatgttggagctgatccctgagaagagagccactgccgccgagtgtctccggcacccttggcttaactcctaagcccctgcccagcaccacagcagagatcacacactgaccctccgcccttccccttcaagcattttcctcttcccttttcagggtgaagctcttccttcaagagtttctagatcttgttttttttttaatccaacatgttcatttgggtttgcttacttgaccctgtggagatccccacagccattgggcatcctaggtgaatttggccttggttgggctctgccaaagactaatggactaaaatgtgaaacagcctcttgccctgtacctttccttcccattaggacatcctttaaattataagcatcctttttgaaaagagctatgaaggtgtatgagcccatccttttattcattgactctaagagtcaaattttctagtgcatatcctattgccagcataaggatgaggagggggaaagggtcttaattctatgtacagcagagacattaaacttgctgtgtccgggctgcatcatcttcctggactgtttctgttgttctctgtgttcacattttttcctgcaacttttaagctactgtcttttttaaatagctatatgaacaccaaatttgggtaccattttatcactgttcaaagcactgtcaaattcctttcatcctttaatagttaagatctttgaatcttcagtctgatttttaatgtaagcaaaaacagaaccattgaatagtaatttcttgagaacctcaggtgttctataaacagtcctttcctgtatgtcttctattaccctaagaccagagttattttggttggttgttttgttttattttttgtttttgtatccatggctggcactttactcattgcacttgagtttattgccccataactaaaggatcaggatgatggtagaacggagatctgggtttcagagctttcccatttaagaaaaatagatcttgagattctgattcttttccaaacagtcccctgctttcatgtacagctttttctttaccttacccaaaattctggccttgaagcagttttcctctatggctttgcctttctgattttctcagaggctcgagtctttaatataaccccaaatgaaagaaccaaggggaggggtgggatggcacttttttttgttggtcttgttttgttttgttttttggttggttggttcgttattttttaagattagccattctctgctgctatttccctacataatgtcaatttttaaccataattttgacatgattgagatgtacttgaggcttttttgttttaattgagaaaagactttgcaattttttttttaggatgagcctctcctagacttgacctagaatattacatattcctccagtaagtaatactgaagagcaaaagagaggcaggattggggtcacagccgcttcttcagcatggaccaagtgggccttggggattgcagcgttctcgaagtggctgtaggactcgaatttacagaaagccacagaggtgcaacttgaggctctgctagcaagccaccagtgaggctattgggtaaccacctttctatacaggagattggaatctactttgtcatttatccaccacagtgacaaaggaaaagtggtgccgttatgcaatccatttaactcataaacatattactctgagtaactggccagccattcatcggatccttcattgggtactcctgaaatcagacatgttcctgtagaaagaattttaagttaggctttctatgcacctatcaagaatcaagagaatagattgtatcaaacaacggcagggaaatccttcagcaattctaatccactttgggttttcagctgtttttacatctaaagcaatagactagaactgaattatcttctacatagtaaaatcacaattgtggaattacaggaattctggtgatattaaggtgaaataacaaaacacaaaaggccctattttaacagttgatgtgacagtaagttttaatagaacctgtaacttcattttggaaatgcttctccaccaaataagggctttttcccctatttaaggagccagatggattgaaagatgtggaaataggcagctgtagatcttgatcttccaggtaccccatgtacctttattgagcttaattataatactgtcaaattgccacgatctcactaaaggatttctatttgctgtcagttaaaaataaagccctaaatacatttttattctttctactgagggcattgtctgttttctttgtaaatgccgtacaataaacaaattatttaataaccta

SEQ ID NO: 1868 - DNA, 4592 bp, Homo sapiens
  source 1..4592: mol_type = genomic DNA
aaatagaacaaaactaaccttgccaggtttccaagcttggatctctaacactccttcaacgttcaccccggcgttcctccccgctgcgccccctccctctccttgccgccccctcctcgggagcaggtggtaggctccgcgcccaacgcgcaagcgcgcggcatcgtggggcgggggtggggcgggactgagggcggagtgtgagcgggctcggttttgggccgcggcgggagcgggagtcgccgccactcgagtgcgcaggcgcctggcgattaccggtctcaccatggagcggaaagtgcttgcgctccaggcccgaaagaaaaggaccaaggccaagaaggacaaagcccaaaggaaatctgaaactcagcaccgaggctctgctccccactctgagagtgatctaccagagcaggaagaggagattctgggatctgatgatgatgagcaagaagatcctaatgattattgtaaaggaggttatcatcttgtgaaaattggagatctattcaatgggagataccatgtgatccgaaagttaggctggggacacttttcaacagtatggttatcatgggatattcaggggaagaaatttgtggcaatgaaagtagttaaaagtgctgaacattacactgaaacagcactagatgaaatccggttgctgaagtcagttcgcaattcagaccctaatgatccaaatagagaaatggttgttcaactactagatgactttaaaatatcaggagttaatggaacacatatctgcatggtatttgaagttttggggcatcatctgctcaagtggatcatcaaatccaattatcaggggcttccactgccttgtgtcaaaaaaattattcagcaagtgttacagggtcttgattatttacataccaagtgccgtatcatccacactgacattaaaccagagaacatcttattgtcagtgaatgagcagtacattcggaggctggctgcagaagcaacagaatggcagcgatctggagctcctccgccttccggatctgcagtcagtactgctccccagcctaaaccagctgacaaaatgtcaaagaataagaagaagaaattgaagaagaagcagaagcgccaggcagaattactagagaagcgaatgcaggaaattgaggaaatggagaaagagtcgggccctgggcaaaaaagaccaaacaagcaagaagaatcagagagtcctgttgaaagacccttgaaagagaacccacctaataaaatgacccaagaaaaacttgaagagtcaagtaccattggccaggatcaaacgcttatggaacgtgatacagagggtggtgcagcagaaattaattgcaatggagtgattgaagtcattaattatactcagaacagtaataatgaaacattgagacataaagaggatctacataatgctaatgactgtgatgtccaaaatttgaatcaggaatctagtttcctaagctcccaaaatggagacagcagcacatctcaagaaacagactcttgtacacctataacatctgaggtgtcagacaccatggtgtgccagtcttcctcaactgtaggtcagtcattcagtgaacaacacattagccaacttcaagaaagcattcgggcagagataccctgtgaagatgaacaagagcaagaacataacggaccactggacaacaaaggaaaatccacggctggaaattttcttgttaatccccttgagccaaaaaatgcagaaaagctcaaggtgaagattgctgaccttggaaatgcttgttgggtgcacaaacatttcactgaagatattcaaacaaggcaatatcgttccttggaagttctaatcggatctggctataatacccctgctgacatttggagcacggcatgcatggcctttgaactggccacaggtgactatttgtttgaacctcattcaggggaagagtacactcgagatgaagatcacattgcattgatcatagaacttctggggaaggtgcctcgcaagctcattgtggcaggaaaatattccaaggaatttttcaccaaaaaaggtgacctgaaacatatcacgaagctgaaaccttggggcctttttgaggttctagtggagaagtatgagtggtcgcaggaagaggcagctggcttcacagatttcttactgcccatgttggagctgatccctgagaagagagccactgccgccgagtgtctccggcacccttggcttaactcctaagcccctgcccagcaccacagcagagatcacacactgaccctccgcccttccccttcaagcattttcctcttcccttttcagggtgaagctcttccttcaagagtttctagatcttgttttttttttaatccaacatgttcatttgggtttgcttacttgaccctgtggagatccccacagccattgggcatcctaggtgaatttggccttggttgggctctgccaaagactaatggactaaaatgtgaaacagcctcttgccctgtacctttccttcccattaggacatcctttaaattataagcatcctttttgaaaagagctatgaaggtgtatgagcccatccttttattcattgactctaagagtcaaattttctagtgcatatcctattgccagcataaggatgaggagggggaaagggtcttaattctatgtacagcagagacattaaacttgctgtgtccgggctgcatcatcttcctggactgtttctgttgttctctgtgttcacattttttcctgcaacttttaagctactgtcttttttaaatagctatatgaacaccaaatttgggtaccattttatcactgttcaaagcactgtcaaattcctttcatcctttaatagttaagatctttgaatcttcagtctgatttttaatgtaagcaaaaacagaaccattgaatagtaatttcttgagaacctcaggtgttctataaacagtcctttcctgtatgtcttctattaccctaagaccagagttattttggttggttgttttgttttattttttgtttttgtatccatggctggcactttactcattgcacttgagtttattgccccataactaaaggatcaggatgatggtagaacggagatctgggtttcagagctttcccatttaagaaaaatagatcttgagattctgattcttttccaaacagtcccctgctttcatgtacagctttttctttaccttacccaaaattctggccttgaagcagttttcctctatggctttgcctttctgattttctcagaggctcgagtctttaatataaccccaaatgaaagaaccaaggggaggggtgggatggcacttttttttgttggtcttgttttgttttgttttttggttggttggttcgttattttttaagattagccattctctgctgctatttccctacataatgtcaatttttaaccataattttgacatgattgagatgtacttgaggcttttttgttttaattgagaaaagactttgcaattttttttttaggatgagcctctcctagacttgacctagaatattacatattcctccagtaagtaatactgaagagcaaaagagaggcaggattggggtcacagccgcttcttcagcatggaccaagtgggccttggggattgcagcgttctcgaagtggctgtaggactcgaatttacagaaagccacagaggtgcaacttgaggctctgctagcaagccaccagtgaggctattgggtaaccacctttctatacaggagattggaatctactttgtcatttatccaccacagtgacaaaggaaaagtggtgccgttatgcaatccatttaactcataaacatattactctgagtaactggccagccattcatcggatccttcattgggtactcctgaaatcagacatgttcctgtagaaagaattttaagttaggctttctatgcacctatcaagaatcaagagaatagattgtatcaaacaacggcagggaaatccttcagcaattctaatccactttgggttttcagctgtttttacatctaaagcaatagactagaactgaattatcttctacatagtaaaatcacaattgtggaattacaggaattctggtgatattaaggtgaaataacaaaacacaaaaggccctattttaacagttgatgtgacagtaagttttaatagaacctgtaacttcattttggaaatgcttctccaccaaataagggctttttcccctatttaaggagccagatggattgaaagatgtggaaataggcagctgtagatcttgatcttccaggtaccccatgtacctttattgagcttaattataatactgtcaaattgccacgatctcactaaaggatttctatttgctgtcagttaaaaataaagccctaaatacatttttattctttctactgagggcattgtctgttttctttgtaaatgccgtacaataaacaaattatttaataacctacatgtttccaaaaatctctgttcatttgttgtccaaattgctctgccctgagtaaaaggaggaaaaga

SEQ ID NO: 1869 - DNA, 1793 bp, Homo sapiens
  source 1..1793: mol_type = genomic DNA
gcaaagccccaccccggtgcgcgggtatggcggccagcctgtggatgggcgacctggaaccctacatggatgagaacttcatctccagagcctttgccaccatgggggagaccgtaatgagcgtcaaaattatccgaaaccgcctcactgggatcccagctggctactgctttgtagaatttgcagatttggccacagctgagaagtgtttgcataaaattaatgggaaaccccttccaggagccacacctgcgaaacgttttaaactgaactatgccacttacgggaaacaaccagataacagccctgagtattccctctttgtgggggacctgaccccggacgtggatgatggcatgctgtatgaattcttcgtcaaagtctacccctcctgtcggggaggcaaggtggttttggaccagacaggcgtgtctaagggttatggttttgtgaaattcacagatgaactggaacagaagcgagccctgacggagtgccagggagcagtgggactggggtctaagcctgtgcggctgagcgtggcaatccctaaagcgagccgtgtaaagccagtggaatatagtcagatgtacagttatagctacaaccagtattatcagcagtaccagaactactatgctcagtggggctatgaccagaacacaggcagctacagctacagttacccccagtatggctatacccagagcaccatgcagacatatgaagaagttggagatgatgcattggaagaccccatgccacagctggatgtgactgaggccaacaaggagttcatggaacagagtgaggagctgtatgacgctctgatggactgtcactggcagcccctggacacagtgtcttcagagatccctgccatgatgtagccaggccaaaggacaagccaggttgcatgatgtgagggagatgagagactcctttttaaaaattgtgaaacctttttggaaatatgatttgtaagattttaataatgactgtttttggagatcatgaatgtttctacaacactgctgcattcatttgaccatttgagtttgaagaccaagggaacaacttttaaacaaggttcaaattggtttccttcacaggaatcctttgtccaggtagttatccacataggacagtttgggattatccaaaactgggatgagcagcttgggataattcacacactaaagcctgagttcaaggtttctcagttgacaggtaggtatgtaaatcagggttctctggagtatttgtaggacctgccatatttgagtcctaacttggtgcaagtctggcagctaggtagaaaaggcactctagcaggtgtggtaggagcacgccccagaaggtagaatgtggtggggtgtgatggaacaggccagttggcctaagaattagtacttgctctaataatgggtttcatctattttcatgagttgcagcatctgcatatacaaggcctggatcactttaggatcaatattttgacacgggagaaggcagctcagaaaggattaaggaagatagctcaaagccaaagcagaccctccgtgtgaactttatactgctcacttccgtgtttcccaagtaaatggggaaactgtccaaccttgtcatgtgttgggacttactgcttgaggcaaagcattcatcctacatcataaaaaatctccaaagatctctttaagggctgggcatggtggctcactttgggagatggattgcttgagctcgggaagagaccagttcggtctctacaaaaaaatacaaacacaaatata

SEQ ID NO: 1870 - DNA, 713 bp, Homo sapiens
  source 1..713: mol_type = genomic DNA
caatgtttaagcaagaagaaggaaaaactgacagaagagcttcagaaactacagaaagacatagagatggcagaacgcaatgaggatcaccacctgcaggtccttaaagaatctgaggtgcttcttcaggccaaaagagccgagctggaaaagctgaaaagccaggtgacaagtcagcagcaggagatggctgtcttggacaggcagttagggcataaaaaggaggagctgcatctactccaaggaagcatggtccaggcaaaagctgacctccaggaagctctgagactgggagagactgaagtaactgagaagtgcaatcacattagggaagtaaaatctcttctggaagaactgagttttcagaaaggagaactaaatgttcagattagtgaaagaaaaactcaacttacacttataaagcaggaaattgaaaaagaggaagaaaatcttcaggttgttttaaggcagatgtctaaacataaaaccgcttttctacagtaagcaagtatctctatgatcagaaaaaaagttaatatttaaatatctgtatttcaaaggccaaaaaattgttatataaatctcagtctgtatttcaaagtatttttaatttattttgatcaattttatataaaatgcttttagttgattcttttatgtagaagcaaatgctttggaaccagatctttgttaattaaatgtttttgttaaaa

SEQ ID NO: 1871 - DNA, 3920 bp, Homo sapiens
  source 1..3920: mol_type = genomic DNA
cacttttatacttcccttcgtttgcatgtgttacttcttcagcctaggtctttccccttccgttcgttcttcaaaacccaggcaaaacacctcttcctctgagcagccttctcagaacttttctcccatgtggccagaggaaggagagacttctgtctatctcttctgctagaccccgaactctttggaggcagaggttatccacaagaggcttggcaaatgtttctcagtcatagttggactgtttgaaaaattaaaggttctatttgtctgtcagtttcatccgtgacatttaactttttataccaaagtcttagaatctaccatcattttttgggccattgataccactttaaccacagttaatttcagcttttggcaggaaagagaggaaacatcctgtgatgtttcagcactgcatttttttccccatctcattcaggagaatgaagtttctagattagaagacataatgcagcatttaaaatcaaagaagcgggaagaaaggtggatgagagcatccaagcggcagtcggagaaagaaatggaagaactgcatcataatattgatgatcttttgcaagagaagaaaagcttagagtgtgaagtagaagaattacatagaactgtccagaaacgtcaacagcaaaaggacttcattgatggaaatgttgagagtcttatgactgaactagaaatagaaaaatcactcaaacatcatgaagatattgtagatgaaattgagtgcattgagaagactcttctgaaacgtcgctcagagctcagggaagctgaccgactcctggcagaggctgagagtgaactttcatgcactaaagaaaaggtttgtcttcttgtggtttggggtgtgagctcagtgtggacaaaaaatgctgttgaaaagttcactgatgccaagagaagtttattgcaaactgagtcagatgctgaggaattagaaaggagagctcaggaaactgctgttaacctcgtcaaagctgatcagcagctaagatcgctccaggctgatgcaaaggatttggagcagcacaaaatcaagcaagaagaaatcttgaaagaaataaacaaaattgtagcagcaaaagactcagacttccaatgtttaagcaagaagaaggaaaaactgacagaagagcttcagaaactacagaaagacatagagatggcagaacgcaatgaggatcaccacctgcaggtccttaaagaatctgaggtgcttcttcaggccaaaagagccgagctggaaaagctgaaaagccaggtgacaagtcagcagcaggagatggctgtcttggacaggcagttagggcataaaaaggaggagctgcatctactccaaggaagcatggtccaggcaaaagctgacctccaggaagctctgagactgggagagactgaagtaactgagaagtgcaatcacattagggaagtaaaatctcttctggaagaactgagttttcagaaaggagaactaaatgttcagattagtgaaagaaaaactcaacttacacttataaagcaggaaattgaaaaagaggaagaaaatcttcaggttgttttaaggcagatgtctaaacataaaaccgaactaaagaatattctggacatgttgcaacttgaaaaccatgagctacaaggtttgaagctacaacatgaccaaagggtatctgaattagagaagactcaggtggcagtgctagaggagaaactggagttagagaatttgcagcagatatcccagcagcagaaaggggaaatagagtggcagaagcagctccttgagagggataaacgagaaatagaacgaatgactgctgagtcccgagctttacaatcgtgtgttgagtgtttgagcaaagaaaaggaagatctccaagagaaatgtgacatttgggaaaaaaagttggcacaaaccaaaagggttttagcagcagcagaagaaaatagcaaaatggagcaatcaaacttagaaaagttggaattgaatgtcagaaaactgcagcaggaactagaccaactaaacagagacaagttgtcactgcataacgacatttcagcaatgcaacagcagctccaagaaaaacgagaagcagtaaactcactgcaggaggaactagctaatgtccaagaccatttgaacctagcaaaacaggacctgcttcacaccaccaagcatcaggatgtgttgctcagtgagcagacccgactccagaaggacatcagtgaatgggcaaataggtttgaagactgtcagaaagaagaggagacaaaacaacaacaacttcaagtgcttcagaatgagattgaagaaaacaagctcaaactagtccaacaagaaatgatgtttcagagactccagaaagagagagaaagtgaagaaagcaaattagaaaccagtaaagtgacactgaaggagcaacagcaccagctggaaaaggaattaacagaccagaaaagcaaactggaccaagtgctctcaaaggtgctggcagctgaagagcgtgttaggactctgcaggaagaggagaggtggtgtgagagcctggagaagacactctcccaaactaaacggcagctttcagaaagggagcagcaattggtggagaaatcaggtgagctgttggccctccagaaagaggcagattctatgagggcagacttcagccttctgcggaaccagttcttgacagaaagaaagaaagctgagaagcaggtggccagcctgaaggaagcacttaagatccagcggagccagctggagaaaaaccttcttgagcaaaaacaggagaacagctgcatacaaaaggaaatggcaacaattgaactggtagcccaggacaaccatgagcgggccaggcgcctgatgaaggagctcaaccagatgcagtatgagtacacggagctcaagaaacagatggcaaaccaaaaagatttggagagaagacaaatggaaatcagtgatgcaatgaggacacttaaatctgaggtgaaggatgaaatcagaaccagcttgaagaatcttaatcagtttcttccagaactaccagcagatctagaagctattttggaaagaaacgaaaacctagaaggagaattggaaagcttgaaagagaaccttccatttaccatgaatgagggaccttttgaagaaaaactgaacttttcccaagttcacataatggatgaacactggcgtggagaagcactccgggagaaactgcgtcaccgggaagaccgactcaaggcccaactccgacactgtatgtccaagcaagcagaagtattaattaaaggaaagcggcagacagagggcactttacacagtttgaggagacaagtagatgctttaggggaattggtcaccagcacctctgcagattcagcgtcatcacccagtctgtctcagctggagtcttccctcacagaggactctcaacttggacaaaatcaggaaaagaatgcctcagccagatgaggaatactgtcttgtgtaaatatattcaaggaaaacacctccactacctcactgacttcataattggaatgtcacatggtttttttaatcaagatgcagtgaactgagattctgaaactccactgtagtttactttgcctgtaccattaatgccaatgtttttataaatcacttgtacatagtacatatgggaatagttgcatatgggaatttaaaccaacatgtggctgagcctttttttttttaatcttcgtaacatgtttaaaaaaaaacagtgattttaactgcatatttgaacctacaaactggtaaatcttattaacaaaaagaatgtacttaaggccctctttatttatagtgtcgagttatttttgaattttgcttaaaatctatttttcatatgaaaataaaagataacaatcaa
